United States Patent Application Publication US 2022/0290142 A1 - sequence listing, part 16

SEQ ID NO: 15408 - DNA, 333854 bp, Homo sapiens
gctttcactccggctcgctctccggagagtcctgttccagacttctcagggtttttacagcacaaacaactgcatacggcccgaggggaggctgaaaaggacttgtgtgtggtggttttattgcctgtcatcactttgctggcctcctcccgactggagcctggaggttcacagtggatttctttctgccgaagacaccaaggcactgaggaaggatcccttctccttctgttgactctttctatttttatggtaagtgcttacgttgaatgagctgctctgttgctgcagtgaactgaaccgttcgttccccctcttcccagctaagcttagtgaccttccttctgcatttcctctgttttcatggatcttgtctgggatgatccagcttcaaaaatgccaggggtcatttgcctggagtgtttgtctttttatcttttttccataaacgtgagctcttctgctgtgatacgaatataagtgctctgtctttgtccttgaagcagcagccggggaaatgtgttcacgatggtaaactgcagcagcgtgcagggaatctgtggaggatgactgacaaatttgggcaggatgaatcctcagtgtgccaggggcactcactcaggatcagaagggccgggggtgacctgcccacatagcaaactcttccatctttgtggataaagatgagcacacacgtgtgagttatgttgagtctgctgtgggcagctgtgttttctgcacctgcccgtgtgggtctgggatgaccctatatcttgtggggtttacaacttgggcaggaacattctcagcaggaggaatcctgagctggcagacggagtagactgcatgacctcattgcttctttcccttctgagtctcagggtacccagttctgcaaaccatattttacaggctcttcagagagtggtagggcagtgatgacaggaacatttttgagttgacaacatagttttgtcctcctgctaggagataaaatactttgaggttattagaatggttagacttttctaggagaacataagcaggtttctgacgaagactatggatgtggcagattgtttattccagggacattactcttacaatagtgctctaatttttcacctggtctcctgaggtttgctgcaaagagcatcacaacttcaagtctattactggcagcttcttgacgcccaaaggaaaccaagaacattttattagtttcactcctgtgcgttgcaggagtctctcttaacagggattttttttttttttttttggtagcaggtgtgtcgaactattttggtcaaagcatcattccaaagaatagcttcgcagttgtaattctatttagttattttcaagtcttggaccggaggtgggttatcttatttgtgtaggtttttccattctggtccatttcactctagagagggttcttgccaaatgtaattcagtctctgattcataaggtactgaactaatacaatgtgattttttgtgataagtgaggggagagaatgtggggtgaaatttccagtctctcctcctgctctttgggagtttggaatgtaaagttccctaactgcttgctcattttcactacttttatgtcccctgttcatgtggatttttcttgaaatagtggtgatgacatcagacatatgcctttaccttcttctctgggtccaaagtagatgcgtttgttgttgttctgtttttgtttgttttttatttcagtgaagggttccttgcatttgtaaaagcatacgtttaaataaaaaacaagaatttgtagatgtttacatgttagccctgttcaagagtaaaaccagcacagaggttaacagcaaaaaaaaaaaaaattcaaaacaatttttaaaatattatcagcattgcttggcttagctgttctaatatccactcttccctacactcgattgtggttcgcggcaatactgtattgtaatttgactgtcagactgctctgcttcctctttaattctttaatgtttagctgtttactttcatccttaatggtgtgttcttactttgcttaatctttttttctctttttctaattgaaaggatgttatatagtgcctggtaactcaactgaggatactcattaagatggaaagtgttagaatcagcttgggtgtcatggaaatagactcagtatttctcactgcaggcaatttcagaatcatttagaacatatttcattttaattagtagcaactttagccttgagaaaaaacattatttaggtttcctttattttgctaaacagattgtgtacctatgcaatcagaattgtatatatatgtgcaattgtttatatatatgtgtgtgtatatatatatatatacacacatatacaagcgtgtacacaaatgtactgttgtttgtactgtgtcaattgtatatacttaaaaaattgttgtagcatgcccatttggagaacagaaggaaaattcctcagatattgctttaactggcttttttttttttttggtaaggatttccccacttcctagaccccacttccagataatgcctttaagaatttctttgaattgggagagtgcatttttcagcatttccttgtctcacagcatggtgtcatgttaattcctttgcagggtctctgaaagcagcatagaaaactactgcaggaaaaattgataaaagctgtgctgagcggagcctgtagcctcttggtgtgatgaagtcactgcaacattttgtgtgtatttattttgctgctatgccttgcaactgattttgcttgcagacttagcaaattgaagttatttaaaatgggtctggaaacacctagattggtgtagatgcagttgatgcagttattctttttttttttacactctttaattacaactatcatcaaaactgtgctttcactgtttcttttggtggtggtttaatttgaaacttgcagcttaaattataaaccaagtctcccttttaaagtcctcttgccttctgctttctctcttcttcacttttgccattttatatatgtgaacatgcctacatgtacacagacaaactcagacagtgaaaaatgtacaacaattaatgaagagatgattacagcttttcttttagtaaccaaactccaaatgttgaaaccataatcatgtaactgagggaagaaattgtttctgttagtataaatataacctcatacttctgcaggcattcttatcattgaaactgttttccatagttgattaccaggaccagaaatagaattgattttgcattttaattaatgacattctggatctgtctaggttggactgccctcaaaccttgatatgtttactgtctaaaaggtctttgtgttaagagggggagtttatgggtgttataaagtaaaatcatttgattatgtgatacagcttttctttggtaactgaatgaaccatatcattagaatgttggctgaatttttatgttgcttttcccaatattatttagccaatataatcccttttaccatctctttgagccccttttacagagtacaaagagttatgtgcgactcccacatgaggcttcttagagggaagactgttcttcagcagagattcagaactacttctagcaccagctctggtaatctacttggaaaggaacttgcaattcaattggcaactcaggcagattgtataaaataggagaaatgcttcatgagctgtgttgaatactgtatttttgatctgtgcctccctactaaattcatttaggactgtctttactagatcagttttgcagggaaaaaaacatgtcctcagtagcataataatctatccagactgtcataaatgtttatattgcaagttatacttcttaggagttggagggagatggcagaattttggaggagaaccaaatcacagccccaaaataatgcaagacgaaaggggaacattcttcctatgtttagcatttaattctccagtcaggctgtttgctcttaagtctgaagagcgaagaaatgtaaaaacacataatgacaggttttgtgggctttttctctaatagaaatctttaacccttaattaggcatctgctgactgaccttttggtgtgtgtgagccagcagccattcttatagaaagcagacataatgtaatacagtaggaattcagttacttacatctttcctgttggtcccccacaggggacctcctctgagtgtcagagagggagtgagtgtctggagaccatcagagaccacagccagtcacagagagatatcttcaagccccttggattccagttcagcccccaccactaactggctgtgtgactcaaattctgtatctgctacatgaagcttggaccagataatcccagaggactgtaacccagccattaaaaattgtgaagtattaattcacttctatttgctactagatgaacgattatttctaagacaattgacccatattagacattcctggagggagtaggctgtaacttcctttgaccctgcaaagcccccagaactgtgacagtgacgtgagcatcagtgttactcagaaaagtgtgatcatggtacccttcatgaacagggcgaatatgtatatgatgactatctgcttatcctggcacattttggaaagtctcttgtgattatcaaaaaggaccttggccaggggcggtggcccatgcctgtaaatcccagcactttggtaggccgaggtgggcagatcatgaggtcaagagatcgagaccatcctggccaacatggtgaaactccatcttacgaaaaatacaaaaattagctgggcatggtggggcgcgcctgtaatcccagctactcaggaggctgaggtaagagaatcacttgaacccaggaggcggaggttgcagtgagccgagattgcgccattgcactccagcctggcaacagagcaagactccgtctcaaaaaaaaccaaaaggaaccttaaagagcaatttacctaatcctctcattccacagaagttaaggaagtgatatgacttccccaaggctggagactcacatagcacctgggccggatgactttagtgtaaggtgcattcatttactcagaaccctgctccattcccagtgtggggccccttccatgatacacagctgacactgtgccattcattgttcacaaatctgctttgtggcatctgtctcactggtgtccattatttctgggttcatttcatgcagattacgtggctgtaccagtcagagtgagtcatatcaagcaaatgtttatggtaatttgtttatgcttgtgtggaaatgcatttttatgttgaaattctgcttttcctataaacatttaaagaattttacaaaaactatgcatagtttttcccctttgcttaaactatttaaatgatcattgatttctatgtagagggggtgatgtttgtgaattaattccttcaccattcactcatttacctgttacttactgagcacctattgtgtccaccctactgccaagcagcagagatctagtggtgagacagccagacacatccactcctcttgaggagttcagagtctacttatacttcatggagttggttgtcttttcattgtcagccagtgttctatttactgattcacaatttctcaaagaatctggttgaaaaatagtttgcttgggcagatttttttccctgtggttattccattgagaaattcttttcgtagaagggcacctttgctgtcgtggtgacatatatcttccaattttcgaagatattatttttagcttctgattttgtgacctgactgaacagaagagacaaattagctaaacttatttgcactattgttgtgattcatgaaatgacaattcgtgtctttgataaaacttacctgtttcctagaatcttaaactgacagcctggatagcacagtgtccatggaacaaatcacagattaaataccacactcctttgccttgcatatcaggcccataacagtgtacagcccttgcttccttgttctatgtctggttccgaagttccatggaatgctctaggagtaccaaaaccatttgcaatactcagaaatttacagtgctctcacttgcctcagtgcctttgcacatgctatttcctcttctctcttcagactaaactttcaaagcaaatttgatgtcatctcccttggaagtgttttgacacttgccatccttattgacttcttttgcccagagctgagctaggtatactatctctgttgttctgtatccctcaggaccttacagactgtttgtctacttgtctctctctctctctctctctctctctctctcaaacagactttttgtttcttgagggcagggactatatgttctgtacctcaaatcttggtttagtgactgctgtagagcagataaccaataatccttgaacaaacagatgggaatcaccatctaaaacctatggtgctgtcattggcagcttctgctctatgtggagagtttaatttttcaaaccaatgtgactatgaattatactgagaaggataaagagattggcagacatcctgatgtagttcattagaaattctattcaaaaccccaggaaatgtttctgctttcaaatgagtttcagcaaagtaaacaatgaaaatttattaagtgccttctataagcaaagcattgcattaagtaccaaggaatgaaagatttttttttttttttaaaagcacaattcctatcctccagaaagccacaaactagtgagggtttgtcccatgtgtcaatgactggtaatgaggctgactgctataaacagagactgtagtcagctgtatacttgcagataaggcagggggtagaaagggcattctagacagaggggctggcttgagaaggaacttaaagttatgatggtcgtgccagcaatcaggtgactttgatggagcaggggctggggggtggggtggagggaaggtggaaaatgcaaggaaagatgaggaacgttgtgtggggagatgggaatggtatcaggaactctaaatgctgtttattatttttgaaagttggaggatagttaatagggtctggaaaatgccaaatagaaatttgtttggaatctcttctcaggtttaattaaatcaaaagtctgtattctgcagggaaggagagcagttgcgcagtacataactgcataacacgtttttttctcacccatcccttttgcccttgagggtacactttgccattcaaagtcatcacaaggaagtgaagccgggaagtctaacttaaatcaatcagtttagacctgaagggagtttagcattgagatcactgaggtgcctgttaacaaactgtccagggtgtggaaaaccccctgggtctttggtgctgtatttctactgtaaaaatttagttatttttttatttgacaattaactttgtgctatttacaaggaatacagttgttttatgaaccagtgagatatgcatgtgtaagtttgtttcatgtaggtgaaaaagtggcttggaaaattctgtctgtgatagattcaattcatcatcaaaatatgatttctgcttgccttgtccctcctttctttttcctaaaagaatgagtgaacatattcttagggaatggtaagttggtaggttttctgcatctcataattagatctgaccagatgactctccaccttgaaattagtctaaaaagattgaagaatttggaggaagatctctagatatcttgaccagagcatgaaagcaaataaatattgcttgtggagtgagagatgatgtggtagaaaagaagctgcattcattcattcatttattcattcatttgctcactccacaagtacttaatcgagcacgtactatgtttcagcttcctgccttcatggagctaacattctggtcagagtgggagggggagacagaaaaacacattagcaaatacgaagcaagtcagatggtgatcagtgctatggagggaaaaaaaatgaagaatgctttggctgctattatcttcacatttggttctctttaaagttatttaacttatgcattatggttaggttattttcttctctccactcattgtttttagctgcctatttttatattcactttctgacaattctatgataaaccaccatcttgagggtttttttcctcctagataaaagcagcttttgaaataattggagtactgtgaacaaaagttataatgaagcatttacttctggaattgatttaaagaaaagtactacggacatcaaagcccattagtatttttctcaagactaaagttgtcagaatttagaggaacatgggatggaaatggatctgtccctcacttaactctgagaggagcagtttggggtgttctgagaggatgggagcttggagtatagggaactccaaccccgggagcagagaaatggtgggatcacccatgagcagagctcattcagagaagagacgggagtgaattagaaagtgaacatgcaaaaattgagcaaggaatttctctttgggaggaagggaggtagggaggataaaaccagtgagataaatgtcagtgaataaacaacatttacaagaacaaattctgcccaatatagaacatctgagtgagctggttagtggaaatggtgcctcgagataaaaaacaatatttagggatttcccaatattcccatcctatattttgtgggatctttaattcagcatcaatgttccattttactgcaagcaagcctttagtcaatactttctaccttgcttctaaaataattaggatttaaaggaaaatgtctcctagcggtggagtgcctgggctctggggcagacattgtacccatccttactctgccacttactcacctttggaccttgggcaagtgagctggtctccttgtgcatcattgtcctcaattataaaaatgagattaactaattacccctacctcagagttgttatgagtgataaatgaaatagtccatggagagcccttagcacagtgcctgcaagatgattgcattatctaacaattgttaacctgttattaccatgacttgtctctctggtgttagtggtttagagaagttctcacatgtatatatgtattttcccccttagcagagctttttttttttcttcttcaacttttaagttctgcggtaatgtgcaggatgtgcaggtttgttacataggtaaacgtgtgccagggtggtttgctgcccagatcaacccaccacctgggtattaagcccagcatccattagctattcttcctgatactttccctgcccacactgacaggccccagtgtgtgttgttccccacagtgtgtccatgttttctcatcattgagctcccacttataagtgagaacacatggtgtttggttttctgttcctgtgttagtttgctgaggataatggcttccagctccattcatgtccttgagaaggacatgatcttgttcctttttatggctgcatagcattccatggtatatatatacgacatttcctttagccagtctatctttgatgggcatttaggttggttccatgtctttgctattgtgaacagtgctgcagtgaacaaatgcatgcatgtatctttataataaaatgatttatatttctttgggtatatacccggtaatgggattggtgggtcaaatggtatttctggttctaggtctctgaggaattgctacagtgtcttctgcaatggctgaagtaatttacactcccaccaacaatgtaaaagcagtccattttctccacaactttgacagcatctgtcgtttcttgactttttagtaatcacccttctgactggcgtgagatggtatttcattgtggttttgatttgcatttatctaatgatcagcgatgctgagtttttttcatgtttattggccgcatgtatgtcttcttttgagaagtatctgttcatgtcctttgcccactttttaatggagtggtttgtttctttttcttgtaaatttgtttaagttccttgtagactctggagatcagacctttgtcagatggatagattgaaaaaattttctcccattctgtaggttgtctgtttgctctgatgatagtttattttgctcctcagaagttatttagtttaattagatcccatttgtccgtttttgctttcattacaattgctgttggcattttcatgtgaagtctttgcccatgcctgtgtcctgaatggtattgcctaggttttcttctagggtttttatagttgggttttgcatttaagtctttaacctatcttgagttaatttttgtataagatgtaaagaaggagtccattttctattttatgcatatggctagccagttctcccagcaccatttattaaataggacattctttccccattgctagtgtttgtcaggttttttcaaagatcaggtggttgtaggggtgtggtcttatttctgagttctctattctgttccattggtctgtgtgtctgtttttgtaccagtaccatgctgttttggttactgtagccttgtagtatagtttgaagtccggtagtgtgatgtctccagctttattctttttgcttaggattgtcttggctatttgggttcttttttggttccatatgaatttaaaaaatagttttttctaattttgtgaagaatgtcaatggtagtttaatggtaatagtattgaatccgtaaattactttgggcagtattgccattttcatgatactggttcttcctatccatgagcatgagcattgattatacctatccatttgtttgtgtcctctcttatttccttgagcagtggcttgtagttctccttgaagtggtccttcacttcccttgctagctctattcctaggtattttattctctttgtagcaatcactttcttcttcctgtttgtgattaatgattttagggtaaatctttttggagggatctcactttttttttattcagtctcttagatagttattataatttggaatttacttagattttaagtctgtatcatagaacctaaacagtggaattggaggaccatgtggccacaaggtccctgggaggaggacccactagtcacagtaagtgatgttgtggcaggaaaagagaagagtagagtggatgagaaaaggagcaacctaacagcaaatatgatcaatgttctttttctctgttgccattcgggaggatttagggatgaaggctccttaggtggtgtgtagtgtagacaggctacagcttgcagtttcctggagggaatagccaggagagtgtgatttgtataaacaggggcaggtggctaaggaagtatagttaggtgccagtaagtttgtaggaaagaattctaaaagtggaatgcctggttcacagggtatgtgagtttaaaaattctgatggctcttactgaatcaccattaacagaagtgcgccagtttatactcccatcagcaatgaatgagaatgcctgtttcctcacacctatgcccactagcaagcattttgatctttgctaatctgctgggtgaaaagtagcatcttatagtttaatttgagcatcttttcatgtgtttactttgtattttcttcttctatgagctaactctttgttcatgccctttgcaggcccactttcaactattgagttttgattttgatttttaggaggttttttttttgtttcgttttttttttttttttttttttttttttttttttttgtgagacagagtctcgctctgtcacccaggctggagtgccgtggcgtgatctcggctcactgcaacctccgcctcctgggttcaagcaattctcctgcctcagcctcctgagtagctgagattacaggtgcccaccaccatgcccagctaatttttgtatttttagtagagacggggtttcaccatgttggtcaggctggtctcgaactgctgacctcttatctgcctgccttggcctcccaaagtgctgggattacaggtgtaagccactgcgctgtccaggagctctttatatactagaaaaattcacatttccttatgattttttttaccaagtgtttctgcttattttgttatttgtctttgatattgtttatggtatttgaggcataataaatttttatataaagttgtcacatgtttcttttgtactttctgggttttgtgtaataatcagaaaagcctaacccactctgaaaagtcatgcttctacaatttccttttgtatttttatgtaaataaaatcatacttatttgattcataattattttggattagtaatgaaatagaaattccattttattttcccccaacaactacctagttctctccaaacatttcaggcacgatgtgtcttttccttgctggctaggtggtgattcttgagaaagatgatttttacttgggccaaggcaggggtgacatggaagggtatcatcatctatgaaatccccttatgtagttagaactatttttggagagtctgctccattttcttgacttccagtttgttgcagttccacactgtgttaatcactctagttttatgaattttaatatatgatatggctagcctcacccctattacccttttgttccaggattttttttgatcttcctacatgtttatttttctgaataaactttagaaattgtctcattctaaaaaacaatcatgttttggagaaagggttaaattaaatttatagcttaatctagggagagtgttttttaacttttaagctcaggggtacaagtgtgggtttgttgcataggtaaacgtgtgccagggtggtttgtgacacagatcaacctatcacctgggtattaagcccagcatttattagctattcttcctgatgctttccctccgcccctgacaggccccagtgtgtgttgttcctcatagtgtgtccatgagttctcatcattcagctcccacttataagtgagaacacatgatgtttggttttctgttcctgcattagtttgctgaggataatggcttccagctccatccatgtccatccatgtccctgcaaaggacatgatcttgttcctttttatggctgcataatattccacggtatatatgtaccacatcttctttagccagtctgtcattgataagcatttaggttgatttcatatctttactattgtgaatagtgatgcagtgaacattcacatgcatgtatctttatggtagaatgatttatattcctctgggtatatacccagtaataggattgctgggttgaatggtatttctgtctttaggtctttgaggaatcgccacactgacttccataatgtctgaactaattgacactcccatcaacagtgtataagcgttcctttttctccacaacctcaccagtatcctttattttttgacttcttaataatagccattctgactggtgtgagatggtgtctcatttgatttgcatttatctaatgatcaatgatgtcaagctttttttcatattatcgttgccacatgtatatcttttgaaaagtgtctgttcatgccctttgcccactttttaatgggggtgttttacttgtaatttgtttaagtttcttacagaagctagatatagacccttgccagatgtatagtttgcaaaaatttgggagaattttttatgatactgacccaacctgtcgtcacacagggtatatgttcccatttattcagatcttcttttatgaatctccttagttaatgttttaagatattcttcctatatattttggcacgtattttttaaaacattatttgacatggtttataagtatttgtttagtcttcacatatttgcagaggtattgaggagtgaaaaaggaatggaagtgtttctttgacaccgtaaaatagattacctggggaaaaatattgaaactttgcataagtaaatgtaattgattcattttttcttttatctcttctgaccctatatttcgaattgttgatctaactataaaaacgtatttgttttaaatttgcaattgaatttagtaagtgtttttcacacccacaaattcaaagcaccaattgctgagattcttttgcaaagtgttccatatcattgtcttatattaattcattgactattaattaattagcttagtaagcacttaatgaacacttactatagaccaaatgttagaaatatgaagactaataagacatgatccctttcattgaaagatttgctgtttactcagagatggaatgaaatgatgaaaacaaagaattataataatataaggtaatgtgctttacactctgggaggccaaggtgggtggatctggatcacttgagaccaggagttccagacccacctggccaacatggcaaaaccccatctctactaaagatacaagaattagccagatgtggtggcatgcacctgtaatcccagctgctctggaggctgagggaggagaattgcttgaacccaggaggctgagattgcagtcagcagagatcgccccactgcactccaacctgggcgacagagcaagattctgtctcaaaaaaaaaaaaaagggtaatgtgctttcatgaaaatatgtgcaaggcagagttggaacatggagtgggagagcctcaagctgtcctggggcaatcaaagaaggctttactgagcaaccagcatctgaactgagaccattcggatgagttgctgccaggtgggcagatcaggggaggcttctccagacagagaaactagcaagtgcaaaggcactggggcatgaatcagttacaagttattcagtctatggggcttaggagattaggcttagccagtaggcagctgccagatctcaaaggctttatatgacatgcgcaagaggttgtgctatattctgtaggcactggagcaaattgtgagcaagaaaaggtcagattgtagactacataactctggtagccatatggagagcaaagtagaagggtatgggtataaaatcaggaatacaagtatggagattataacagtgggcccagttagagactgttttctcttaaactaggacagtgacattaggaatgacagagagcccctatggaagatttattcattcaacaatcatttattagaatcacctgtatgctaggctctgtgctggatgctaggcatgcagcagtgtgccagacagatatgctccccactcccaaagccatcccattcaaatgggaagagcctgataaggtgatatgtaagttgatatgttaagcagtggtatatgatgaagcagaatgcagcaggatgaaagggaaagggaacatggttaggagtatgctgatcaggatagtcctctgggcaaggtgatgtttgatcaggacatgagctggggagggagggagggtatgagccagggaaatggtgtccaagcacagggaaatggtatccaaaagagaaatggtgtccaagcagagggaacagccagtgcagaggccctgagaaggaactgtgcttggcatggttaaggaataatgaggaggccaaaagggctagagcagagtggtggaggaggtggcttaagtatttagattttatccagaatgagatggggagccagggcattatttttcatacggcagtagcatgatttgactggcagcctttaagaggatctcacctgctgctgtgtggagaatagagggagtcagggtgtaagtaggtcagttacaaggctggtgcagaggtccagaaagggaggtgatgatggaccaggatagtgattctggaggtggtgagaggtggtagaactatggatctgtcttgaacttggtactagaaggatacaggaaagtgtgcataggaagtaaaatgggcaagtgtagattagataactgctaagtgtagattagataactgctaagtgtagacatacaatattttaaagggagatgagggaagtatagccagggagggtcactttagcaagagcagtccatatggtcaataggtcaatatgatgagtacactatcatgaactcttgcaggctaaacttttattatttgtatacttatgagccacactggattgtgtgacatgactaaatagagaattcctgaaattgcctctgggaggatgtattaaatagggtcaatcagaagtacgtaaatggtgtctactcttgagcaataaaatttatagaagccacatctaaatttagctttaagcaatttcggagcctgagaattttcaggaaatagtaatcaaagccctgataatacaagaaattgacatcctttttggactgacatgggagaggaataatttgggcggtcacagaaacggactcatagatcatagatcttgggaatgtggggtcaatgaattaaatatggctgaaaattataaattacctcacatatccaattgcttttagctaaaatcaagagaaagggctttctaaagccgagatactttttttccattagcaaagggttataagatgttctggagacttgagtcaggctagttcccttatctttggaagatattcttgagtgatgcagtgctatcagtttcaaataagtatatttttgtaaatcaggtgatgttatataatgaaactgacatttgtaaaagttttttatggctcccagccaggtgccccttttgtcagaccctgacttttgaaggattttgggctgcttataaggattcagagttcccctgcaaaattgatgttggaaaccatacccacagtctgcgccagtcactgtggactggatacatttccacagtgtgagatgaaatcagaactgaatgagagtggccactgttctcttggccatacctgaccaaaggttctagtttgatgcagattattattctttagttaactgtacagtaaaccatgcacagtcctcattgtaattaggtgggttcattctttcttaattttacctgctgttgtcgtcatgagtcacaaagttgaataactcttcagttattattgtagccagagtgatggataagatagactcccctaaaccatggtagtcgatataaagcttttcttctcttgcccccatagttagcactaactggcccctgttttgtataaccttatacagacttatgtcatagtgctaatgatataccacatgtgtgtacacatatgcacatacctactcacatatacacatgcacacacatatatgtgtacacacacacacacgcgtaattcctcttctctccccccacagactgtagtaggcactttgaatcatgaatcgttcttattttccttttaactattaacacttagctcagcatctggcataaagtaggagctcaaaacatggttgtcgattgaaatctagaactgggttttgcattttcttgttattgctttgttgttgttctgttgattaagtaattctatacctagtttaggtttgaattgctttagagaccctgatgatggtgccttgtgttcttggccacttgattttatgtgacagtcttcagcatattcataactccaagctttacaaaacaggcaatattttatagggaagtagctctgttgcctttctggatgtagaggcagcatgagattataggataaaactccaatatgtttgtatttatgtatatatatattaccttattcatacataataatgtgtatacatacataataatatgaagtaaaagtaggtcagaagtaaagaagaggtgggaacaaaatgaaagcaggaatacaattaaattgcatgtcagaatgacttacatgtaagatacagaggccacctttaaaggctttaagctttcaatcagccagagggaaaagaacaggcttatgggggtaaagataaaccatttgctcaggttgattttaaccatactcttagcaccaacatcagataagaatttctcccaggagtccctatgaagagtacattgtgtttcgttatgaaaatcatcaagctttgcaaggctgattctcataagacaattttgtgttaatagcattgcctcaaggcaaaattttgtaaaagcagtcggcaaggttctgtttaggaatcagttctctgctggtcagtttgactcagggatatgaaaagtgggtggactacttgtctttaagcaatctttcctgtgtattgtttatctcaaataaagctttgaaaattgttttttaacattgaacttgaagtggcactattctccagcaagtaagggcctacagtgtagctactattctgtgtagctagttaaggagagacctggcgtcctagcagtgtcaaatgaaagctggtattagcatccatatgaggaagctgacttgcctagcaaagacatttacctgaatagcaggttgccctccttatttccaggggaagcatgggagaaccaagcagctcagccaggattatgcatagaaaattgtttggacccacgttattgctcagacaaatgggtgatcctctccaagggctttaaataggtccttttggggcagggaacccaaacacttagcaaagtacagaaggtttgaagggaatgaattcccagagtctggattggatgctcagtctcatttctcaccttcccgtttacaatccctctttttccattttagcaaagcaaggcatccttcttatccatctcagatcttactatagtgcattgtgcaggggtgtaaaaacagcctgggcaccaaacagagcagcaattggaaatatttctttgcagagaagtatggtagtgtgaacaataaaagactttccaatataaacatatgctacattgggataaaactctgtggggaagtgggctggatatgagttaaaggagaaaaactagcgatgtaaattttccaactgataaaaaggagcttgagcttggtcagatatcttaaaaatggttgaatgtgggatatgacagttgtgttttaaaacctcaatgtttatgtatgccataaattatattctttgtaatcctataagcttatgatgaagtcaacttaaaacttcactgagttggggcagatcttcagaaggggatacatagctttttgttttgttttgttttgaatctttgggccatgcgtgagcaaacatgtttgaagaccactcatctactgcatgtaatatggctctcaatcagtcctctagctcttgcatcgacctcaagtgttaggtcagcctctagctgtaactcccctccctgttcttaccactactttatatttactttaatataagtctaacagattgcatccatgattcctctaccaaataggaagatctttaattctcgaaaacggtatactatatactctgtagtttccaggaatttttttgtggtgccttatgtaaaggcaaactttaaaaaaattattgagatataatttacatatcatataattcacccatttcaagtatagaattcaataagttatagtaagtttaccaagttgtgaagtcatcatcataaatcagttttagaacatttttgtcaccccaatacgatttatcatgcccatttacgtgaatgttcctatgtttttctaatatttaaggggctacaagttcatatgacaacatgcgtagagagcagtaaggatggaggaaaacaagaggggcagggccagaattttatcatttatggaagcatgagtgctagcatcttctatttttatttttaaaaaaccactctgatgttcttctagtccttatatgtttttattgatacaaatataaccacatgttaaggcaggactctgtctatctcagttttggctaagatcccaatggccaagaatactagattaggttcccccatatcagttacctatttagaacatacaaaacattgtatgggagttagttattgtctgctccataatatgtatgaggttgatgttggggccctggtgaatgtgagggtgggagaagggtactccatcttcacttcaaaccaagtgagaggaatccttattgaacttgacattatctcctgatgggagtttggggacatgaggttcacctgaacctgtggaaggctgtgatgagagctgccgctaagaacaaagtgggagagggggctgcagggagatggccgcaagttggtgggacgaagatgtgtgagattttatcatggatcaggtggatgctctgggatcattttaactttggaatgcactcaagagggatgcctggagggaatgggggagaaacagagagagagagagggcatgagcaagtgcataagtgatggtggggggaatggttatcagttacctaactattctggatacgtaagaatgtagtgcttagagattagacagaaaaatgaaccatttgccatttgaccatctgggagacattattgtatggtctttaaatctgataaacctgaatttaaatctctccctgaccctcagcaagttactgtatttttctgagctttcagagttgtcatggccagtatttgtcgtaatgatataatcattgactttgacaagtcctggaacttgcctttcaaagtatttttgatatttgacactgattgatgagtagataaatatgaatattctgtatagacaacatctatgatctagctagagatctaaaagtcattgttaggtaccataagcgtgtaacatataacattcaatattttgcaaaatccatggtatttcatttactatactgccatttactttcttatttggattacgtaggtgataaatttgtacaagcctgttttcatatactttgaaagtgtgtgaaaataattgtatataaatggtaattctgattttctctagaatacaattcagatttaccagccttcaaataatattattttagatactattgttaataaataatattttttatttagcaaataactttacatatatatgtgtgtgtgtgtgtgtttgtgtgtgtgaatttatgcatatgtatttttccagccaacatgaaagtcttttgaggacaaaattgagtatttgccatcacaaaactataaataacttaaaaatttggcatatttaaatattgcagtaagcaataatacttttatccatttatgcaacttttgtacagaaacagatcttgtagattatcaggtaggatctatggagtgaagtttgataaacttttaaagacaatgaagttaatttttaaaacctcttaaactcaactcttaattattcttaattgtgttctttaatttcttaaattgtgttcccaaagcatttaaaatatataactatcgtagtactgaatgcatggcatagtattatttcattaattcattaatttatttaaaatgactgtagtgaactcgtatggtacaatctctgtccttatggagtctagagttcagtgggatagacgcatgaaacagacacatgagtaatatataattacaaattatgatcactgttatgagttacaggcaaatggcatgagagaataactgtggaagcataatttaattggagggaatgattctctgatgaaagatctgaaagatgagtggtccattatcagttgagaatgggtcaaagaatatttcagatagtgggaacagcatattacaaaggccctgtggtaggaaggagtatgaaatatttaaggaagaggcaaggagtggatatagatgcctcatttaggaggcaatgggaataattcattctggaaatgaggtaaactagacactagattagactagaataagttagtggcagtacagttagaagtgaatggattttaagaaatagtagaaattagagtcaataggacttcaactgtttataaaggagaaaggagaaggtgttgataaataaggctatttgtaaaggtggatggtttggattctagcacattgtactgtgattgttataccataatttatcttctgtgaacattgcaaggaagtttctgcacttattttcaagttttgatgtgtatatttttacaatactgttcacttttctaaacttttcaattgtaagtttcttataattgagaattgttttctctttctttggtatatgtccagagttcttagccctctaaattcagttgttgttgagtaaattttatttttttaaaaaatagagattagaacatctgatttcagatatttaaaaaaacttagatatttatcttgtggggaatgacttaggaacagttttcttgaatgtagagatttgaaataccaatttgcctttgggtcattattttgtaggaatgtgggaagatataaaattcaatgagcaatatgattaggcatttatataattccttaagtatatgctatgtagatctttcaacatatatattaaaagattaaaaaatgcttgattatctggctctggggtatacttgtaaaacttgcctatttgctaaggtcaaaacaggcatgcatgtattttatattctagctttatctatggtatattaataatataactggtttccagcagacacaacctagagtaatccctgcctaggcttagcctagttagagcctagttaggtcttcttgggtttggacatgatttgagatattgaaaagaaaataattgaggagattcaaagcagtattctaatgaagctatatgcaggtttactaaacagccaacttagccatttatctaaaaaaataatatatgtaaaatgtgggttttactgtaatataattaccgagtctccttaccaaaggatgggaaaactttatagccacgagtgacagaaagaaactattgttcagttgttggattccatgtttatgtctgctaaactggtcattgattttcatactgtgaactttcttaacattgccaggtatacagttagaagacctcttatcctaaatgcttaggactaatttcgttggtcagtggaaaaagatggttaaatgagggaatagttaaaacaatatgatacatgcatttcttgaacaatttattttaacctaaaacaaaaattaatttgctaatattttggtgggggctaagggttttacttcaagtaataattcattaatttttttgttttacagtttcttttttgcataatcatgcctggaattcattacctataaggacatagacacttgtgaagacaatcctagtgcagaattcatctaactttaatgaatcatttcattaaagatttcatgatttcccttattattattattacttattattgaatgtatgactcagccttataaagtgtttcctaaacttttagcttattttaaaaatagaaacaccaactttctttttacatttacatttcatttgtttacatggtacttaattaaaattatatagttataataataagtatgaatgacataaaaagttttggaaatgagcacaagtaattcttgttaaacactatagttttaaaaaagtgaagggaaatggaccattgttctaaagattagacaacttaagctatgaggcttggtgagctgtgggtatcagtctttatgtttaataaagggaatggagattgttggctaagttgaggtcaagtaacagagccccctttttgtgctggtttcagcccattacccttcaactttattcactaaatcagatagttacagtgctgcttagaatagctcctgatattaaatagtgtcaataataatactttagcagtcatctctgagcttcatcattataaactagataaataattaaaacaaataataatagaatgtttaatgggagaaataggcactgttgagagaacagtctaagattcagatcatttagctctatgcccagggatgccttactctaggtttgtgacattgaataaattgctaaacctttctggattcagcttccaaatctacaggctggtagttctcaacaaatcgtgattttgcctcccagagaacatttgacaatatctggagatatttttgattgtcataatctggggaatgttcctgatatttagtggctagaggccagcactactgctaagatcctgcaatacacaggacaggtcctaacaagaaagaattatcagttcaaaatttttgtagtgctaaaactgaggatccttgggctagctaatttatgatggtttcttcctcttccctatgtatctatcattctcaaacttaggctgatcatatatatatgtgtatatatatatgtatgtgtgtatatatatatgtgtatatatatatgtatgtgtgtatatatatatttctattttaaataacctgagtaatgacattagatgaattttttttgtctagtaggtgtttaaatgatgcaatagtaattttcaatgtcttatataacataaacagagaagaataaatatagccaaaatttactactctgtactttttctaattcagcattcccaaatgtaagttaaatataactgtagaaaacccacagtagattaaaatatttattctttcagtaaagggacagtttaccaatgctgtcaggtagataggtaccagcaatatagataggaaaggggaaaagctatgtaatgttggagagtttaaatactgtaattcagttgaaaactatatttcagctaatagcaactttgggatttatatatgtatatccctatgatttaaagtaagattcatcagtggtataaaaatgatattttagtgtgctcaattttatgacttgagaccagttcaaaacaagcatcactgctagtataattctaaattattttggaggaaatgtatattttaaaattcttggtggtaattagtgatgataggttcgctgctctatacttttttatgaaataaagtttgacttaaagaacctgagaacaggtttcaaaagtaacagcatagataccaatcacattttttctgagtttttaatttgttgacaaaattttttttaaaaaactgtgatgaaagcatgcgagacttgagatggctgtagaaggagaaactgagtaagttcctcttcttgtcttgtttcctctccctatttctccttctctgttttgcttactccaactccatgcacacttgaatcaccatgaatggtgcccaagttgaagcccaaatcaagttccttagttgttggggccgtgtcttatttgtcttttgatccctggtatctggcatgtagagtctctaagtaaactctctgcccttgacctttctgcatattataggctctgtctttgggttcctccctccctctatttcccttttttctgcttctctctcccttccttccagtttagtttggcatttatagttttcgtggttgtgtggctcttttcatctaacatttctagatgtttagagcagaagggggggccctcccacctgacctcagcctaccacattgttggaatccattcattcttcaacctattaaaatcttactccattttattaccaagtaaactctttcaaacagttaatttatgattctcctggttttattcttaccccattcaccccagcaagaaagtcggtttctcaaaaaaaaaaaaaaaatgcccttctttccctacctgattattatgtagcatgagaattgacagagcacaagcagggaatgattacacaacatttttaaaaactctgtgttgaaatgtatttgtggcattactgtctcaaggaaagccaaatgcatgcctcagaattgagaaaaatgtaagtcggcaagcttatctctaactccccatgataaaataaattgagtgttttagagctgtcagtagtacttgcgcagttctatctctactgctatgtcagttaatatttcctccctcaaaacaaaacgagtgcataggcaaaatgtaagccagcagttgagattctgaactacctccaccagtgggtttcaccccaaagtgtctcctgaaggcctattcatcctgggtttgcaatgctgggttgcaatgttaatcattttttcatgtgctgatgaggaaaatgataaagtgatggatgctgctcttccttctgctttgtcatcctgaccctgattgtgctgggtggactttctcattaacgatgcaaagtccggtgatttgcactgtgctcagctgggcatcatttcttgtatcttatttttgttggtcagcattatagctagttgttggaactgatttcccttgcactctctgtttgactatgccatggccagcacacttttgaatgaaaccgctgatggttgtcgaaactaaagggacattcctatattttggattggctcacgaattcacctgttgatgccctggaggtaattttcactggctttatttatagaaatggcttacacagtgtagttgtgtctagtcagttgccatatggtaccctaatatgccaccaaatggtaatcaaaacttagtagtaaattttcaggaactaataaaacaactgtgatggaggagcttcatttgggatggtagatatcagtggctggagcaatgaggaaggccttgcctttctcttagtgctatttgttagacagaagtttttaaacaggtatgtccagaatagtacttaatttcttaaactataaaagcaatatatggttattattaaaaatcgatttggaatggaagaataaaaataaaatgactcagttcatttttctgctatcccaataccagccttggagaatatgctttcaggtaatcatagagtcagagaaagaatagagatgaagacagagtcacatatgtgaagttaaaaaaatgtaaatttatcacaatatatatgattttccaacttactgttctcaatgagtttgtcttgaagagtgttacgtgtcaggatatataggtccacctcattcttcatagcagcagtgtggtactccagaccacagatgcaaaacgccataatttaggtaagccttccattatcgataaacataaggttattgccaatgttttacagttataaacagcaagttaatgaacatttttgtacatatatcttacagtatgtaggctgacattgccgtagtattaacacttagaaatggaactgatcattccatagttaggcatattttaaattttgatggatattctcaaattgcccctccccaaagacactatatgaaagtgctcatttcctccacatccccatcaatgcccagtcctttgcttgatggaaaaacagttttgggcatctttagtgttctggtccacagctcccatcctgaccacactcaccaaatagaatcttactttactcttggacagaacagaacaaattaaaacaaaataaaaataacaagaaacagctcaagagatgtggatcttttgagcagcttaaccaaaacctaaacaaggcaaataaagtgaccctttgttatcagcaaaggcctgtgcttcctctgtgctgctgagccacagtcagctaggctggatcatgtggagaactactcaacaaagctggatttccttgaccagtcagcaggtagaaggtttttcttcacttctttccccaaagtcccaactcgagtctaactacgattcgaagaaaatcaagagctccagtgtacaagtgacagagaccatttgttttaagacttagcagtcaccctgttcaggtcttcttaagggagacggcagctcctggacctggccacagagtgtgagaaagatggtggaagagagaaagctgtacatacacacgcacatacacacacgcacagggcgagacagaaaggcaggaggcaaattttttccaaagaaatccaaaacaataggtaaagaggatggaaaaaagagaatggtaactgggcattaccttaaccactgggaggagaacaaaagtaagtcttaaatctgatcagccatggcttattacttgataaggtgaggtgaggaggggaagatggtagaagaaacttgatcttccagtaggaatcaataaaaattgtattagatgttccccttatctttggggctcttgtcttactcgtacttcctttgtggtaactttaggattctcatgtttctcttccttgacgttgcaaaatttgatatatttccatttgttttgttatttcttttcagatctcaccgtttgctgtattttgctttgcgtaatattttcttttccttctctttctgcattatttgctttaaaacaacatatacactaaagaaatgtaacctcaaccttttcattcaagtgtgtatttctgaaaaaaaatcagatatttacagataatgaataacaccacaaaagttgttttatgctgcaactgtacttaggttcaatgtcatctttgccaccttctccctgtgttatgtaaatattccatttattgcaggcataaaaataccacctttcactgtactttatgaggaaatggaagccaaatgactttttttttatagtttaaaattcatttacttatatatgtggcaaattctaaggcaagccagctcaaatctgtgccaaattcaggaagaaaaggattatcacaagaaataataagtggattatcacaagaaagaaaaggattggtaaaatatctgttatttcacttacaggtggaaggccacccctttttgtcatttaaatgctaaattttcttctcctttttcatacctttcattttccctcttgctttgtttttgcatacaagcgagttgggacatatattgcttctatctatcacttttacataaaagatagaaatccgggaaattgcaaaaggtttacagtctttccatagactaaaatcacgagccagatgttttaaaacaattttatattaaacaattttaaaactagtatttgtataagccagtaaatctatttttttcataaatgtcctatcatgtttttccccccattgggcacttggattggaactacaaaccacaatcttcaaataattattaaatctgaaaaacctatgtcttgtagtttgtggtgactctgtaggtagccactgcaataaaatctatttggagaaggagctattatctatgcacaatgtgtatttgatgaaatgggtaggcaattacagttcacaaaaacacatactgtattagaatagttcacatatagcaaagataattagatttttcatacagtaaccagtcagccaataggagtaaaaatgctacaaatcttatttataaaaagtgccattaaaagataatcccttctaatgttgcttgagcatttttctggatatgagtgggcagatgagtaatagaaaaataacactgacataaaaattaagcctgggagattcctgagtttgttttgtgcaacttggagttttgaggctctgtcaggagaccgctggagacaagagtactggattagaagcaggaagatctggtgcttgacctgactgtactgtcagtcagtcatgtgactcatcccccaagtctcacacttctcattttcaaagagaagaaccctgtactgcagagtaagagatcaataaatgtttgttgaatgagtaaaagaatgaacaaagattttaaagattcctttccaagattctgaaattccactaggaacttgaacaagcaataaaaagacagcattgcaaattaagaacaaacaaacaaacaaaaaaaaactttagccaaacattctatttagtttaaatttgtagatatacagattttctaaatatcagttttcctcaaatggacttaagatgacttccagactcagggtacagtgtcacattagctggtttagcgagagtgttgtattctacagaaatgtgactctgaataatgccagtttgtcacagatggggatgaaatcagattttctccaaaacacccaaatgtgtgatgcataaagcaacattggcagccagtggggaagatcttatcaatgaagtacacaaagctctgaatgtttacttcgcagaggaaatggcttcacagaccggaaaatttaagttgtcatagaaacccccatgccatatattttgttttaatttgagtattggcagattaagaggactcagtgacaaaggagctatattaaaaatgttgaaattgagtgtgctggttttattttttaacttaattgatatctgttttcaaaaggacttttaatatctagaagggcaaaagtatttcatgcaaattgtgcatagatttctgttgaaaaacaatatggcattggaactttttgttataaaatggtgtgttttctcctgtttatttcttatcataaattatctttttaccgtggtatcatcaaaataacttcactggtatcaattagtaacataggaagctatatatcccaactgtctacatttttattccaactcttttacttaaggaatctgatagtagctgctattggtttaggaaggaaaattaataattagtttgacaatctacttgaagtcaaacatttaggaaaacaaacaaatactgaatcccttaactatctggagagctaatatttattgagggactgctctgggcctcgctgtgctagattctctatgtacatgatttcatttggtccttcaactactctgaaatataaattatttcatttcttgatatgtaaggtgagactaagaaacattacgtgatgctcagtaaaaaggaaaatctggaatttaaactttttcaacatccaaaatggcaccacactgcctcatgtcatataattaactagacacaaatgtctaaggagcagaacagacattttgtgatagataagacataactgattctgtagtaagaagaactaggaagatgtccaggcctcacatatgacggccccttctggaccaagttagaccttgagttagtcttcagtaactagcatcccagcttggtgtgaaaatttggaacacttaattatggacattaacatatttacacataattaacactaataccattttgataaatgattaaaaatattcctgcatatatcttcagcttttacaaagggaattatgtgattttgggttttcaattatgtgcaacctattgactggacattttctgatgtttccatggaggatttaagtgttattatgtataatatgttagctattaatttttaaataacaagtttaaattgcacaaaattactttattatagaagctgttgccaaaatcaactggcttgggaatgcacatcactgaggaatttgaaccaatcaaatcattagccagagaaatgtaattatttataactcagccaagctcttattatgggcaagttagttgcacttttctccgctcttttgtggttgatgtggtattttataatgaacgtagattagtgggaaaggagcaatatttataagcaaaagacagtgtaacagagtgaaaaattgaaatatgaaaaattatgaaagacggaaacattcagaaagcagattttctgaaattgtgtttaaagacagataaataaatatgtttgaagatggaattgagaaaaaaagatggaaaatggtcattgctcacagaaaaagattcactaagcttattcttttgatgtgatataatagtgatttgatggatgcagctaacaaaatgtctacaaaaagcccagtggtatccattaatattgatgcattgagtttcactaaccgtattcatggatgtattatttctagcaccttctgtgtttttctttttgtatttggtccataccagcgtgttgggtgctgtccatggtactggaccagcgttgcttgctagggcctgctgtttgggagattctagggatggtttcctcctcccaaccgcaatggccctgttcctttatcttacactgtgcttgaattgtaaatacaacttgtgaatttattagtaacatttctagttattgtagtttctaagtatgagatctcagtggagatctccaaacttaacctggctaaaactgagcttttatttttctccaaaccagttcctcctgcagtctcttccatctccgtcaatggcaactacatcctttgttactgaggctgaaatcttcttataatccttgactccactctttttttcacatcccacatctgtcaggtctgcctttaaaatatattcagaatccgaccagttttcaccacctcactgtggccatccttgtgtgagcccccatcatctctccctgtaatggacttctaactggccgtcctacttatgtccttctacttccccaggccaacttttaaagcctgttctctatatagtaaccagagtagtcttgtaaaacatgtcaggtcctattactcccttgctgaaaatcctctgatggctttctgctttagtcagatagtaaaagacaaagtccttataatggctcttacatcatctggccttcttgactcttcctcatgtaccctatttcagccacacaggcccttttgatgatccttgaacacacccaattatgtttttgctttaagacctttgtactcgcgattccctgtgccaatacagatcttccatcattatatgcatagctaatgtccttactttcttcaggtttttatttaaaaatatctttttcattgatatttttcctggtctttctatttaaacttgttaaaaagaaagaaatacccccccataacagcttatattttaaattaaatgtatctttgttgtttttttatccctctaagatgttggctcaatgaaagtaggaattttttctgttttgtctactgctatgcctagaataatgcctgcatagtaggagctcaataaatatctgtcagctgactaaatgaatggaattatgttaacagatgaatgattttagcggaaataaatgtcaatatttgatgatataaatatatatattagattataatcatttatcagattattattttagataataaaagcatttttagcattgcttgatttatggttaggattctgtatttggaggtgctaaaatgggtaagaagtccagccattgcagatgcagaggcctttagctgaagctctagagctgttggggtccccaggaaaaagctcacatgagatctcctgatgctacgcttctggccttcattattcacccccatttctaacatatatatgttggggggaagcttaaggttttcagtggtgtggggctacgacgggtgtcccttcacaccatttcaaatggataggggtaagttatatctagagtcttagttccagaaacaaggttgtgatacatactcctgttaaaaaatttttttttgattaatgtgcaccagccactaggggatgctagacactcatattcagagtagggtccactgtctcattgggcttggcaagaagtctggtctacctaccttcagaccatttcattatttgtattctttttagccttttgtgtaaaactaacatttatttaatatttcctccattcctccttttttcagcacattccccaattggagaggggtattttggatgcatctgggttcttgcttttaggaactgtgtttaatcatggaaacctcattcctattttccaagtggcagtgactcatgcggggagagtcaaggccctgggtctctgctagtgctttccccatcctttagcatttcttcactttgctaaaaagcgtaaaagtcttttcagtgattctgtctgtgggtgttggaaaaagattttaagaaaaatgattttcaaaatgactagtatttacacgtatgagtccctatcttttcaagtttttagtttcatgccactttaggaaaataatagcccatgcggtgccaccttattctttatatcttttacacgtgattgattgtaaaggcgatgaggataccagtatccattgccaggaggtaagcaggaatcagataaaagcaaagggtggaaggtggagatagaaatacatatatgaataacattcttcttctctccaacttcatatagcttatcaaatccttaatttagctttgggaggctggtggatcacttgaggtcaggagtttgagaccagcctggccaacatggtaaaaccccatctctactaaaaatacaaaaaatttagctgggcatggtggcatgtgcctgtaattccagctacttgggaagctgaggcatgagaatcacttaaacccaggaggtggaggttgcagtgagtcgagattgtgccactgcactccagcctgggcaacagagtgagactctgtcttaaaaaaaaaaaaaagcttaatttaaactttgatcttaggatgaaataccctcatagtgtgctctgctgttagagattcatgtgggaaaaacatatatcttggtttctttaaataaattagtagagggaaaagctgaatcgacatatgttatcatataaaggagttaaaatcatgttctttggtgtgaatagaccttggtttgaaactaaactctgctgcttattaggtgggtaacttcagagaaattactttttatctctcaatcctcagttttcttatcattaaatgagtttaataacttctatcccataaagttattgtgaagattcctgggaaatatgtatatacatatttaataaccatcagcacaaagaatggcatgcaatagttgctctatagaagttaattcctttccactttcatgtcaatatttttaacctagctgttagatgatctcagatctcagtcctagtggaggaatttgaactggactttttcctcccttaacatagtacaatgtgtatgtaaatcactagtaggaattctgtcattagaatttttaaagtgtaagttaaagttaatattttgctttatgaataagatatttttgttacttctgggtggatgtcaaggaagaaatcagtacaaggtaatcccttaatatttccttgaaatgtatgtttgtagtattatgcctgattgtaatagcatgggcaaaatcagttaaaatatagtgagctgcacacaaaaccttatatgaaattctttctttggcttgataaatgccaagacctaattctttgtgaagtgggtgccatagctttcagtgacgttaatatcattcatgtaaaatcattgttcctccagcatatttttatgggtctcagaggtcacgtgttcacagtttgtgtaagaaccagcattgtggtggagtggtgacagaattgcattgaaatcgtggctcttctactcaataattgtgtgatcttgaacaagtctgttaatctgtgtgagatacagctcttagacatataaagagtaggactatagtcattatgcctattgcatatcattgtattgatgcttaagtgaaagaatatacatgaaagcagtttatgagctctcaagtgttctccaaatgggagatggtttctcattgccacatttctggctgctgctttcacttgtcaaaccacattcctgaagcaacacagtttgctgttaaagggagaatatttaaggggcccgagatgctgtaggaaagccatctttctcttctttcttttctaaatggcagcagtaagaggtctgtgagatgggaaaataggggattaattagaagatgattctacatttgcctgagaagatgaatgatgtttaatgcgctttgagaattaggcagtgctcgggagtccattttatttttctacttgagtgttccagtgtattcgttgagtaagacctagacagattattttaccttatcccaacatgcctttctctttactttgggtaagcccaaagtgtaggttctgtcatcacagaccatcagccctctgttcttacagcagatgaactgccccgggactgcttcttgggtaataatggacatcacatgggccatccagccactctctgttggttcttatgtcatccttcctgctcagacagggatttcataccagatacttctcctgccatcattgtgatccagctgctgagataacgtttcttacattttatttcattactctagcatatttataagaaatggttaatttgacttgagtttatcagtgactgtactgtgagctcacttttagcttaagtatccactttgagcacaaaagtgtggatttttttaagttatttttttcacttttaatgagtataccataagctcttataaatattatatagaaatctgtctcttatggaaagtaagctagacccattcctcagtgactagcgtaaaaatctatttctgcctcactaagagtttaacatatgtgtaccttttataatgccttgtaacttggctaaatatgccattttgaactgatatttaaaactgtataaagatcctgtggttattgataaaagtacttgatagaaaatgctgtgacatttaaaattgtcaggctgtactggatgacttttccttgaggttgttgcagacactccacagtcgacatttagtttagttgctatttctggtggcacgtgtcttgcatgggcctcatgagtatgttgacacttgcgtattgtgcatttaagaagtacctggagaggactcctcccctgtcaaaaagttttctccatcagttttcctatagacatttgctacaattccaggttaatttcttttgattttctgtttttgaacaggttattttatgagtgaagtcactcaatgagtatttcttgtgttcctattatataacaagtcccgtgtagggtctatagtcaatcacttccacctgtggaaaaataattagcttgtttggatggggatagggagaaagaaaacaatttggggagggcactgggctcctcagtgtggtaacacaaggctgatggagaggaaaagagtgtatgaaactttgactgtaggagatgcttaatatgtatttattacataaaatgtattaaaataaacttgtggttctagcttcattaggttgtgataaggtggaagggccagtgtcctgagtgtcagaaaacatgggttttgcatggctagccctgccacccagccacttagctgtgaccctttgaacaagccatttcacttttctgggctgtgacttctttattagtagagtgatagagtgggactagatgatttctaaaattccagactcttctgatttttttcctgaagcatgccacttgcattttaatgaaaatattgattgttaatatttattgagaagtataaatgtagcgggctggtaccgtctttattcccatattacaaatgattccatttgtaagttaacaatccttaaatctgttctggtgtcagagccagggtttgaactgagatccaccagtttcaggtatgcacatgtttatgcaacacagcctccagaatgaaggctgatgaagacagggacgctcattccccaccccccaatcctctgtgtaagctttgaagatcactctggaagagtctacctgtcatgaaagaacgcagatgactttttaagaatatttatgtagtcttatatttcagggtacctgagaggccctttaaggtcctaaattattttttgttctatacaggaatcctttctgtaaaacccttgactaaaactgtctctgctaaaggatgggtattggcaggtgttggggtgagttgacgaaaaagcaaaacaatagtttctgtgaaaatgcatgttaaagagaattagcagtaaatgaacgtgtgtttccttaaataacccaacaccccaatccacctagaaccgatgacttttgctagtttttacccatcacctcaggagtcattctggtttcttggaaacgtgtaaagtatctgcttagggaaatattattttatgttgctgatgttgggaggtagcatctactttagttgaggaatagtcagctaatagttcttttctttgctgtgcttttgcttatgtatttgttcagacctgctgcttaatgatttcagctggccacctgccatgtcaaaatcactttcctctcaagatctgtggaaccaattttatctgaacacaatggaaaggaactcaccattttgagctacatatggtcttaaagataccatcttaaataaagagaaagtgaagaaaacatggtttcaatcattagtttctttcccagagccactttctccacctctaatatattgtttattttctgctaacactttaaacacttatactcagttaatatttcaactcttgtgtgaggaattggtttttatgctttctagcagacagattgcctgagactgacacttctgaccaagtaaaataagcatatttaaaatgctctgtagcttattttcgcaacgtatttgtgaacactagaacttccatatggaagggactgggggagaggatgcacacagtttgaaaaactattcaggaactggagagggtaatgaaaatgaaaaaatgtaacttatggcctccaatctatcttttcaaaaagtaattaaaaactgaaaagcaaaagaataattacttcttagtttaatacccccattctaacacctgatgtaatcattagggtttgatgcagctcaagataaacattgtataaaaagagtaatatacaaatggaatatattgtcattcacatgcataaatagattagcttactattttagagcactgattcactaatttatattcaaatttgtgtttcttacccaattcatgtttctagcctcacttccattcctgagtcatagtcaggatgaatagtcatagcctgaagatttaaatttagatgttctaccatttactacctcataattaatctcaagttttattcaccacccctccaattaagaggttcttctattagtcatttgatcttctatctcagtcttgcttacactcccttgaaaccacactttgatcttgtctcaaatctaagctccacctttgtcttactagttgtgggttcttgaggaaggtgtctagcagagtgtctggctcatagtaggagattttaaagtattgtttcttttttccttgtctcagagcctcatccttccccacccatccagatgatcctgttcattattcaaagactagatctgatcacttctcttacatggaccccatgggacttgcattcttctctgagccaaataaggaaacgtatttgtcccttaataaatactctgatttattattttctttttcatgttgtatcattggagtttttggatacaagcaatagaaaggatttggctgacatgggtaaagagaggaccttttgggagggctaaggtagctcactcgattcaccagtctagagaaccaagcttgggaatggatgggaagcaaagaggtatcacatgggtgagagacgaggaatctggtgaacagtctcataacaggagcagttgttgagcaagccaccaccaccgaggtgaatgagctctgactgcttcttccactgttgtggcaattgcttagggtgcaaataagaagagactgtgtgatgggttcagcccagctacaccagggcagttagtggaaggatctgccctttcgactgccctagtacgaggccaggcacctgaacttattatcaccaaagacttcacacagcaggagacacagaagtccctgaaaggaagtctggatgctgttaggaaggagaaactgaattgcagtgaccagaccaccaaaacgttccctaccatttttacccttcaaactctggaaattttcatttcctgaagagcatagattgtaattatgctaggttttggagttcctaaagtttgtatattcatgacatatttattaaccctttaatatacatgtaccaacatttatctgaggtgccgtgtatatagcagtgtatacataaacattcctgtcttcctggagcttgtattttggtggcaaggtgaggcagtcaatgagcaagattagaaaaatgcagcttgtattagtgatgtgtgatggaggaaaagatgacatggcagggcaatagaaaatgctatggtatatgacttgaagttttaaaaagtgattggagaaggtctcactaactaaggaggggacatttgaacaaaaactgatggatgtgaggaagctagcaatgcagatatatgagggaagagtgatccaggcaaagggaatggcaagtgcaaacacaggtgcatgtgttcccctggcacgttaaggaccagcctagaggtcattgcagctggagtggaatgaaggagaaggaaagtagtgggagatgagatcagaaatgtaggagggaaccagactaccatagatgcgacacatgaacaagatgtggcctctgcttccaatggccttgtggtctaagaggaggcacagatgtgaaaggacgtacttcagtacattgcagcaagcaccaaaattaggcagagggtgcaggctaactgcacccaggcaggaggatgggcctggttagatctctgcttgtctgtgagctctttgagggagtgatgtatcttattcattttgcatcctgggtggcttgtagagtgcctgacaaataccttttgtatatatttttgaattcattttgagtggttgaattacagatacaatgggcataatgtgtgagaaggagcaggattttccttaatcacagacagaggaggcttagggaaagagattaaggaaaataggaaagccacagacggttgaagagccaagagttgaatctctgcagtcttctctctactcggtactttttctgtccttggcatcattgctttgatgttgtaaagtattgaccacataaactactataaaagttttttgagaggtaagcataatgtctatattagttgcatgatctgcaacatcaaggtagttgattattttactgcaatttaggggtttgatttactggcttatttgtgctgttttttccccatgtggacggttttgtgcttgtctttatactttttctctacagggcactcaaggaacaccaaaatgtaaaatagaaccacaccattgtatagcagctgtagacagatatcagtgaggctgataatttggatttttctattgcaactgctactgccatctagtattatctaatactgagtggcttcttccatgatgacttcttgaattgtgaagtggaaatttggtagccttatgtaaccaagcacttacattatttaattaagcaaggtgctacatgaatcaacaaagcaacacaagctgaatatcaggaaaacacatttcaattagtgacagcaggaccagtgcctgaaggccctattcattgggtagaaaatatgacaatgccagggaaaaatgcaaattcatttcttataatattctgtgtgctgaactgctaaactaatatttattagtaatcttagagtcagtagtctttgcatatacgttttacttcctttcctttatatttcatttatcaataagtttttggagtccccgtgggtgaaaatgttgatctgttagggatttagaaaatctagtaaaagtttgcctgggctcagaagcttattaatctatttgaaaaatatgtgtctgccactgtactaggcattaagcatacaaaaatgaataaaatatgaagtctttttatatatatatttttattatactgtaagttctagggtacatgtgcacaacatgcaggtttgttacatatgtatacatgtgccatgttggtctgctgcacccattaactcgtcatttacattaggtatatctcctaatgctatccctcccccctccccccatcccacaacaggccctggtatgtgatgttccccttcctgtgtctttaagctctttctgaacaggagagaagccacaaactatcatatagtgtgatacgggctgtgatatagaatatctgggagtgctttgagaacctacaggaaagaggaggtcttctaatgaggtcataggcaatgcttccaagggagtttttcttcaaatggaggaaaaggaaaagggattctaggtgaagggaataggatgacccaaggtctaggagtttgaaaatgatggcacttgaagagatgcatacaagaatgctgggctgagggatttgcatttgccccataggtagtgaggagccaggagagatatgtgatattccaggttcctgtggatgaaccatccaggtgaagacatcagaatacagtaagagtcttaactttgactgcaggtctagaactcacaagggaagctggcttgataacatccccaaaggagagaatttacattgaaagaggaaggctgatgacaagacattagagaaaagcaatattttaataggtaggttgaagaaatgatatcagagaagccaggctttgccttgtgtttggaacaggcctgccagtagatgcctttatagtaaaagataaataacaataaatgaaatgcttttattgttaataaaaatgttgatgatgatgacaatgatagtagtagctaatacctattgagcacctactctgtactgggcacagctctaagaatttttcatttaatcctacaacaaccatatgagataaatagtactgttataatatcattttcgtttggcagataaggaaaccaagatgcagaggctttaaagtcagttgtccaaggtcacacggctaataagcaatgggtttaggacttcaacagtcttgcttcagagtttacactccctatctgctatcgtatcttttaaatagtctaacaactgtttgggagatgtcttatcaaaattgctctctcgaccgggtgcagtggttcacacctgtaatcccagcacgttgggaggccgaggcaggaggattgcttgagcccaggaatttgagaccagcctgggcaacatagtgagaccacttctgttaaaacaaattaaataaaaaagtgctctctccctgggagttcaagatttcagtgagctatgattggaccactgcactccagtctgggtggctgagggagaccttgtctctaaaaaaaaaaaaaaaaaaagctcgctcatacccaaagtcagggcaataaaggtttgagtggtcaaataaagggttgagtggtcaaagtcacataaaggtagagcttcaacagattatttttctttagattttcaagtcagcatgaggttgtctgatacaaacatcatagatgccatggttaaatggttctgtttctcagaaagccccctttcttcttataactgccccttcctttttaacagaccagcttagcctgctcagcatgagtgagccttgactattcaatattccacaggcccctatagggcctgttggtggccatggtagggggcatagtggacttgctgatccttgtgattattgagtatgaatttaagatgcacatggctgaggctggtggtggtgaaggtgcgaagatacagcagcatgaatccaggaggtggaggatgcagtgagccgagatcgcttcattacactccagcctggatgacagagtgagactccgtctcaaaaaaaaaaaaaaaaaaaaaagatttgcaagagttaccacctgctgctataagactgtaaagagcatggactaaaactgaatgggggtatggggtgccaccttggcaggagttgactgagcctcaaggtttgtttggtttttgatgattctaagctgacaatcatagggaaaaagaataagagtgcacattcagtttaaaaccaaaatatactcactatcagcatagcaggaatacagaataagaagtccacagggcctggaaaagtcagaaaagactttgtcaagggaaagagattacagctgaataggtggaggagaaggtagcttgatcaaaaatgtgctgttgggaatacatatggtaaaaacaaaagataaagagactggcccaagcatcaggtcagatgtgtggagaggaaggtggaaaataaagtttcataaataaagtgaggtcagattttatggggccttcaaaggagttcgatgttttagccatgggaaaaatggggcaggtgggaatgcttgaactaggaattaatgatgaaagaggtatttgaaggtcattaatcctaatatgttggattgcagagagactgcaggtaggaagggcagttagaaaactgtaattatcaagtgtttgagatgggttaaagcctgaaggaagatgtggatggaggactgagaagcaaggagcaagtccaatgggcagtatagttagatgaaacagaagggagactaaaagcaggttccctatcttgccttgaggattagaagactgaggacatcaccaatgaggtacttaggaagataagcctattttcattattagttagaaaactattttttttttctgaattgattctcctaagaattttatactgtattgttttcaagatggacatcattctgtctttgggatgtgtcttatacttctgctggccaggccgtaattgtgatatcattgcttttgattgtggatttgtaccagaacttgcagaatgggggccagtggctcagaagaaaatctcggagataatatgtgatctctctttgaggagatgctgtagtacctccctcttgatggcagagagaatgattttgtgtggagaagcacagaaactgaaaacaccaagtcacaatttatttagtagattccaactgcaaataaagaaagtttagggataccttaaccagtttatttctttgtaatgtaggtacaagaatatatattacaaaaaacaatctgggcaagtttaaaagcacattttaataaagataaaaaaattttaagtgataaagtattctttcatagtttaattggcctttttttcattcccagtacatatggcaatggggtatcttacaatcagtggcattttcaaataaataaggtaaaatatccaggacccactgcttgtttgaaatttgcttgctggagttaagagaagtgaacattttaaagattttttttttcctttagacagaaccttatttcatttgtgaaggctgactggacttggatgctgcccactagttaatttagtgtggcaaaaaataagaattctgtgtctgggcttcactgtctgcaaaaatgaatgcattattgtaaaatgtgcactaatctaaaaagtgtattgccttcctagaagtctgagtaatgtcttacacacataatcacactgcccgtcttcatatggacatgagtcctatagtgcttgagaaatggaaattatttgactgcatcagctagtgcatcgtacttctggttattttgaatttttgtaatcagatgctgctgaggctgtggccttttccccacctcctctctcatacatatatatgagtggtgtgttcagtgaaattttctgacatgaaaaagaagtccttaaaccaaaaataataataataataataacaataaagggaccactgtcttagaaaacattagttacccgttctctttccttctcaaggaggaatgacttcagtgcaattaacaatccgtgtctttgtgtcccagtttgatcttgcccagtttgaaacagcttgcactactagattggttcttgtaagtgttgaaagttcttaattacaaattaaatcttgatcctgtaacttggtagtaatcctaccatctatatataactttacgattttcagaggactttctttattgaaggcagtatgaagcaggaagggcaggcattgtgccactttacggttggggaaactgagacacagagagagtaaatgacttgtttgggtcatagcagttagtagtaaatgtcagaggagggatggaacctagattgggtgactccttgttcagtgctcttttatttttacttctcctgttcatattgaattgtttcagaggttggaattaggaacaaaataaacctatatcccattttctgagtcacagtccctcagacatgtgaaggcagcaatcatgagttgttgtttgttttccagccaaacatatctcttttccagactgtagtaacatagagaccccctcaaagatccctgatgtgacagaggtaaagacatttactagagtcagaggtcagctttcttacctgtgaattggccaaaggcatctattaggctatggaatgttaattatttcctgcatttgtctttggctagccttctctaaatgcaccataactcacctgaaaaactaccagatcatgttgtttttgagttaggtcaccagccctcatcaggatcttttaggcatgcctggaacgttggttgacaaaatccaatgaaatgaccacctatttttctctagccagtgagtcttaataggaggtgagcaatgggaacacctttaaaaaaaagatgcctgtgcctcatcatatagttactgaaccagaaatgaggggagaagatctcaaagatggatattatgatggtaaatacacttgggaaattctaatgtatccctgagataccactgtcatactactaaagcctaaaatgacatttaaaaaaatgctaccacctatttttattggctcatacaaatcttgtcatcatttgatattgtcatgacatccgccaaaattataactgacccaggtctccctactcatgtacatattcattcattcaacaagtattcattgagtacctggtacggtggataaggtagtgaataagacaaagtctatatcccacagagctcgtattctaatgggtaagaaggcagcaaataaataagcagaaacatctcttaggtagtggtaaatgctacaaagaaagatgaagctgggtgaggagatatagaataatgaatagggggttgcaagctaccaaaacagaatggtcaggaaggctgaggtggtgacatttgacagtcctaaataaagtgagggagcataggaagatccagggtgaacggtagtccaggcagagggaacagcaagtgtcaaagtcctgaggacaaatttggactgctagccttcatattagtttaaaatcattgtttgattttataagacatactagcctttcagaaatataggatataattgatcagggcctgaaggatgaactcattttcttctgttagctccaggtacttcttaacaatacttaatctacttttgctgtttgctctttgtagacaacaatgcagaagttggatgcatcttctatgacatttttggacttgtgttttaagagaggtacattgcctctttggggatctggaatcttcctgatagcgagtcagcaagattggtgggcccaacactggcacatgtctcagccaaattctctgtgtagcttctgacaaatgccaaactactggtaaatatccaccccccccccccccccactgaaagccaaggacaataatattctttattcattttctggctctgagtatcttttctttttgtttttgcagcctaacctttttgtcatctttggcatttttcacaggctccagctcattcctggctttagttgaacttttctgacattcttcatataggtcagtgctactcttatatttcattctttgttatatgattctccttccatcttttatgtggttgttttgaagcctgaacccctcagaaagtttcctctgtgaccacattattttctctggaagcctgctcttttatctcccctccgcagctgtttgcaagtgtgtgtatgtgtatgtgtgtgtgtgtgtgtgcctgtctgaaatgttttttagaggctcattcctttctgaggtaggtaggttcctatttagaacttctgagcctaacatcatgcttagtttacttctaattttaatgaacacttttattaagatcctgtcttagttcatgtgcactgctataacaaaataccttagactgggtaatataaagataatagaaatttgtttctcccagttctcaaggctcagaagttcaagatcaagatatgagcagattcagtgtctggtgagggctgttctctgcttccaaaatggtgccttgttgttttgtccttacatggtagaaggtggaagggtaaaggggcctacctcgatccctttagcccttttataaggcacgaattccatccaaaagagtagagcccccatggcttaaccacctcctaaaggccccacctcttaatactgttgcacggaggattaagtttcaacaagacttttggaggggacacaaactttcaaaccatggtatattctaaatttgtgtcttagttcatcctttctctttcacaaactccaggatgacataatttatttcctccaaaatttctgtcacaccagcatcaccttccagtgacttcttcttcttagaattatgatagaggagctgttaatcttcttttatagcatagcaattgagaccatgggaaaatctgggttcaagtccaacaccaccgcttactctctgggttggctgtaggcaaattgttatgaagactgaaatagtgcacaccaagtgctttaggaatgtgcttggtatatttttagtcctcaataattgctagtggttaccataatcattatcagcatcaatatcatgattctgagataagaaattattgtcaagctaagtcaagaatgaatagattcactaaacaagtatctggactgtcgacattcccctaactataatattgtaactctgtaaaaatatttctaatctatactcagaaaatatccttcacaccttctgttcctgagagcttcaatgtctttttatacagcagtttaactgtcctcaacttctcgccccaaacttacatattcaaacattcatcaagatgttcaacagaataaagggccttaccaatatcaaacaagcaccctttaaaagtgctctgtaaaattatcctgtaatttagaagacaggtagacgacgacatgaccacataaaatcctgttattgttaggaatgattactactccttcaaatacatacaaagtcacttttaagttggttaggcttttgaataaggagagaggaatggctcaaccagtcattttagaataaataattatcccatgctgatagagtggaatggaataatctgagagtgattgtgggagtttggacttcaatttgaaatatacaatgagttgttcatgttgaaaaactgaccaggatgaaagactgttggagttattagataattctcttccgatagaagctgagctaaaaataaacttcctgtttacttcctttcctttcatctaaagtcaagacgatgcatgtcaaagatggctgtgcttcattcattcattcattcattcattcattcagcagttatttattgagtatccactgtatatcaggtactgttctgggcattagaattacagaggtaaatgcaaggtgcctgccttcatggagtgtacactgtacaggaggggattagatttaagcaagagaataagccagaaagataatttcagatagtgttaaggcctgtgaagaaaagagaacaggccaatggaatgggtagtgcaaagagggaggaaatgagatacttagagacaagaatgatgataagtttcagatctggggagcattctctgaggggaaactggattttatattctatccagtgtggattgagaagccatttagaggttgcaagcaggagagtaacatgttctggatttcatctcacagcaattcccctgtgttcttaggataatgtattggaaataaatctgactggatgtgaggatgccagttaagagtctggtccaggagaaaaagggtggtggattggatgagagttggggaagtggggatggagaagagtgactagagtcaagatttattttgggttctgaagtgacaggaactcccaacagacacagctctgtggggtggtaaggtagagggatgtttctgacctgcctgtctggtggagggtggaaccctttgttgaaattagaaaggtagaggagctggctttttggagaggatagatatagagagtgaggaatgaaaaattaaagtcagggctttaaaagcctatgaggcatccacgtggaggtataaaatagtcagccggagggatagtcaaagcaagagggaaattggggaacattagcatgttcataatattaatactatgggaataggggagatcaacaaggaagaacgtagagagagaagaaaagaggacccaggacaaagccctggagaaattaattagtgggtagagaaagaggatgttgaagactgaaaaggaacagcagaggagttgggaaaaccaggcagatattttattgctaaatccaagagaagagctttcagaagttctgaaagttgtccaccatgtgaagttctactgggagattaagaaccggagagcaggaaaggcccatcatagtggccagatggaagtcattgtgctgtaagcaaaagtgttttgagtggggtgtaggtgggtggagaaaagattacagggagtgagagagtgaatgggacgtgaggaagcagatggagatggtgagtgcacatagtttttcaaagaagctgtgaatgggcggaacctggaggggatatgagtcatcacagaaatattagacatttctgagatggcacctgaaagaaaagttgacctgggagaggactggctggcatatagtaattactctggggtttaaagggtaggaatggcttgaggttaaggtctctgacctctttttagcttaggacaatctctcttcctcttttgttcctcccaagaggacgttgtttgagcatccatccatgactgaaacttgcctgtccttgtacattttagtaacatgagccaataaatttgcttatatttttatagcttaagatgtttgcaatagagtctttttattgtctatatggtacatatgtctgtatctatgtgatacatggctacataatcatataaatatattgtctacatggagtttctcagaattaagaaaaagcacaattactctgtagttcaccctaatagttatctaaactaaggaaagggggaataaatgaaaaaaagtaacattttatcataatgttgtttttagatagcatatatagcatttactttaccagttcattgtaagttggcaaacatttagaacttgaaatgaaatcagagctcatctggtttagtttcattgagtagaggaaatggaagcctaaagggagtgaatgacccatggaaggaaagaacctaggacctggctttcaacctaggaaccagagctttggagtaacacagacctgggtttgagttctgcctctgccacccatacccttgaaactctgggtgaattatttagctgctctgtgtttattttctaatccataaaatgaaattataagacattgatcttgtagttatgaggcatatatgagattgcaaattaactagcaaggcgtctagcacatagaaatcccttgatcagtgttaaatctgtagtgtcccaaaaccttgaatgaattagtagtaagctgaaaaacatgaagatcatcctagtatataaaaatcatactttcctctcttgtcttcttactgttagtttttgggtaaaccagtaattccatttttcaacaaattatttggataattattgattcatataaagttataagaaataacagaaagaacttgtgtacagtttcccccaatggtaacattttgaaaaacttaataaaatatcactcaataatttgatgttatgaacaacaaatattttactggtgctaatatctattaaaacatcagaaaattcaattttatgtaatttgggactaaagcaatatcctgaatttcagtatctgttggaaccattagacaaatggatctagtgccacagacagctgactttgctctgacttggtgaccttggccaaggcacttaatttttatgctctagagctaattataaattgggacaaaagtactcatctctgcttaattcaggggagtgttccagattaattcgatactgtgcataggtatcccctggctatctctcctgccacctttctttatatactgtctatgttttccttttccttctttgccaacccataatgattttctcagttttcaaagcacaccatgttttatctcgtttctatacattttctaatgctgttcctccatgtctatcttattcccttcctaccctgcctcccaatctatacatacacttattcttcctcctcttctttccttccacacccccccccaacttctacttaatttttgaaatcacaacttttacaaaatcttcaggggaagctctgcataacccccagaccagattaggtcccagtggtgtgttcccttagcatcctgggcctccattcacagcactttaccccatgtccttattgtgctttgtctagtgtttgtttttaccagtatgtgaagtgagggcagggagaagattgccttattcaccacttcattgtacttatcacagtgtctgccacagagtggatgcccagtaaatactcattgaatgagtgaatgaatacatttaataaacatacacttgcttttttggaaggaaacgctgtgcagatcaggtggaactgtgggtggtatttctatttagtatgtgactcatctatattgaaggctgttaaatgtttaaagtgtatctttgtatggtagtttggttttccttatttctttcttttgttttcatgtcagaattactgtgtaattatgtcttgcaaaacacctcaaatggtggccaagataattttttttttttttgaggtggagtctcactctgtcactcaggctggagcgcagtggtgcaatctcggctcactgcaagctccgcctcccgggttcacgccattctcctgactcagcctcccgagtagctgggactacaggtgcccaccaccacgcctggctaattttttgtatttttagtagagacggggtttcaccgtgttagccaggatggtctcgatctcctgacctcatgatccgcctgcctcggcctcccaaagtgctgggattacaggcgtgagccaagatgaattttaatagggaagacaaacccaaaatagagatgaatgtttactgtggtgcattaaagcattaaagagttgtgaatgtgaagctctccccagtctttagtaacatcaagttatcttggtacaggaagcaaatagccacttctcattttgcctcaggtggtgaaaaacttcccattttaggccagttgagattgtatgtgctgtatggctatgaatgccaaatatgagtcttaaactccaaatatgtggctgagctaaaagtaatgttaaattgtactgtctgctttggtgtcttataatgacttaaaataatcaaagtaagaagaaatttttgtacctatgtcaactgagatttcatttgttttttttctttttcttcctgtagattaggacttataaatgttccccttcagagtactagccttgatttatcccattgttcctgccttttgctttctctgtctctggtgttgggatagcccaataaaaccaactttcttctatactcagcaattgcattgggagggaggagcagagacttttccttgtttcatttctagtcactaagagggtattttgagccttgaggtgtatatatcagagatcctagatacctagatcctatagttggtttactatcagaatcaccaggcaaacttttaaaaaaagtgcagattctgggacccatgcccaaaaattcttattcaataagtttagggtgggactgaaaatcaaactcttttgatgatactgatgtataaccaagtttggaaactactgtttgggaatcccaaatgcttgaaaccctttgtgagtctttggtgtctttgggctaaaattccaaaccttgagcatggtcctttgtggtctgacttctcctggtccattgctccagcttcttttctgcacgcgaccccctcacactcttctactgagccatggtaactacctgtaggttactgattgctcaatggattttcttaacttttggacatggtggaacatgttttgccccctccatgtcctgggtaattcctgttgtcttttggacttctctcacctactctgatagagctgggcttgtctgggctctcctggtgccttatctcttccctttcttttcctacttatcacactgtattgatttgtcctgcacatagtgggaataaatagatagttatgaatggaataagttgcttgctcagttttctgtctttcctactgtattatgagctcctttaaataagacctgcatcttttccactttgtaggcctcgtgcacgtgttagcatgtggagagcacttaacaaatcatagttaaacatgtaaattaataactgatattgaaaataaaagaatcctgtcctttgggtaaaagatcctgcagtagttaatgttctgagctggaaaacatttgcctattacaatagacatgtattttactagaatagaaaagaacctgggccataaacagtaattgagattgggaatattaatagaaaaacagagaaacatacagttaaattgttctgtatgtattttcaagtgttttattttattttcatataggtaataccatcgtatgttacaaattttaaagataaaatagtatacagggaagaaagagtctccttcctgcctcatttctcagccaccaatttctccaacccagaggcagtcaacgttttagttttatacctttcacaagacgaatggtaacataggctgcaggctgtctgtttgcttttttacttactggtttgtcttactggcaaacatctatataaatgagtgagtacacaaggagattctttttatctctttcattgtttcaaagtattccactctatggatatattccaattcattttactagtccattattgatggatttttaggtgaccgttttaaattccatatctgtgaattcattttttcacccatgtcattttgcgcatgcacatgtatatgtaggaaaatttttagagctatattttctaggtcattgaatgtgtgctttgtaatattaccaaactgccaaaatggggattatatcaattgttctgttaattgtcaccaccaacctcaaatacctgggaccttgtgggctccggatcaattgttctgttaattgtcaccaccagcctcaaatacctgggaccttgtgggctcgggccatcaagcagatggtctttcagactgtgcaatgtattctgtaatgtgtacatttggttgagatgagttgaaagtatttgagagtacctggaactctgaagctacctcagctacctgaagcaaccattgaggctgaattttcagaatgttagtgtttatctattaaattaatcgtttatttagggatatttagttaataaataaaataataaaatgtaaacattttctcattggagttttatcagtatttctgccattgatccttggaaaggggacttatatatgattagagtcaggaatttggaaatcataggaagtaacagcaaagttgacagttgactgaaataattaaaagaaggtctaggaggacatggttcttccttgtacacctactggtcatgcccaatgaggagagtcattcctcctatgctttccattttgttgaaggatcataacaggctgcactttctgatagaatttcacatagtgctggagccaggttcaccatcattttctttattttggtttgcatttctgtcttgaggatctaaatttttttcttaggtaacttttctggcatcagaaaattttctcaggcatacattttacctgaaatacttattatgaacaatgaatattaatcattctattgagactggcagaacctaggatcatgaacaccacactttaaatgtgcttttattttaagtaagagtcatttttttctgggatttttaaaattgttgataaaaatttaggaaattcagaactatattttgaaaaggaaagaaaatgtttctacctttatcatatgaatgcagaaattattgatatttggtatgttttctttgatcttgattatatagatttcttcacattcttaaacacttatactgtgcaatgtatgtagcatcctgaattttcaactatatgaaaattacatattttttcaggttaaaaattattttaaatgattttaatgagatattaatattctatattatgcatataacataacatatttaaccattctcatattgtgggatatttgtgtttctatttttagctcttttaaaatgtgctgcagctaataacttttctgtgaatgttagtctatgactatcttgctatgcatattgcaagtggaaataccagatcaaagggtatcaatattttttaaactctagatacaaaaatgccaagatgcttccagagtaagactctaatttatacctccatcatcaatttatgaagttgtccatatcatatattcttttaactttgtcccccattttttaaaaacatgcacaattatatcttcttgtttacattttaaacattattattagtgaagtagagtattttaaaagtttgttactcatttttctttccctttttgttaaatatctatccctgcctatccttttgtatttctgtctttaggagacttgctgctttttcccagagattttaatgttctttctatataaactatatttcaatggtcacagatattttctccaggaaattccagcttttttgccttttaattttctcagactgggtaaatttaagaatttatttatatgaagtctactaatcttttactttgtgaattctttctttgcttttgtgttgggaaatcctttctatattcaaagtgatgacaaatattcatccatattttctcctattttaaaaataatttcattaaaggataagttcttaaaggagtaattctataatgtatcaggtggtgggaaatgcagagaagcaaagtgaatcaagtagggggtatgtgaagtgtgggctgtgaaggaaggcctcgcttaccagatgcacctgaccagagacctgtggggggaggggagggagacaagccaacgtacctgatgctccaagcagagggatcagcaaatgtaaaggtccttagtgggagtatgctcagctcaagggctatcaggaaggcctgtgttgggggagcagaatgagtgcttgggagagagcaggtggaaatgaggcctgaatttcagaataggccgggggcaggagcattctagcctctcataaaccattttgggtgcttgggtttttactcttaatgacacaggaatcattgcaaagacttaaataggggagtgacctgacatgacttacttttaaaaaggattactttaactgcttgagaaagcatagatatctaaaagaaaatgtccaggcacagggatcctatgtataccctccttccttttgaaatttgtgctttcttgcttataaacttgctataatctatacctaatctattaaaaacatatttcaaataaataagaaagagatggatgtagcagttcagttgtgttcagatgtatgtaacaaaccctgctgcagaggttgaatccagtggggctttatttttctctcatcacaggaaacctggaggaagacaattcaggactagttcagcagctcaaggaaggcctccaggatacaggcttcttctactgtcctaaacatgtatgtggctatcatcctcatgttgacaagattgatgctttcctccagacaccacattctgcatcctaggcaggaggaaggagatggtcagaagacagctgaaactgtcttttcactaggaaacaaaccattttcctggatcctcagtagtaggcttctgattacttcatggccagaactgggtcataccactattccttgtgggcacgttgctgccttgaataccagctataccttcttactaaggaagatggaactaacagtgtttgtgataatggatagcctgtagaaaaatggatatagatgagtctcaaaataaaaatatacaaatatacatgtcctagtcaatatacataaaaattacaaaatctgtaatattccaaaacgcaaactaaaactgtcagttaccactttgtccgtcatgttggcaatttaaataaatcgataacactcaaagttagcaagaataggtaaaatgggaatgttttatggcgccagaggtataaccttcctgggaacaatttaatcattcatgtggtgtgtatgtaagtgtatcttattgagggtttgctttgcatttccctgatgactaatgaagtagaggacctttgtacaactttctaaccatttgaatttcccctttgatgagctgcctgttcaagtctcttgaccatttttctacttaattataatctttttatataaatatgaagaggttgtttatattttctagatacaagccatttgtctggaatatgcacggcaaacatcttctcctaataagtagcttgccttttcaaagctctcttaataatttattttgtgaacagaagtttttaatattatataatttaccattcttttattgttaagtacattgtatgtcctgtttaagaaatatttccttactccaacttcatgaagatattttctaatataatgttctagagatttgtttttaccttcatatttattaaaaagactgtcctctacaattacttagtaatattacctttgccctaatttgaatgttttcatatgcattggtttctttttgagcttttgcttctgttctattggtctatttgtcaatcactgcacctgtaccactctctcttagttaccatagtttttaaataacttttggtatccaaaatttagcaggttcttccccatttttttcctgttcagaacctataaagtctttcatttacctttactttagaaattacagcatacttccgtgacctattaacttccaatgttgactgaagtatgcataaatgttttacgtgtatatttatcaaaggctaaaggtagtatctctgtcctcttcccaaataacgcaaggatctaaataccatttaactacaatcttcccattcttacatataatattacaattgttcagtattttacttatacctgctttttgatactccccaaataaaccattattactattttgttgttgtttttgtagccagtcagtagttctaggtagacttaccaacatgacaaccagtttatttatgtattattgtttttgcattttccatgttccttccggattctgtctggcttctaagaaggagcatcttttatggacagttctgagtgataaaatctctctggcttactttctgaaaaatatctttattttgcttcattcatgaatatagtgttgctaagtatagaattctaaagtgatagttattttttcttagttcttagaagataatctttttggatgtccttaggagatattttttcatcgctttctgtcatcttctgtagctgatgaaagaagtctgtcaatgtaattatggtttccttgtcaataattgttttctctgtttgctttagctgtttcctcttttctttggaagagtgcagttttacttgttgtgttagctgtggtatgtttagaaatactagagacccgtgttttccttctattatggaaagttttcaaccattactttgaatattctctcccttattctctcctcttttatttttagaatttatgtatacacagcattgagtattctgtgcctcatgtttcttaatgaatctttcatattttttatttcttcatttctccatgctgcattctgcatgattttcccaggtgtatcacctcccttattacctccctctttagttggtgtcttttttgttccttttcaaagcaaccttttattcccacagagttataaactagtcctttctactcattcactgtatttatctaatagtccattttagattttcctttcttcagttgtggggatacaaattattgtctatttttatctgcttaatcttcctcatcatgttccatttccttttgtgtttcatagcttttctttgtgagttcctcttctgcagaagttttgatagttgttgtttgtatgtacatttttgaggaggggattccatgtgtcctggcttctcatggactgggtggcattttgaggtctgtggcttcgtgtagggagactgaatgctagctttcacctcatgtggtcccaagttcatttttttttctcctcatacgctttatggcccaaacccctaagttctaaagtctaaatctaaagtccatttgaagtgcatcaattcctgcctcttggtcaggaatcaaatgccttctttgtttctatagctggggcattccatttcttagtttcaagcttggctttgtaatgctttctttgttgtatttgcatgcatcatttaagtgtgttagtaatgtcattttggtccatcgtatccttttttctcccctttatttgttttattgtcaataacttctactttctgcctttagctttaattattagttactaaaacaactttatgctaacatcagaggcttataaaaaatagaaaaatttccccataatcccatattgagtcaaaatgatctatttttattctctagatatccttcaaatctttattcatagggtgctgttgttacaatcatgccatatatttaattttgtgttataactctcttctggtttacattttgcccgtatttctttgtaatcttcaaattaccattttaatggctctatgatagcctcttgaattggtgtactctatcatacttacagagtttgttttctgtttttccttgtttatacaaatttccccagaatatttttgcatttgtagtgtttgcattattttctgcggctaaaatctcagaagagaggatgttaaattaaaaattcttaaccatgcattgccaatttgacctttgaatggcttttctcattttacagtgacattaggaataaattcacataccgacataaatttaatacctactgtgtgggaagttctgtgcattttgagtggcatagtgacaaataggacctgcttcaagtttcaaggaatttacagtgaaatcaaggatatagatatactatcaacttttataatattaggataaatggagcaagtggtacagtcaaaatctaatcaaagaaggaattttatagaagaacttgtatttcagccagggatagaggaaggggtggagtttccctgtacaaagggaggctggataatattccaggctgagagaacttaacggagaaacagccagaggtatgaaaaagtctacagtgcatttggaaactattgaaatcgatggtgtggctggaacaatgggtgagagaaaggagcttgtaggagacttgaagtactttgccgaaggattttggttataatcagccagaattttcatttctgccactaattgcaaatgctggtttgagaaaagcatgcactgtagattcatggtagcctgtgattggcagaacccaccagtctcctattttatagatgaaaacaatttctacggaaattaagaaaattttccaagtttacactaggagtgtatctgaaggcacacttgctccctttttcaagaaaaatttgtttagcatctgtttgtaactcagtagtaagtgcttggaggatagaaagtaaatacagtatagggtcaacttctgtagccagctgggggaaaaacaaatcaatatttgtaaaatggcaggataagacaatgatagaaatgagtaaagggtattttgagaacacagaagaggggaagctatttcagcttggcaagaaggatgaagagtggaagatggtggctctattaaatcataaaggatggataggaagaagcttgccaggtatacctcacccatggtgagggaagggagtttcagcctgagcaaaggcacggggtaggaatcagcatggtggatgtgggaatcagagcagcttcgcattgtggaagaatcacatgtgaggcagagagtggcaggatataaaaccagggctagatggtgtttgctatggtaagtagtatgggcttgatttttttagggctgctgaggatcttaaaatatttaagagggaaacttggcaggactttctgattgactggatgtgggagtaaggatgtgagggagagaagagcaaaatatgattctctggtagacttcttctttcttctctagttagtgagtttatcaagatttaagatggtagtggttttgtttcagcagaagccatgcagtgtggtgtcatgtggcagtggaaaaaccatcatggggcgtatggagactcaaatgttcctgaaatgcctgagagaacatccagggacatttggaggtcactgccagaggccatgcacattgtccagttttcagtggtttctcttcgttgctaagaagcttgaacatatacagaatgcatttaataatgttcagaaaaccttcttaagtggacaatctcaaatgtacaacagacaaagcagaatcagatatttttttggatggtatacctcattagtacagaataattacaacattaggtgataataatagcaactgatatttatggagtactcactgttttccatgtaggatgttaaatgctttacattcgtgatctgacttaatccttaccataatccctactcaaggaaacaaaggcacagagcatgtaattacttgcacacggtcactaactccaatgcaaaccctgaggcatgccaactccaaagccctcatttataaactccaggccatattgcctccccatgaagctgatacgcagacaagtgtggtgccactttgagattctctgggttcagctgtcaaacaatgacatcattaaattatccatgtaaaataagaagttgagtcctctatatccgctgtgtttgaggagtggcaggatgtgggatgaaagaaagaaattggattgcctctgaagccctctgaatttgtaatagaactacagcctcctcaaaccaaaattataaaataacctacatcactctgaaagaattttcttactaaatacgttaatgtgagaagacaaaaccaaaccaccaaagataatatttgaatattgataatattcaaacctcatttgaaatcaaaccactagaaccagaaaagaaaatgaaatgtgactatttaattcctcagcagagatatatgtatgaaaacataatttctatcactggtgataggagaatttgatattgaggacttcatgagttgggaagagcgatttcttaaatgaaggtgataaaagcctgtataaataatacagtcatgtattgcttaatgatggtgatatgtctgagaaatgcattgttagctgatttcatcactgtgggtacatgaaagactgcacttacacaagcttagctagtatagcccactacatagctagggtacatggtatggcctgttgctcctaggctgtaaacctgtacatgttactgtattgaatactgtaaaaaactttaacacagtggtatttttgtgtctaaacctagaaaatgtacagtaaaaatatgatattataattttatgggaccgccatcatatatgtggtccgtcattatgaggctcatgactgtctaagataaaactgtaggcctcataccaaatagagaagattggcaatatctatatgtatatgggtgtggattgtataattaatttctacttagtatcctttgcttcttagaaactttaagttccctcaatttaaaaaaatccttcttgatttcttttgctttttaaagatattttgatgtaaaagagcttttgtttttattttctttgcctggttctccactcaaaaatttaatgcctgtgtgacttagaattctcataagatttagctttctgtctttttacagatatgaagtggcatagtaggatttggggtccattttccctcagcttcctatttcttgccagtagcttcattgcaaaaccactctaccatctgccctgcttctttttctgcttccacccccagttccctcattttctaattactcccaacaggagtgactcaaacatatattggaagcaagattcccacagttgccaaataggagcagggaagtgccacgtactaggttttcacaaaagaagtcattatgtatctggatttttatctgccagagaagaagaggaatgcttgaggaagtcaagtctcagggcaaaaaagtaacataataaacaaattagagaatggcactttcacattaccatttctgttacattttgtggtagtctttcaggctgttcacaagtatatggctcccttccttttttgggctatagtacagtatcgttccgtgctagtatagttcggtccaggctcttctgcactccactgaactcggatatggccatatgacttgacttgttttagccagttaaatgtgagtggcagtgacaggtgtcacttctgagaagaagctttaaaagccagtggctttaagagcatattttgatgtcttatttttgacagtagttgctctatcaacttgagtctttaagtgacagtgtgaacagagcaccctccccataccagctgactcataatggccaggtgacatgggcaagaaagaagcctttgttgttttaagtcactgagatttggggagtaatgttatggtggcagaatctagtctgtcctgactaatacactgaaacagttttagcatgtataatctcatgtagttaagagattcaaatcataattcctccgatacatggatcaaagataatagaagacaaacatttaaagtgtttttaaagcattcactcaaaaagaatgtattttgtttgcatccatatagtagcatctaacctatcgcacaatagttttgtgttatataatagatctgccactgcttcagagcctctgtgagggcagagataaggtctcgttcttttttaatcctggcacctggcactaggtgtggcatttagtgggtacttaatactattagattagtgaagaggactgaaaactgcctggcacatgagaggtactgaataaatatttgtacagatattaatgttgttaatatctgtaccaaatattcagcacctgtcattaaaattcatccatcacctatcataaaattaattagcattggaaattctctttgtacaatcacaaataattgtacaaagtgcattttcaacatttcaaccccttggtagctactgggctaatttttcaggcacaaagaagcagtttaatgtggaccctcaagttgtattttttcctgccaccagggcctttaaagccttacttaaggaagtaccattatttcaactttggcaggagggatgatacatttgcatgtaaactggtttggagtttgatgctgagcttgcatcgtgaccacctttccactggacattataattagggggaaattctgatgctaaagcttggccagtgtatagttattaattcaaagttgattatctcaccagggattgtgaagagtttcatttggttttaaaactgcctaatacatgttattctaaggtgttgggaaattatcagtgtggctgctttgtgtgctctccttggtccagtgaaagcttcaccttactccttggcccctgccagctcctattttatctgtttcttcccaggaaggatttcaggcatctgggaacatacatgtacacaaggttgttgtcatcaggtccctgcttgcctacttccttcttcctaaatttagattctctaaatggagcttactttcctatgtctctgtcctgtctaagcagtttctccattacccaaaatgcaattccccaggttcattaattcattctcaaatatctcttaagagcctcctctataccaggcattgttcaaagccttgtgagtacagctttcctggaacttctatttcattggaagagacagatgataaataaaaaagtaaatacagtcatgcatcacttaacgatgagaatattttctgagaaatgcattgttaagtgattttatcattgtatgactatcacagtgtgtccagagttcgttccttctggtgcatttgtgttctcgctgacttcaagaatggggccgcggaccttcgcggtgagtgttacagctcttaaagatggcacagacccaaagagtgagcaacagcaagatttattgtgaagagcgaaagaacaaagcttccacagcatggaaggggacctgagagagttgccgctgctggcttgggtggccagcttttattcccttatttatcaccacccatgtcctgctgattggtccgttttagagagcactgattggttgattttacagagcattgattggcccattttacaaacctctagctagctacagagcactgattggtgcattttacaaacctcttgtaagacaggaaagttctccaagtccccattcgaccaggatgtccagctggcttcacctctcaacagtgtgtacttaaacctagatggtatagcctactatgcaccttgggtatgtgatatggtctattgctcctaggctgcaaacctgtacagcatgttactgtactgaatagtgtaggcaattgtaacacagtgataagtatttgtgtatctaaacatatctaaacatagaaaaggtacagtaaaaatacagtataaaagataaaaaatggtacacttgtataggacatttaccatgaatgaagcctgcggaactggaaattgctcttgatgaatcagtttgtgagtagtaaatgaatatgaaggcctaggacattaccatatactactgtagactttataaacatcctacatttagtctacactaaggttaaatttttttgtttcttcactgttaaattaaccttagcttactctttttgctgtataaacttatttaaaaaatgtttttgactcttttgtaataatatttcacttaaacacacattgcacaggtgtacaaaagtatttcctttcattgcattcttattctataagtttttttctattttgaatttttgttctttaaactttctttgttaagaactaagatacaaactcacacattagcgtaggcctacacagggtgaggaacattagtatcactgtcttccatctccacatcttgtcccactggaaggtcttcaggggcaataacatgcatggagctgtcatccatgataacaatgccttctggaatacttcttgaaggacctgcctgaagctgctttctagttaacttttaaatttaatttaattttaatttttaaatttgtattcttttagagccacggggtctcattatgttgcccaagctggcctcaaacacctgggctcaagcgatcctctcacctcagcctctggagtagcagctggaactataggcatgtgccactgcacccagttaaatttttaaataaatagaaggagtatactctaaaataacaataaaaagtgtagtacagtaaatacataaaccagtaacatagttttttattatccttattattattatttgagacggattttgctttgttgcccaggctggagtgcagtggtgcaatctcagctcactgcaatctccgcctcccaggttcaagtgattctcttgcctcagcctcataagtagctaggattacaggcgcctgccaccatgcccagctaatttttgtatttttagtagagatgggatttcgccatgttgaccaggctggtctcaaactcctgacctcaggtgatttgcccacctcagcctcccaaagtgctgggattacaggcgtgagccactgtgcctggcctttattatcattattaagtattatatactggacataattgtgtgtgctacacttttatgcaactggcagcacagtaggtttgttcacatcagtatcactgcaaacatgtgagtaatgcattgccctatgacattataatggctatgacatcactaggtaataggaattttccacttcggtataatgtcatgggatcaccatcatatatgttgtccatcattgactgaaacgtcattatgcagtgcatgactgtatacggtaagtcaggcagctgtaagtgctacagtgaataataaagagggaagaggtattatgtttgtggaagtagggtgggacagtgttactaatcatttcaggacaggaaaagcctaactgataaggtgttaggtaaacagctgaaaccttaaggaagtgatgaagaaagccacgagcacatggggtgaagaggagctagaaaggttcccaacagaggggacagcaggagctgaggcaggagcatgcttggcaacttcaaagaagaggaagcaggccagagtaattggggatcagagcaggatgggctgaagtggattatacagatcttgtagggctttttggtcagtgttatttagtctttagcctgagtaaggtaggaagctgttgtgagtttttgagcagagggtgccttaagaggatctggctgatacggtaagaactggtcaccagaacagaaaaagggtgaccagttagacatctgttagataataattcaggcatgaaatgaaggcattgactttcaatactcagctcaagtgttaactctaactaggaagcctctcctaactcccctaggctgagttgagtctacctcttttgagtttctgtaacaatcttactcttgaaatgaaggctttcggctgagttcacttatatttggaagctgactatatagttgagaggtctctgaattaatttacaattagaataaagtttatttatagataagtaaaagggctaacttagtatattatgtattatatattcattatgtacaaatatacgtgcattatattattaaaacttaacaataattgtggcaattacttaaaactttgtccattacaaagatttttgggacaggattattttgataaggtttaaaattgccagaaatggtaaaataaaaagcagagtgactcatgatgggttttattattgttttcaaattctttataaactaccccgtaatgcctatacccacagtggactgatctcactgccttgtcttgatatatcactgatggtaagatcttttattcaaagtgccttgagcaaaagaaaattccttcaggcacggtttgatccagggagctcgaacagtgtcatcagagctcctccaaattattccaatctgttttccatctgttttcctctgggttggcttccttctacagcaggctgtctacttttagttgcaagatgactgacagtgactccagccatccaaatgcctttctccaggtcactgcagcagaagtcccaaaatatgactctaacaatgtcgtatgcccgtacttgaaccaatcacagtggccacaggaatgcaatattctaattggcctttgaaagtcaatattctaattctgacaggcttgggtcacttgcccccatttggagctgggtatggggtaggtccattttacacgaattacatggaagtagaggaggaaaggcaggcccccaagaaaaattaagattgctgttagcagaaaaagaggagatagatatgggatattcaagctacatccatgtactacaagcaattatttctgattcctatccagaattctgtcctaaaagtgttcccacttggtaaatcaggtacatagatatgaagttctcacccccgcattgattgccactgtagcttcctcttcctttcgtaggattctcagcaggaatcccctcttcagcctctcactcacacacccacacacagacacctttcatcataagccctgcttttgcctcaaggagctttcatattgtgtgcgttcagtaaagcaaaaaataattcctcacaaaatcggcattttttattatactttaagttctgagatacatgtgcagaacgtgcaggtttgttacatagatatacatgcgccatggtggtttgctgcacccatcaacccgtcatctacattttaggtatttctcctaatgctatccctcccctaacccccgacaccctgacaggccccagtgtgtgatgttcccctccttgtgtccatgtgtcctcattgttcaactcccacttatgagtgagaacatgcagtgtttggttttctgttcctgtgttagtttgctgagaatggttttcagcttcatccatggtgtatatgtgccacattttctttatccaggctatcattgatgggcatttgggttagttccaagtctttgctatcgtgaatagtgctgcaataaacatatgtgtgcatgtgtctttatagtagaatgatttataatcctttaggtacatacccagtaatgggattgctgggtcaaatggtatttctgattctagatccttgaggaatcgccacactgtcttccacaatggttgaactaatttacactcctgccaacagtgtaaaagtgtctatatttctccgaaaagcaatgacaacaaaagccaaagttgacaaatgggatctaattaaaccaaagaacttctgcacagctaaagaaactatcatcagagtgagcaggcaacctacagaatggaagaaaatttttgcaatctatccatctgacaaagggctaatatctataatctacaagaaacttaaacaaatttatgagaaaaaaacaaccccatcaaaaagtgggcgaaggatatgaacagacacatctcaaaaggacatttatgcggccaacaaacatatgaaaaaaagctcatcatcactggtcattagagaaatgcaaatcaaaagcacaatgagatatcatctcatgccagttagaatggtgatcattaaaaagtcaggaaacaaaatttgcattttattttaccctgttgatgctgtataaatccaggtctcagcaggaaacagatggaacactcaaattaggataattcaagaagagtataataaagggactatttgcaaaggtgtgggtatcgtgtaagaaaagcacagggacattacagcgctgtgggactagtaaatgaagctctgtttatctcccccaggtctgaaaaaggttgggggaggagatagccattgccagagctaccagacttggtggggagacacagccagctgtggatgatttcataggaaagccactggggtagtaatactctgacatctctctcccttagctttcctgtcttctacaagtgcctttcattggcagaagccacacggcaggggagcccattgacagagtccattccagtcagcctctagagtggagggcagggttgacaagagaggagagaggatacggaggggaagtggatgttatccagaagagtccatctctttgtcctctcagtatatgtgcttatctttaagtgaaaagttcctgttcccttcacagaggacacaggaagtctcatcgctatggctctatgttggataattttactttaatcatactgcctcttcaaagcagtggcaggggaataaaggaataatggaaggcatagcacctgcagttcttgattctgaagcataaggtgtctactctcaccatgactccacgttccccttaccttctccagctcctcagctggatgtggctggatggcggtgacccaaaccttcgttctgcagaatctcagtgccacccctgcccccacctttttggatagcttcagtgttatttggttccaagcatggtcctcaatgttgtatcagcaacccagctgctccctggtagttgggcttactctgtaagtccttttctctgtgttagttcagtaggatgatgaatccaaactacctaggggctgtctttgcttccaacttaatggaattgtggctgtgtttcctgatagaagcatttctacattaaacatgaggacttccaaggtcatgtggtcaagctcaaggtcatagagatgagaagcaaaaattctgtaagtggatagttagtgattagggttagagttaggataagaacactgatacctctccttgttcctggtcctgtgcattctggctgaggaggagatacgttatacaaaatactgtttatgtaaaatgctttttgaatgcatatactaaattctgtgggacagcagcccaactttgtagaagttgtctcctctcctagctcccactgtaattgagcctttgctctagacactaacaagacagagaggcctgatacagtaaaggtgtactgttatccgcagtaagcaaatggatcccgattttctttactgatggggctggaggtgggaggtgagggcatgagtacattagtctggtcagtagctacataccaggcaccacactctgtgttgattgctgcaataaaaatatcacttctggagccatagttgtgattggcaatatcacttggttcagtttatgactcttgcttaacggtcttcatgtcttcagaccatcttgtatcagtcaaggttctccagagaaccagaatcagtatattgcccagatgagcattaagcaaactggagacccaggagagccaccagtggtatattttcagttcatgtccaaaggcctgagcagtaggcgagccaatggaataaggtctagcctgagtctgagtccaaaggcaggagaaaactgatgccccagctcaaagacagtcgggtgtagagagttagttcttcattattcagtccctttggtctattcagtgtttcagtgggttaaagaaggcctgtagaggacaaactgctttactcggtctacccattccaatgttagtctcatccagaaaaactctctctctgtctctctctctctcacacacacacacacacacacactcagaatgacgtttaaccaaatatatggacaccccatggcccagtcaggttgacacataaaattaaccagcacacatctgtctgactgttgctgaattaaatgaagataacataggaattatgcctacattctttgagtcctggatagtagcaccaagctctgcaattcctccaggtgtgtggctttgttcttagtttattctacagggaggggcagttttaggagtgtcattttgcactctttcattgccctcatgcaatgaatcagtaaaccaatgtagtgttttgccagttgataaatatatctgcttctactatacaatatggtactggggaaataacatcaggatggatctctggtgccgttggacccactctgagatggactcaggccaagactctgtcacctgtctccacaagcctcccatttgaatggtgtaccacagcaatatttcagagagcaacttaagtctagacccacagctaacctggggaaagcctgagcctttctttcttcagtgcacagtcaccctggaaacagccataggatgctatgtgggaggcttgaagggcgagtcacagcatgcacctgaggcagcattgttgggtccctctcaaagacacccagccactttctctattgagaggctctaggtcagtggaacttggtgagaggctaaaatccttactatggtgactgcattaggtcccagcccacgagagtagaattttgtctcttctatatgccaagtagcaccttagtaggtggtccatctatttttgtttctatttctgagattatttagtcaccaccacagatccctgtggaataagattttgattaccactcatccctgtggtttgtttcatttaccttatttctgatagttaaatgccgccaaccagttggtctcccttactcttgggttcctttatctccattgataacaaagacactgattccatttcagccacccccatcccattttccaggctgcagaagaaagccaccacacccagggcagccaccacaagctttccaagaatactcctcctcccccttgtgggagttgtggttagagaatggctgttgctcatcctaggtccacttcaccactcccatttctgagacttcagatttcttcctctccagcagggatcagctcaggaccagatcataaatattttaggctttgtgagccaagaggcaaaattcaacaggtattcttgccaaaggctgatagttttgtttgtttgtttaacatttaaaaattgtaaaaaccattcttacctttcaggccatacagaaacagacagcaggccagatgtggcccacagtctgtagtttgccaacccccttctccacaggatgccacagaagttcagttgaaccacataaacacagactacccttgagtccaggctttaattgtccaattaggtagattactgatgccactccctggtactcaacctgaaacactgaatcctaaatccggggtgagtatatcccatgagtgaatttaatgagatcaagccttatgttttgtcctcattgatccaatgcctttcgaaactcataccttctctcctggctcctgccaatatagactggtgtgaggttctataaatcttatgaaagatttcttatgtaagggatgtaggctgtctcatatttctccctctgagctgtgcttggacctgagtcttagatcaagaggcagtgagaggtgataggaatgagtcctgagggaatgaccagcaggttattatgcatggaaaagctgttcttcttagacagggaggacaaatctgtccccatgggcaagaagattttgtgggttcgaagttttcatatttgtccgtgtctgcccaaatgatcgcaatccagttatcagggtcacattcccttgatatgagacccctcgtatgagctgatcatgtacttggtgctgcagctctgcaacttttgttaggctctgagctttgtcctcagccatatctgccgtgggactctggaaaatgaggggttgctgcagttataccatctgaatagctacagggactttctgattttttctatgcgtgctctcaattgtacattcagagatttcagtttctcattttccttttgtacaccttctaaggctgtgagaagaagccaagagactcaacagtctttatagtcactgctgtaaccatagcaattaagtgcctctgccactgacctcccagcatctccccttccacctgcatttcatctcctaccactgctagagacaacttgaataactgatgtcaccacttgtcctggattatttgttttctgttttttcctggcaaagtggttctacctgtgtttctcaacaacatgatcaatctaatcctggaatcccacttcaggatctcaatagaaaacagaatgctcaaattgggatagttgaggaaaaattcatgaagggttatagaggcctaacccagtgatgatgaggagcagttactgggacttggagacaggcataactgtggaaagggttgctggaaagaagctgggatcctaagttaagcaacacagtcatcacttttgacattttcctctaatattttgtgcagttatgcagcaaattgtatttcaaaggtaaaccttatttaaaaccccatagcatcatatgactcctatttttaaaagtctgcaaaataattacatccctttctttagttatccttatcatattctacagctgatggaattcagttaagcagcattggttgtctattcaaaactaaattaatatagtgaggatttattttaagttttcattatttttttttacatcatagcccttgaaacatgacagtttgtcattccatgtatttgcaggatttttttttaagaaaaccatcctgattctctattttcttactttcaaataccatcacagtataatttattttaatcccttatcctgtgggtcacttttatctgatgattgctttcatttaaattttaattggggtttgaaaactctttttatggactggaggacaataagtaaacttttgtagtatggcagggtgatctatagtccaggaaatcaatatctaggcttctatatgcaggagctgttcaaggcaggaactattttcttatttatttttgaagtcacattagagttccaaatgtataattatacaggattccataagttaatagtataggcttattggttttaaagaagtcttcttcttcacagtgatattttttcaggtattattgagatgtgtccttatttatctggagaatagatatacttattctctgccttcatttcgttattgctacctagtggtaggagatgacaaaaaacctcatctaataggtgtcacttatacctcttaacatcactatttccaaatattaattgttccttggaaatccttttactagggctgttcttgatggtctgtctgcattcatcactttgtgattactgagttttcatatcaccttaaatctttgatgagctgttcctcaaagaaagaaggtcatttatcatgtctgttttactgaaagaaggacaagatgagacaaagaggtattacataattcagtgtgcctatgaagctttctaggccgtattccaaaatagatagcagtttcttcaatcaaactctgtataagataaatgagatattgtttggtaagaaccccccaccccactttgtgccaaacttgttggcaccctgcagtttacagcatgaaagtcagcttctctgcacagtgatttttaagactgctaaaggcaatcagctgttcttagagctgtgccccaatgcactttatatgcccttctgttatagcactgagcacctggtggtttgtaaccttttacaagtctttttccttctgtagactgaatgccctgacagcaaggactgttaattattcaccattctgcatacactctgattgggtggcttacaaacaacagaaatttatctcttgcagttttggaggctgggaggtccaatatccaagcactgacagatttggtgtctggtgagggccagcttcctggttcatacatagccatcttctcactgcattctcacatggtgcaaaggatgagggagctctctggagtctcttttataagagcactaattccattcttggtttggggtgggggctctgcactcatgacctaatcacctcccaaaggtcctacctcctaatgtcatcacattgaggattaaactttcaacatatgaattttggagggtcataaacatttagtttataaaaaagggctgcttggtgtatcatggccactgaataaattttgagtagcaatcttacctggtatgccattgcatttatatatgattgccactaataactcaaattactgaatttatgttgtatcgatgatgctgttttcctagtcttagtattagtagccaaatggccttggattaactttctcaatattattcattcattcattcattcaacatttattgaataccttactaaatggcaagctctgaattaagctttgagaatccaagaagactaagactttgttcccacctttcccttcagcttccctttcctaagatagacataataaaacaattgcatcacaacatgatggatcctgtcatagtcagagtggaaatagaaggagattgagtgggacaggggagttgaaagatgcccagcagcccccagggagagtgaaaacgtgatctcaagatcagctttattttctgaccaattctcatataccaagtgtggtcaggaacatatatttatgtgtctaggtagccagttgcatttcattttatgaagctaagtgattatgatgattagctatgggattaacatacgttttcagctaagcaagtcattaaaaacaaatgcaagtacaattatctcctcctttagcttcagtaaattaacatgttatagtaagaaccttgttcatttgtatgatgctaggaaaaagccacacaaatgacctgctttttactttatatttcggcagctataattttgtaaaaatgggacatgttggccatctgaaaagcacttagttgtataacttctacaagtcattgaaagtaattatcacatcataatccaatgttttcctgaggttcccatgggaagtaaagtatattctatcctgatgtggtttggatgtatgtccctgtccaaatctcatgtagaattgtaatcccagtgttggaggaggggcctagtgggaggtgatttgatcatgggggcggatttcctccttgctgttcttgtgatagtgagttctcacaagatctggttgtttaaaagtgtgcagcacctccctcttgtctttcttcctccttctttggccacataagaccatgcctgcttcccttttgccttctgccatggttttaagtttcttgaggcctccccagccatgcttcctgtacaacctgtggaattgtgagtcaattaaaccttttttctttataaagtacctagtctcagttagttctttatagcaatgtgagaatagactaatacagcaaattggtactgggagtgggcatttctgcaaagatacctgaaaatgtggaagtgcctttggaactgggtaatgggcagaagttgaaagagtatggagggctcagaggaagacaactgggggaaagtttggaatttcctagaaacttgttaagttgttgtaaccaaaatgctgatagcaatatggtcaatgaggtccaggctggggaggtctcagatggaaatgagtaacttattgggaactggagcaaaggtcacttttgttatacactaggaaagaggttggaggtatcatgcccctgccctagagatctgtggaactttgaatttaagagtggtgatttagggtttctggttaaagaaatgtctaagcagcaaaacattgaagatgtggtgtggctgcttctagcagcccatatttatatttgtgagccaagaaatgacctggtactggaacttatatttaaaagggaagtagagtgtaaaaattttgaaaatatgccagcccagctatgtggtagagaagaaaaatccattttctggggaagaattcaagctggctgcagaaatttgcataagtgaaaaggagctgaatgttaatagccaagacaatggggaaaatgcctcaaaggcatttcagagcagctcctcccatcatagggtcagaggcctaggagggaagagtggttttgcggactgggcccagggccccgctgacctgcgctacctcaggacactgctccctgtgtcctagctgctccagctccagctgtggctaaaagggccctagatacatcttaggccactgctacggaaggtgccagccataagcgttggtagcttccacatggtgttaagccttcttgtgcacagagggcaagagttgaggcttgggaacctctgcctagatttcagaggatgtatggaaatggctggatgtccagccagcagtctgctgcaggggtggagtcctcatggagaacctctactagggcagtgtggagggaaaatgtgaggttggagtcccccacacagagtccttcactggggcactgccttgtggagctgtgagaagagggccactgtcctctggaacccagaatggtagatccactggcaacttgtaccatgtgcctggaaaagctgcaggcaatctataccaatccttggtagcagccatgggagctgatccctgtatagccacaggggcagagctgcctaaggccttgggagcctagcccttgcatcaggtggccaggatatgagacatgaagtcaaaggagattattttggagttttaagtttttttattttttatttttatttttttgagacagagtctcactctgctgcccaggctggaatgcagtggcatgatcttggctcactgcaacctctacctcctgggttcaagtgatgctcctgcctcaacctcccaagtagatggaattacaggtatgcaccaacctgcctggctaattttcatatttttagtagagacagggttttgccatgttggtcaggctggtctcaaactcctggcctcaagtcatctgcccgcctcagcctcccaaagttctgggattccatgcgtgagccaccacacccagccaggagttttaagctgccctgcttggttttgaacttgtatgggtcctgtagccccttagttttggctgatttctccttttgattgggtgtatttccccaatgcctgtaccctcattgtatcttgaaagtaactaacttgtttttgattttacaggctcctaggcagaagggacttgccttgtctcagatgagactttggaccatggagttttgaattaatgatgaaatgagtcaaggctttgaggaactgttgagaagggatgattgtattttgcaatgtgagaaggacatgagatttgggaggggccagaggtggaatatgtggtttgggttttgtgcctgcccacctcatgtcgaattgtaatcctcagtgttggaggagggacctggtgggaggtgactggatcatggcggtggattttccccttactgttcttgtgatagtgagtgagttctcgtgagatctggttgtttaaaagtgaaacccggggtacaccatccagacaggaagccatgaagagaaagggtaggtgatttcacgcaggaatgttctatgagccagggcagcatacatcacttctgaccagaactcagacacgtactacaagggagcctagaaatgtcgtctagctgtgtgtccagaggaaaagaaggaactgggtttggtgaataactaaccacaatgatgataaacttttaaaaattaatcacattatctataactgcccctaaactgcttcaaaattttcacaacagcctcattcacccaatttcctattgacaaatatttattgttctcctgtaatgtgtcagagacattgagccagagtggagacagtagacgtggtaaaaagttgatcagattactgatatattttaaaggtaaagtcaataggatttgctgatggactgaatctgggatataagagcaacagaggattcaagaatgactttcagattttgggcatgagcaactgggaggataaaggatgccatttattgaaatcagagcactgaggtagagaggtcattttgtgggttggggggtggggataacttaacagtttgctctggccatgtcaagtttgaaatacctcttagacatcctagtggagatgccaaagagtcagttgaataaacaaatcttaatttttaaacaaagtacaaccagagccagcttcatgagtgggcaacccatgcagtcccacagggctctcctacatggaaaggtcccatacttgatgtaatggtttactgttgcagtcttgaaatttttaataaattacttagtaagtgctccgtatttttatttttcgccaggccctacaaattatgtagcttgtcctgggaggaattctttttgaggcagtggaaacttgtaagtgtggggttctgaaggcaaggaaaagaaaaccttttgagaagaaagagattgtgagagatcaaggaatataaagaccaaaaaaaaaaaaaaaaaacagtgggaattatcaagatggaattgctagtgatgtcgacaagagccatgtccaagggtggagtgggggaggataaaaatcctgttggaatgagctgaaaagaggagagctgcctatggccacagtttccccctgcagggagcagggaaatgggatgatagctggaaggttgtgctgagtcaaagcatgtttttgaaaaatgagagaaattaaaaatgtttgtctgctgatgtgagggattcaggagagagggagaaactgatgatgcagtggagaaagggaagaattacagggaaagtacgtaagtcaaggacaatggaggacatgtggaggagctggctgtaagaatagtcatgtgattccatttcaaaagcagagaaggcagatttctcaagaccatgtattgaagagactatcctttctccacatatgttcttggaacctttgttggaaatcagttgaccataaatgcatgggtttatcactggattttctattcccttccattggttgatgtgcctgtttttatgccagtaccatactattttgattactttagctatgtaatatgttttgaaatcaaataatgtgatgcttctagctttgttctttttgcgcaagattgccttggttgttcgggatctaaaaaagtaagaaattttgtcatttgtgacaaaatggatgaacctggaggatattatgctaaatgaaataagccaggtactgaaagacaaatactgcatgatctcacttatatgtggaatattaaaaaataaaactcatagaagcagagagtagaatgatgattgccaggggctgagggtaggggacggataaaggagagctgttgttcaacgggcacaaagttttggtgagacaggaaggctaagttctggagatctattgtacagcatgatgactatagttaataataatatatggtatatttgaaaattgccaagagattagattttaaatgttataatcacaaaaaaagataagtgtatgaggtgctggatatactaattagcttgatttaatcattctataatatatgatattatatatatatatcaaatcatcacattttatagcataaatatatataatttttattttccaaatataccttaatttttaagaaacagagaaagcagagtctatgggttccagaaggttggcaatttggggttggttctagaccacgtgcttttttttttttcttaatggaatatgaggtgaggtcagcagctgaggtggtgggaggagtcatgagtttggtaagagtaacttcagagaactgaaaggttaatttactagaagatggtaagattgctgggcaatcctgtgctgagttgccatttgagattttgtgaatatccatttgctgtcaacatcgtcgagtgatgtttttttctccagcatctttcagctgctcaggtgcaagtacagagtagagggatagttgagtttagacatgattggttctgttatggctcttattttacagatgaagggactagggttcagagaagaaagtaacttgctagtaatggacagagtttgcacataaatcttctctgaccctcgactccaggctcttaagcagtatgtcatatttcagagctgttcttaatatcatggaataaaaagtgtagattctgcaaacttctatcccttcccctagtggcgagcaggtgaataagcaatactgtaatttgtatctcaactttttttttcctactagcattatctaaaaagggtatctcagctagttaccaaatcccagccttgggaatcacaaagcaatattgtgcattgaagatatgctcatgggatagaaaaagtatcactgagtttgatcaccatctctcctgcctgctggccatgtgacttgcagcatggttgtaagaatctgttcagcattaactgagcacctatggtatgccaagcagtaaggaagatactgagaagatattgatgaaactgaattttgtcctcctaagaattatagtccagggaattcagtgagatagtatatgcacaatgttgtgtccaacacagggtgggcacttaataggtgttaattctctttgccttctctatccatttgtcctcaagtacctgatgacacctcttggtgaaaatatcaacactcactgagatactaaatgagggccccactcatgtgtaaatatccaatgatgttaatatttaaaaattagttcccatccactgaatcagaatctcagcaactttgagtgaaggcaggacccttaactgagttgagtcttcctctacccataaaaatatactgtatataactttttcctgaagctattggaatgaatacaagttagcatgattgtctactggcaatactagaataatctccctaaggcgtgctgttttctggctggaagttattttattctgttgaaatgtatttttttaaatgaaaggggcatttccttttcctatattatttgctttcaaaaagcgaagagaattctttaaacatggcaaattaaccactggtgaatcttaaattttaccttctcaatgatgcatgttctgattcaccagtcaatatttatttctaagccttcagatctcaaaaaggtctatatggtacctgagttagtgcatctcaagtaaccaacccctgggaaggtgttttatttctgtaacacaaatgaggcaggattttatgcccctggaggggagatgtttgtcttttatctctatattggggtacctaatacaggaaagagtgttaaatgaataaaggaatggacccacagtggggaaaaggagcttgcttgatatcagtgtgtttgaatttattaccatgaatctcactttctaaaattgctagcactattaaagtttctgacagtgaagcaagccattggaacatgtttgtggtgtgaatattaggtgtattattatgcactcaatttagcttttttattttatataatttctctccaagtggaaatcatgttctaggtaaaggaacaagaaattaagcagtgtggaggttagattcaacttccactaatggagaagatgactttggataactattggctccagtttcatttggggattagggattggattagaatttgtaaatctaattgttgtttctctgtaaaattgggagaccctcagggttgagagcagatcttcctcttttgcatctatttcagcacctagcccagtgcattgtaaatgcttaataaatactagatgaattaaaagtgaagtattctatttattctttagagaaagatacacagacgtttttgccaaccagcagaaatgaaggcagcaaccacttctagtttatcttgtattcctagcatcaggcaaaatgatagggacatggtaggcatccaacaactgttaattggctcctccaatcacccttttttgtcatccttccacaggaatttattgaatgccttctaagtgtcagaaacttggtttatattaatgaaagaacacattccagaggagtagttttatttgtataggcaattacaaagtaatgggatacaggttataatagaagtatgtaaaatttcactgaagttcacagggaggagaacctcatctgctcgggagttggggaagacactccaggatgatgagggttgagctattgaaagaggaatgggatttgttaaagtggaccagggtttgagggtattagaacacactccagttagagaagatggcacacacatgttcttggagctgtgatatagcacagtacacattgtaggggtagtttagcatggctataggaagaagtgggtaacataggggaaggaggtatggacagaattgagaaacagggatgattctgggaggttattagaggtcagagtttgaagaacatctcaaaacaggaaatactgactggtatctgagcttctctagaaggctgaagttaaattctataggtcatgtctcagtaatagcagtggtagtaatagcaatggctaatatttattgagcatttgttagagacaggtgcctttctaagcatttcatcttcttaataacttataaggtagatattgtctttatcctcatttgacagatgaggagattgaagcgtagaggtgcctcattcaaggtcaccgagcaagtccagactttaactcagagggtctggctgcagaatctgttcttaatcactatattatattacaacgcagaaaatatagtgttgtaatgctccaaagttaatttatacaataatacaatcacaaggattagaacttcattctcactttaaatccaaacagcagcatgaatcactgcttctgcctttcatatgttttttaatggcttgatcattgtcttcctgatgatttgattatgtgaggagggcaagttaaggtcactgccactaggtgctcactgttgttgcccatatgcaagacctcagtaaaagatgtctatatggcgaatgtaacttttagccaggtctttgcgctatgagagtatttagtctgtctgatctttgaagatatctatgcatggaccattggctctaaaatccccctctttgtatccccacaacaatgcatattttcatctagtgtactcttaaaaggggccagattttgtgaacatagatgcctgtccttcagagtttatttatagaatatgctccaagctcaattcccacctatgagtgagaacatgcggtgtttggttttttgtccttgcgatagtttgctgagtatgatggtttccagtttcatccatgtccctacatggacacaggaaggggaacatcacacaccagggactgttttggggtggggggaggcgggagggatagcattaggagatatacctaatgctaaatgacgagttaatgggtacagcacaccaacatggcacatgtatacatatgtaacaaacctgcacgttgtgcacatgtaccctaaaacttaaagtataataataataaaataaaataaaaaaagaagaaaggcaggaagaaatggaagaagaaaaaaacccattcctttatattataatacaaatgcatattcatattctgaattttaacattaacattataataaaactgtttttatctttaggaaaaaaaaaaaaaagaatatgctccaagcatttgcttctcaaattctccactattggataacaaataagccataatgtaacaggattttcatttaggtttttccattaagccttagccatggattgtgatggtatctggttgaggccagatctgagtttagtttttactctgctgccgaaattgttgtgtgatcttgagccagtcattgcactgttctcaacctcagtttcctcatctggaaaatgagggtgttggagcagacgatcagtgagctttctcccaactcttaacattctctacttgtagagtttttataatcaaacacaattatgtaaaagagagaaaagcagttgtcatggaaactgttatttaatacataacactgtttcttaatcagcctgttttccttgaagaaatttgcttctcttgtgatacaggcccaaaggtctcctaattctgcctttagaaaggctcagatttcagttccatcacttaagaattcaatgcatggaaccagttacttaaccaccctgtgcctaaattgctttattctaaaagtggtattgacaagaatactgacctcatagtgtggagcatcaggcctgatgcacaacaacaaaaatgttaatgataataataccaatacagataatattaaaaatatctaatgtttattgagttacttattgctactctgtgctaggcattagtaaatgtattaactcatggaatcttcaaaccaaccctgtggggtaaatgttactattaatctcataattagatcaagttacgtacttgtcccaagtcacacaacttgaacggggtggaaccagaatacttgtcgagctacataggccaatttcagagcctacactctgaaccattaacgtttctcaataataacactgttaatacataattgtgaataaccagcatcttttatggcctttgctatatgcccaaatctgttctatcctatgaggtagatgatatcatcatctctatttcgtagataagaaaactgagacctctagaggttaattaaaaacacatagttggtagtagtggaggcaggacttgaactcttgcagtctggctcctgagttcatatttttaacgatgatatctcagtatgagctattattaccctacatccagttcagttttgtgtccatgaatgatgtaagatgattatagctccacccactagatgatgtgagcctttggcagtcttctggaactctgttttttttgtttgttttttgtttttttgtttgtttgtttttgagacagagtctctctctgttccccaggctggagtgcagtggcatgatcttggctctctgcaacctctgcctcccgggttcaagcagttctcccttcctcagcctcctgagtagctaggattataggcacccgccactgtgcctggctaagttttgtattttttagtagagacgaggtttctccatgttggccaggctggtcttgaactcctgacctcaggtgatctgtccgtcttggcctcccaaattgctgggattacaggtgtgagccaccgcacccagctggagctctgtttatgctctttgttgattccctattgtgctcctaactaccacaatcgtttatggaaaagccaagctgcgacacaagtatcttgccatgtcttataaaataaaacaagaggagataagtacaaaagtctatgaatttcaggccagtaagctctaaaatttcaaacagcaaatacagtccgtaaaacatttgagagagagtttacttcagtagctccaattatctgagcaatgttttccaaataccttagcacctattgatctaagagtgaagtaggagaacttctttaaagatcagatagtaaatattttcagccttaagggccataaggtctctgtcatgactgtttaactctgttaaagtgcaaaagcagccatagatgatagtaaacaaatgtatctgtgtttcaataaaactttatttacaaaaacagatggtaggccagatggcccagaagccattgcttactgacctctaatctaagagagagatagcctactgataaagtatttaatgccaatgggttttgggataagtggcctcttgtacgtgcataaaagcaatagtaatgacatgtttattttttccttccctcctcatttttaatgagtcctgatcttgctgttccacatttactaaattaggtactggcaaaatgtgatagtgtaggcttacactattcacattactatctgctacttgactcaatatattgaaatttgactttaaggacagactttcagcagtaggaagcaatgttgacaaaacaacttttaaaaaagatcatatagaatgaaaacgtggatatgtgccttgttttgagctatctcaaatccttttgctaaataagtagggggtaaattattttaaatggggaaaatggaacacaatttttaaatattttaaggcatttcaaatgggccttaaaatacaacggttgtcctctggagggattttcattaattattaaccatatcagaaatgtaattaagtcagtgctgaaattagtcaagatcagctttataactcaaatcacataaataacatatatgggttctatgaattaatcattgtagatttgattaaaaagttccatttcaaagttcatgcaatttaatgtcatgttgtttctgtttttcaaacatttgttaaaccaactgtctatagaggcacattatatggctaaagatctaattgcaccattgttagcatagaactgtagtcagtaaataattagtggcttgcattgtgaagttttgataaatttttaggcttctctgaattaacatttgtcttatggtcagttaaggaaattaaatatcgattaaggaaattcagacagggcagcttcacagtctccctcctccacagggccccccatgaccactgccttggaggctgtgctgactttggggaaggcctatcagtggctgtgacctgggttaagctgatggaccaggggcatttttgagaatattgattagattaaggagaggtggggacctgtattagttttttattgcttctgtaacaaattaccacacactcagtgccttaaaatgtcaccaatttatcttacatttctgtgagttagatgtctggtgcaggtctcactgggccaaaatcaaagtattagctgggctgtgttccttctgtctttctggagactctaggggagaatctgttttatggcctttgttttttgggatggaatctcgctctatcacccaggctggagtgcagtggtgcgatctcagctcactgtaatctctgcctcccgcattcaagcgattctcccgcctcagccccccgagtagctgggattacaggcatgcgcaaccatgcccagctatttttagtatttgtagtagaggtggggtttcaccatgttgtccaggctggtcttgaactcctgacctcaggtgatccgcccgccttggcctcccagaatactgggattacaggcatgagccaccatacccagcctcggtgccttttccagctcctagggctgccacatccctagactcatggtccctctttcatgtttgaagccagcaacataatgtctctctgatccaagccaccaaaggttctctgtttttgaggtcttatgtgattagattgccccccttccttttggatatcccaggataacccctccatttcaaagtccttaaatctgcaaagtccctgttagtcccatgtaaggtgacatattcacaggttccagagatgaagagttgggcattttagcagagccatcattctgtctaccacacaaccgacattcagtgtattggattcactgtcggcgcttcctctgtttaccagcccatcttcttatgtttcagcttcttgtgtcctgacacccatttttgtctcagtccactttaaaccttgttcttctcagttctcaatttctctgaccttcctttagcatgcagtccagtggaccttcttctgctgagagcagtattgctggccaggctgtctgggttcaaagctaggctgtgcctcataaacatgacctttggtaagttatgcaatatctctgtaactcagttttctcatctgtaaaaggaggataaagaatgtgcctggactacatatgattgatgtggtgattacatgcattaatatattcatcactcttagaacaatgcctgagacatagtaaaccatcaatacatgctaaccattgttgctgtgaatttggttactctccttttgggtgctggtagaaattccctcaagattttatctgtgatttcttgtattttcttcggaagttgcagcttctctcaaagctttagcattcatccctaggcaaagaactccagctggacgcatttccaagctctatacctttatttctggcagtactaggtgaacatttttgtttggatgtcccaggggagccacaaagctgaacttaacatcttgcctaccgaaatattccatccgtgttcttatttctattactgtctttagatccgaagtcaatttttattctttccctctcatttaccactaaacatcaaaaaagttatcaaatactaaagactctactttcaaactatcttttaatctatttgtgtccccacttccactgctctgatccaggcttctatgaccgttaccctgatttgttgccccagttgaagtagaacagtattcttaaacctttgctctgattatgcaacccccacccccagacccgcccctcccttccaccttgctccagcatcttaagtgattccccgctgtcttagcatggagactacatccagtgtagcatataagtgagttttcttcaggaattccctaaaaatttaaaaatttcatacaaaagtatgttgtgaagatcgttgctttcagtctcaacaaccagtcactgctcacgcatcttaaacatgcttgaaacaggacatcttttcctttcatgaatgagccttgttctttcatacctgaaccttcaccatggggggcgtgctcttctcctccatctctgcctatgagaaatctacccagcaatgaggcttagtgacaatacccaccactctctttgtgaagccttccctggtagcctttccctgaaccgtgtaagtcagaggtcagcaaactacagcccacaggccaaatccagcctattgcttagttttataagttttattagaactcagtcacactcattcgtttatgtattgtctgtggctgcttttgggtctacagtagcagagttgagtagctgcaacagagaccatatggcccacaaagcccaaaataaattatgctctggctctttacagaaaaaaacatgctgacccctttctcccctcagagattacatagtctaccttgtgcatctttgacatctccttctgttagagtcacttctgcacaacttttttcctggcaagaacgatctcctcttgtagacatagattctgcctttttcatccttgtttctatccttgggcctagcaggggtagggctcagtagttgttggggacaatagattgcctgtaaaaaaattttttaaactacattttgctcacttggctaagtgacaaaaatcttatataaagcagtgttccctttagggggttagtgcttatcatttgatgtttctggtagtaaaccatttcatgtttcacttcgagaagcgcttttttgactgccaagataagctgcaaaattgagtccaaggatcttaagaaataatattcctaagccatttaagcagctcacttggtgatctcatttaataagtggtccactgaaatttaggattgcagagtatactttttcattatgcatgggtttcaccatgtgaggtagatatctagttcctactcagctatttttgttgactgcctagggtatgataatatttgaccatgctactctcttatgaaaaatgccaaatagttaaatttgttttaggaaaaccagagattcctctcttgctcctaaaggagaaaccaaatgaccctgggtttctttcttttttttttttctttctaaaacccaagaagtattgatgtcatgtcctcctgcgaagtgcattagctgtccttgcctttgctgctttagtactggggaatgcctctgtcagacagtgagctcatgagtgcaaggactctgtcttttaatttctgaatcctcagtgtttggcacagagaaagctcttgacaaatatttattaaatgaataagtcaataaataattgaagatctcagaaagaaccttttccccaaggtattacttttaaactataaacttacaattgcctacttctatctagttcacatccttaaatatcacttgggagaatttcctgttgtgatgatatagagtttatgtctagctgtgggaggtcaagggtgggctacgttgtgcctaagtccacagaacacaaggaaaacccttaaacttttgtgaggtgaccggaaataaatatctgcttcctaagtatttccctgagtgagaatgtaaaggtttaagataaattaagtatcacagggtgagacaaagtgagaaattcaggatttagattggcattcagagcagggagggaaaaaaagatgacccaaattgacacaaaatgagaaaatcttgggaaataaaagtaaacggtagcaaatgtgatgtatttgagaaccttacaaggaggttttcagtatgttccagttgatttataggatgtagaaacattaagtgttaaaatggaaaggggtggattttcaagactctcacagtgagggttcagttaggaatcagaattccaacaaacaaacagattttaataaagatgttacaaaggagaggctgggttatggaaattgacaagagatggtgaagcacccagggtctagcaagggtgaggagcctttataaaacatgcctcaagaggcaagggcaatattggagccgcgcaagagcaggagccctgggaaaggggctacccaataggagtagaccttgcagagggctttccaaatggctagggccctcacaagtattcacacaggaagggagcagggaagaagtaactcagcctgtttttcctcccaacctttagctccttcttgtgcctccattggctgaggccaactggaggcctgtgagggagcccaggtgatgaaggagtcaccttcccaggacacagaacaggtggagaatggatttgaagtaggtggaggcccacaaaacgtcaccagcacagggaccatctccagcctttcagtttacaaatgaggaaaacgaggcccagactgggggaaatgaacaccttggaaattcatccctttcagccttaacacttaatgttcttttttttctttttataggtagtctcttatttttattattattattattatacttcaagttttagggtacatgtgcacaatgtgcaggtttgttacatatgtatgcatgtgccatgctgctgtgctgcacccattaactcgtcatttagcattaggtatatctcctaatgctatccctcccccctccccccaccccacaacagtccccagagtgtgatgttccccttcctgtgtccatgtgttctcattgttcaattctcatctatgagtgagaacatgtggtgtttggttttttgtccttgcgatagtttactgagaatgatgatttccgatttcatccatgtccctacaaaggacatgatctcatcattttttatggctgcatagtattccatggtgtatatgtgccacattttcttaatccagtatatcattgtcggacatttaggttggttccaagtctttgctattgtgaatagtgccgcagtaaacatatgtgtgcatgtgtctttatagcagcatgatttatagtcctttgggtatatacccagtaatgggatggctgggtcaagtggtatttctagttctagatccctgaggaatcgccacactgacttccacaatggttgaactagtttactactcatctgacaaagggctaatatccagaatctacaatgaactcaaacaaatttacaagaaaaaaacaaccccctcgaatagtggacaaaggatatgagcagacacttctcaaaagaagacatttatgcagccaacagacacatgaaaaaatgctcatcatcactggccatcagagaaatgcaaatcaaaaccacaatgagataccatctcacaccagttagaatggcaatcattaaaaagtcaggaaacaacaggtgctggagaggatgtggagaaataggaacacttttacactgttggtgggatgtaaactagttcaacacttaatgttctatatcctcataaatcagtgttcaaatgagaaagacaataaggactgactgaataaataaatggaagaataaattaatttgaagaataaatgaatttttcatatcataaatccatttttcaccaacatgtttgctaggtggcattctaacctatcagtggaccataatatatttaactattgccctattaacagttatttttctagtttctaatattactataatcataattattatagttatgtcagtattaattataattatgatactaagtactatttattgagtatgtcaggcaccatgctgtgtgaaaacatatactttttttagcccttattatgaatatttgaagtatgaatttaaactcccattttgtaaaagaggaaattgaagctcacgtagtaactcaatcataactcatcagaagttccacagctactacaagatagacccagaatatgcacgaatatccattcaacacaaaagtccatctctctattgcttccctatttaataaaaattttgaatggaacattttcttacgtaactgttagtatgtcttatcattttcttgagataacttcctagaagtagaattcttgggtccaaagagatgatcctatttttaagtagtaagaaataacatttagttgcaatttgaaacatattaaatatctgtgagagaaaccttatatgggtatgaaatttttagttttgtcaaatgatctgattgcgaatggtgagatagccatgtctgagagcccccattttcttatgttaccagcagtgaagagcatcttttttaatagcctgtattttttagagcagttttaggttcacagcaaaattgactgcaaaatacagacattccttgtgtatctcctgcccctacatgtgcatagcctcctctattatgaccttcccacaccagagtggtacaattattacaattgatgaacctacattgacacatcatcacccagagtccatagtgtgtattagcgttcactgttggtgttgtacattctgtgggttttgacaaatttattacaatatgtatgcaccattatagcattaaacagagtagttttattgccctaaaaatcccttgtgctctgcctatttctccctcctttcttctttcctcgtggcaaccactgatctttttactgtctccatagttttgccttttctagaatgccatgtagttggaactatgtaatatgtagccttttcagactggcttctttcacttagtaatggttcttgaacatttaaggtaagtaaatggacagttaaggttcccacatgtcttttcatggcttgacagtttgttttgttttaatgcttaataatattccattgtctgaatgtatcacagtttatttgtcagtttacctactgaaggacatcttggttgtttccaagttttggcaattatgaataaaactgctgtaaacattcatgcgcaggtttctgtgggaacataagttttcatctcacttgggtaaataccaaggtgcatgattgctggattgtatggtgagagtaagttgagttttgtgagaaactgccaaactgtcttccaaagtggccataccattttgtatttccaccagcagtgaatgaaggttcctgtcgcactgtattcttgccatcatttgatgttgttggtgtttttgactttcactattctaatagatgtggagtggtatctcgttgttttaatttgcaattaattacccaatgacatctacattattttttaagatttatttttattttaatattttatttatgtacttattttcaattaacaaataaaaattgtatatgtttatcatttataacataaagttttgaaatgtgtatacattgtgggatagctaaatcaatgcaattaatacatatgttatatcacatacttgtcaatttttatggtgagaatgcttaaaattactctgttagtgatttttaagaatacaatacattattattaagtatacccactattttgtataatagatccccagaacttatttctcctgtctaaatgaaattttgtatcctttgaccaacatctccacaactgagctccaccccccagcttttggtaaccgccattctactctctggtacttatgagttcaaaattccacaaataactgagatcatgtggagtttgtcttcctgtgcctggcttattttacttaatgtcctccaggttcatccatattattgcaaatgacaggattttccttgtttttctttttaaggttgaatagaatgtctttgaatatatccaccacacattttctctgtcaatttttccattgatagatacttagattccatattatggctgtgttttggctattgtgtctaaagttgcagtgaccacaggagtactgatagctgttggacgtactactttcatctcctttggctatatactacaacatttaaagagttttaaatcactctttatgaattaaaaaaaatctcaggttgttttcactgtagatgggctagtagggttgaggaaaggagagtgggaaggctaagctattcaaggttgtcttcaatgaccactttcccttactcaccccctcttccaaggtcttagctaatctcccagggactgaacactctccagacaaaatcaacgtaacagaagtctggcatttgagaatatttgagtttagttacctgtagtcttccttaggtatccctagaaagattagttcctggataaccacctccctcccttccccagataccaaaatgttcaagtcccttacatgaaatagcaaagtatttacatattacctatgtgcatccttccatatactttaaataatctctagattacttataatacccagtacaatgtaaatgatatgtaaatagttgttatactgtattttaaaatttattttcctttattattgttttaattgtagtttttttttttctgaatattttctatccgaggttggtttattccacagacatgggaactgcagataaggagggccgtctgtactttgtttgatacctgtcctgccggctccctgccacccccggcaccctccgtttctttctagaactatttacattaatgtctactgtgagctaggcattgtgataggcatgaaataagacacagtcctggccccacattcaggggacatatatatagacaatcacagtgcagttgggtaggtcttggtgtagttatgtaccaggtgctaacagagtgcaggggagggacatgtgagctgagggttctggggatgcttggtagagttaggggttgggaataatggggtttcttcagaagggtggtgaatgagctgatcttaggagaatatattggattagggctatgaaagagagcatttcaggcaagaaggaggatttttttttttttcatgaactcactacttaggaccaaactgtgagcaccagcactgtttcattttcaccttatggagaccattattggaggtgtgttcatcaagttttttctatgaaccaacaaacccaaatctcagtggttcacacccagaaacatttgtctttttgttcagagttttttcaggcagctgttgtttgcctgatattggctggtttaagtaaggcttggtccaggttgcagatcaggtttgagtttgttcttagtgtctccttctgggacccatggctagtcgggacatgtgctttttatgataatagcagaagcaaaagagaccaagcctaaaccacacaagcacatttctgctttcatctgtttgctaacatccctttgactaaagcaagtcatgatggccaagtccaaaaccaatggagcagggaatataccttctctctctattgggaagtactaacaagtcacatggcagagagaagttatgaattacgaatcaggggcaataatctactctgccactgtggtttcctgaaatgaagtcctgatagaatttggtcgcagggggattaaaagggagattctcactcagcctcagcaacaggaaagaaagaagttacaaaaagcctgtaaagaatctaaaggaggatttgaaggagagaaagcaccaataatctaactgcagcactttatttgaatttaagtaacgctggtcaaacattcttacaggctcttaccctttctgatctataaattcttcatgtagatattgagccaaaggttagatctagaaaatattatatctagtccttagcatgttggtttcttttcaatgcgcttaaacgctcagttaacgtggctttagacataattgtaacagaattacaaaggacagcaccttggcagaaagttcttcctggttttgatgtgttgctactgccagatttttgtgacatgctgatgctaatctgtcaaatagcctgacactaagtgagaagagaaataaaaggaggcatgacagggccaaggacctggtgtggtggaggatggttgggcagtagcaaatcctctcatcagccctactgagactaagcaacaacctatcttcaggtctctgggttcggtggttggggggagcgggggcggtcctacgtgggttagaactcatactactctcagaaatgcacctactttcagttacccaccaattctgatgctcaaagcccctccaaacctgttttctgtgggtccacctgagctcgcttaactaagatagcacaaattctgccccctcttatgggaacatacctaagctaatgacacatgaggtgctacctcttccgcatgtatacctacgtgtttgagctttttcctcccttggatgtgggagggtatcagtctattttataaacattttgtcaagtgtcctttgagtcaaataagagaggatattagaaaagctccagaaaactttgggaggccgaggcgggcggatcacgaggtcaggagattgagaccatcccggctaaaacggtgaaaccccgtctctactaaaaatacaaaaaattagccgggcgtggtggcgggcgcctgtagtcccagctacttgggaggctgaggcaggagaatggcgtgaacccgggaggcggagcttgcagtgagccgagatcccgccactgcactccagcctgggcgacagagcgagactccatctcaaaaaaaaaaaaaaaagaaaaagaaaagctccagaaagtttggaaaagtaaattcagacctgagagtaaccaagagagttcccaccttccttctggtcaatgttccaggaaggcgaagcactggatttaccctccactttgcagttaaagaggaaactcgaaataaatattcccttctacaggtttttttttttaattaagaatagatgagtcttatgttttgtgtgtggtggtgacattcaaaacatagtttttcagtgttttgaaaagtaatttacctaagaaatgacaagaagagtaatgcaacacatagacagcattgctgtgagttgtaaaacattgacagaacgacaaatgttcctgtggcatagagtccttctgaatcacagaaatgacatttggatgaaagcaaatcatttttacataggcacactgctaactgtgcagtgaagccagaaatagcacaccttggaagtgggccagagagaaagaacacctaagaattttatgttattcagaaaaattttcactttttcggtaggatttttgaggagtaaagaaaatatttgagagccttaaagaaaatctgagctttgttttttttttttttttgagacagagttttgctctttgttgcccaggctggagtgcagtggtgctatctcagctcactgaaacctccgcctcttgggttcaagcgattctcctgtctcagtctcccgagtagttgggatgacaggcacccaccaccatgcccagctaatttttgtatttttagcagagatggggtttcaccatgttggccaggctggcctcaaactcctgacctcagatgatccacccgccttggcctcccaaagtgctgggattataggtgtgagccactgtgcctggcctttgatttttatttattaaaatattagtcatttattgtgttcccgtatactcatcaagtgtctcttgagaaaactcagaccaagcaggaaacataggcttgatgtttaggagacagagtaaagtgggaggcatgacatggggagctgatcacacagagattacagatggagataaggagtgcataacatccccaaggatggacaggatggagagaagaaaaggccaaaatcaaaactttggaaaatgcccactgtggtgggctgataatggctcccaaatatctgtccacattctaattcccagaacctgcaagtgttaccttgtttgaaaagagtctttgcatatgtggtttacttaggaatcttgagatagggagattatcctccattatccaggtgatccctaaatgtcacaaccagcgtccttataagagagaggcagagggagattagacacaaacactgagaaggtgatataatcacagagatagagattggagtgatgttgtcacaaggcgaggaacaccaaggaatgctggcgcccgtgagaagctgaaggaggcaaggaatggattctccccagagcttctgtctacctttctggagtcttgattggcctacaggtgttcagtttgcacttctgtggaaacagggaacatacagcagtgacacagagccctgccgacaccatggtgagagacacctggccttcagaactgtgagatgataaaatcttgtttgaactcatcctggttgtggtaatttgttaaattgggctttgggaactaatatacccacctttgggaacaggaacagaaagagtttaaaaaagtaaggggaggtagcaagaagcttaagtgtcatgaaaacgaaagccaaagcaagagtttaaaaacagatgagcagaggcaatggtataaacgctagagcctaaagcctaatgggtaaaaatgaagattgaggagaatcattgatatgatagaagctaatgatggcagctaacttgtactgagcacccattatgctggacattgccataagcactctgcagatataaactcaattctcacaaaaccctatcaggtatgaattattgttaccccattttacaggtgaaaaaactgaggcaaaaatttaaataaatgcattaagtaacataggtggtaaatggtgtggccaagatttgagcccagaattctggctacagcatccacattttagccactactttgtactaacctcaccttatcccccaaggtgtgtgtttcccaaggttctgactttgggtcttttatcaagtaaggtagatgatgtgtctcaagaggaaaaggtatttttgtaatgattatttgaggttgaaaggaggaagattaggaactttatatcacctggaccccatcttctcagctgagttggagaggaggctatctgatgaggctgagggaggcagctaagtttctgacctcagggagcctaggaaagacagtgaggatacaataaaacaggaagcactaaatgaaaaacttgctgcacagtgaagcatgctcagtgttatttccttgactggcttttggcactgtgccatctgtgcccaagatgtctgcaccatgtagcgtgccaagtgcagaaggaaaagggactgaaggggcatcatcgccccacacctgccctatggaaagtactttgttcagagacgaagaaggaatccgaaaactgcacaatatgacctttgtcattagaaactcttgaacgtttgagaaatggaccatccatgtactggcagatgaatgagagttcaagggcattacatgataagggctaattgcaagactagagactggagtgggtcagaggaactgaaatgtgtcaaggggaaggtacagctctagatagttcttactaaggtctttgacagctgatcaagaatcaggaggacatttcagcctggacgatgccatgggccaagcatgggagaggggagaaacagatggttctttaagagcttaggccaaaggactctcaacattctgggcttccaatctgtcccccacccaggatagctttctgttaagttactattcagaaccactgcaggcttaaaacaatgagtgtttatattggtattgaatccattagactgcatggtatagtggaaaaaggcaaggttaaaatatcagttaatcactttgttgtgtgaccttggtcaagtaacttctcgagcctcagatttcccatttgtaaaacatagataccaattctcaggctcttatggttgtgatgatacattaatgggataatgatcaatatcgagtgtggtgcctgacatttaatagatagtgtcaacaatttttttttagactaagaacaaattggatgatgtaatttattggctgacaattcatttctaaagatgtgacttcagaatgttctataaatgttaacattttcaaatgcccagagtatattttctatcttgcatactagctatttatttacaaatctctttctcccattgacttagcccttgtgtgaggagagctcttttaggctaggccctttatctgtactttgaggacccttaattcctagaggaagaacatggatttttctcaggcattaaagattccttccaaatttccatgtaacatacccactttcctcatacctatcttctcctggtaatattcttgaattattttttatttttaacattttttgctatgatctacattattatattttaaaaacacaatttcaagttatatattttaaaaaaatgccatttatttccatgatacaatttctattctcatttacgtcattttgtgcttccttcagaaaagttatataaaagctaaaagtgctgtgctgagtcagaatcctgttcccctcagcccaataagcctctgcaaaaaggaaaagaagaaattttttcaggagagcagtctatttcatatttgcagactgagagtgcatgtatcatctgatgttgacttaaaatgtctctccccttcccttcatctgtcatccacaaagctgtttgcattcttctggagtcttgatgggtctacagatggttcagtttgtacctccgtggaaacagggaacatgcaccagtggcacagagcatggtggagtggaagaaaatcactccaccatgatgtggatgatgcatgtgtggttgatgctgtggtgtctgtcctacttatagagagagacctctgggagtagaaggctcatacttgcctaggcacctgagcatcagagtgcctgggggcagcctgccagcctatctcctacggggccacccagcctgacagtcctaacctgggtgaatctcctgagaccaaggcttaggctcacagcattgtgggcttagaaacaacatcttgggggcagactcataccaagcaattcatgtggaggtagatgtgtgaaagcccaggatgtccatctgttagctcacactgagaaccctagctgccaggtagacaggaacactagcgtgaaaactctcttcctgtactggaagcccaatcctaatccataggttatccggtgagcactgttggaatgagggcagttaaatggataaaggagagtaaaaccatatgtcaggactgtctggcggtgcaactggaattcttgaacttagtctgtttcttagatgagtgctgcctatatttgttacagtttgttttaatgatttcctggcttaacaagccctaatctgatttgagtcatccttccttaagatttgctagagtttacaaattggcccaggtcatatcctctttttcccctgggaaaatttaaggtgacccttcttacctttgacatgacctatgattggtgattttgcagtttacctcttagcagacttgttattttccctgtttctgggtttttagtagacttcttattgtagctttaaaataattttttttacattccatttttttaatgttcaatatccattttaatgcatacaacaacattataaggtagatactgttttatatcccatttacatataaagaaacctgagactcagaggctaatgaacttgcctagaaatacctggccagtaaaggaagaggttgtgattcaaacctacgcactctgattccaatacttaagacatacctgtggctacttttctgaatgtttcacatgtactatctaatgtaatccttacagttacacaatttttattaaaaagtacagttctcactcagaaagaaagaaggatttgcataaaaaagaatttcaagcccagaaatactaatattacaggtgtcaggaatagtaacatccagcctacttccagcctttctctctctctctttctctccttccctcctttcttttctccctacttccttctctctctctccctctcccaccctccctccttctttctctttttatttacttacttatttatttatttttattatactttgagttctagggtacatgtgcacaacgtgcaggtttgttacatatgtatacatgtgccatgttggtgtgctgcactcattaactcgtcatttacattaggtatctcctaatgctatccctcccccctccccctaccccatgacaggccccagtgtgtgatgttccccttcctgtgtccaagtgttctcattgttcagttcccacctatgagtgagaacatgcagtgtttgggtttttctgtccgtcaatgatagactggattaagaaaatgtggaacatatacaccacggaatactatgcagccataaaaaaggatgagttcatgtcctttatagggacatggatgaagctggaaaccatcattctcagcaaactatcacagggacagaaaaccaaaaaatccaaaataatttttaattctctttcttatcggtgtttcttagcaagaattcttctgtagtgaagaattttccctcatcaactaataaaaaatggctagtaaaggcaggataaatgcttgctttattccctttattaatcttctgagtaacgaattggtatcttaggaacctccaatggtgaacaatgagtgttttaaaaagatacacattgaactcagcctttctttatacagttgatatgcatcagtagatggagtccatattaatgatgtaatctatataggctgatgtaatcaattctacttttgaggagattgacatgatgtctggaatttgctttaaatactccagcatctaaaaagcaaatcaacaacaaagggagtgggatcgatgaaaaaaaattggaaaaatcttgatatttgttgacactggttgatgagtacatggagttcattatactattcattttgcttttggtatgtttgaaatatttccaaataaaatagttctcaagatgcatataattctaaggttatcaagagtgtaaatgtgagtttagccaacaactttggcctatctgtgaatcttgtggagaaagttcttgatttttattgaaattccagataccccaacagtagttcctaagccctactgctttggcaacagcatgtcaaatatgtgcacattttcccagcattttggaaggaatttttataagaattttcagatttgactgattggatcctgattcataaaagtcttgtcttggtaactaaggatgtctacttttgagtgatgcataccttaagaatttgaaacatggttgcttctgttctctggacttcatatgagagcgtaacagccttttagccattctgaagtgacttcttcagtctaatggtgccatttctcattccaggtttaagtttatctattcatggggctgaaaagcgtttgcaaatccatcaacggcgaagtgtggcaagccgcccagcgtcacgtcgtcgcctgcctgtggtcaggcattcctcactcccaccaggcagaaggtcaataaaaatggaggcaagctcttctggaatcactaatggaaaaaccaaagtcttccacccaggtgatgcatggggaagttcaacggggacccatttcagtagcaacctgaccacagtctgcattatatttttattgtgtaaatatgccatactttcagctaagcttgcttttgttaggagtcttgttctatttccccttctgctcacctcagtcaatggtaaatatcaccaagacgaataagaggggagagagcttggtggttcagagaaggttgaggctatgtgcacagtggtagaatctaaatgaaaatcagagtgcataaactcttgctcagttcaggaaagctcattatataataaaacaacatagagatttggtcattttcctgataatttgctctaagattggtcaggaaaaaaattcaagccaaaaaacacccactttgaaacctaggttatctgtgttggcttgcccacatcctcctgagatcaggagagaagactggagtcattatattatattgttttaagtcttctgggaagcatctgtgatctctttaaaatattaaaatgattctacattaaatgaagtaaaaacatcttatgtgcttatttgggggaaaagctcatttaagtattcattcattcattgaacaaatatgtattgagtgccagctacatgctaggcattgttttgggttcaaggaaatatcagtgaccaaggcaatgttcctgcaaagtgactttatagaaacatcaaattgcgaaagaattcataagtcattgagaataactctcacccaatcctgattcctctctgtaatgtcctagtggatgaccacacagctgctactgaagccagcctccatctctactcatgtcacaccaccttctctctcttagcatgtaaccttgcttcctaacccatcaagaaacaccagggccgttgggcatgaattactggaggtcccttatcctctctcttcaaatgtattgctctttatgcatcattccccactttcctccagttttcagaagatgaggggcctcccactgtctttgaccaagctcttacccatgtcctttagccatggtcacctttcacctcttctgaagcttcctcaggagaatgtgtcctcttgttttcatctctttcacccttccacactgctagctgtttaccttcagtctatgaaaaggctcaagcttctaccattctgatcatttaacactgtacccttttccctcttctgccactttttcctcctcccttccaagccaaacttctgaaaataataatttacttttgattgctctgttctgtcgagagtaaccaacacaatctggtttctagctcctccattccattctggctgtttttgaggccctcagtgacctccttttatcacaatgtagtggatgcttgccagactttcctgatgcaccagaccaaggtggacaacccacttgtttcccaaacactgttcccttggcttccatgacaatcttagggttcttctcttatttctctcgcatgtaactttcctggtttctcccactccagcatctctttcctcctcttgcctcctttcccagtacgtaccaaatccagaatgattcatctgtacccctaatcagttactgtgcttgttctaccaattacagggtccagttcaaacttcttagcatgttaaaaacaaatgccttttgtgatctggcccctactgctttcacccttcattttttgccctcttcttccttaagctttattactatagtgcatcaatcaaggttcaatcagaaaagcaaaaccagtagaaagtatgtactagagactaattacaaagaattggctttcattgtgggagatggctaggcaagtctgaattcataggtcaggctatctgcaagggcaggctggaactcttgggcacagctcttaaaagcttcagctctgcttttaaggcttttcaactgacctagattatcaaggagaatctcctttacataaagtcaactgactatgaactttaattgcatctacaaaacaccttcattgcagcactagattagtgttcattgaataactggagactgtagcctggccaagttggttcatcaaatagaccatcgcatctgagtatatcaatgtgctttcacttctctaaatatgtgatgctgtttcatgcctcccaacctttgctcctgctgttctttcttcccaggataccctggttttgctctgttatctttgaacatgttgaaattacttgtctatccgtccactgaaaggtctttaagggcagggattctggattatttatctttgtactcccaataaatatttgtagggtaggaccgaacaaaaccttcattagctgtgttttagactactacaatagcttctgaatttttctgcctgcctttctttcaacaagtacctgatatacatcagtaaacaaagcagacaaaagtccctgcccttggggagtttacgtagtagctgcaagagataataaataaatatattaaagagaccaactgtgtaatctatattatagttatatgtaagctatatataacatatagtgtttagggaaaggataagtattatggataaaagaaaaagtaggggaagagggtagcatgttgcaatattaaacatggtgatcagggtaggctgagtcacgaagatgtgtaatcactgactagaagtttctgagacagccacgtggatgtctgagcaacttcattccagcagagggacagttagtggacaggttgtagggtaaaagtgggtctggcaatttgaagaatagtatggaggctcctcaacttggagtggagtgagtgaggtggggaatcaactcagtgaggttgtagggactagatcgggcaggaccttataggccattgtaaggactttgagccctatgtgaaaggaagctcttacagggttttgagcagaagaattccataatttgatttatattttaacaggatgtaatatagactatggggagaatagattataggaggagaggataaaaggagaaaggtcagataggaggcctccagaatgatccagtggagaaatgatggtagctctgactaggaacagcagaagtaatggtgagaatttagagtctggatatattttaaagctgggccaacaaaatatcctaatggattggatgtagggtaaaagagaaagaagagcaaaggatgactgaaaagtttttttggcctgagtgaaatcagctgagatggagaaggctgcaagagaagcagatttggtgggtttgagggcaaaggtggggctgagttcagaagtttgattatagatgtgataatattgagagctggcaagatcttgtgggtggtagtttgagctccatgtctggagtttgaaagatgattggtctgtgaaagagatataaaactaatagttgttgacatataagtgctatttaaagaaatgagattgcaagagatgaccaagggaagaagtataaatggggaagggagagcatcaagggctgagatctgggacactccaataataaagggtcaaagaggacatgaaccacgagcaagaaggccaggaaagaagcaccagcaaagatggagaaaacccagaagtgccacatctcagaaattacaaaagtttatcaagaagagaagaatggttttctaggctaaatgttattgaaagtcaaataagatgaggactgagaattagtcgattttagtaaagtggaggtcaatggtgattttgataagagccgttttagtggagtggtggggatgaaaccctgattgaagtggatttaagggagatgagaggatataaattagatgctctgaatatgggcaacttttttgagcagttttgctatgaagtgtagtgaagaaatagggcagcagctggaggagaagtaaggtcaagagtttcttttaaaaatagcagctctccagcagataatttatggtgttcaagagaggggagaatttgtgatgtgggcatcagtgagaggatgagagctatgcacaataggaccatggatagtttatctgtgataactggtgggaaggaggcgtatgtatataatggcaggtgtgctgagggtctaataagttcttttcctatgttgtcagctttatctttaatgtgagaagcaaggtcatctctgagaatgagaatggagccacagggagaaagagagagagaaagaaagatatggagaggggaaatatgtttgccaactcacattaaaagggatttgagattcatagtcatgaaactaaagtaggactagttatcatcattgtgtagtttttaattttgtgtagctacatgagtaaagacatacagttggtggtgagttggatttgaacagcagtgtggttttgcaaaggaagtaggaaagagagaaagggaatcaaaagtgcatggaagggagtgatgatagtgattcattttgtgatttggtaaagagggtacaagacatcaagggaaggaggtacagtgaaaagttggtaagatcaatcggttgaaattcccagagggttcaaaaaattgtgggggttagggtaatagaaggaggatctggaaggataagagaggtggtaagagaatggaatgtgtggcactaatattgtggcacatatcttaataacatttatttaattttattatagtaatatcaacacaagatgctgttactggtaatgacaaggtttaggccaaggtacaaaacaagggactataaagggtagaaggcaagatcattgaatgaaaaaattcctagggactgagaggccaagatgtgaaaatgattgagtcaagaattgagtagctttgggaagaatgataagccaggcattaactttactgagaaataagggaacatgatctggcaggtagcaggagagtacaaagataaagggtagaagatgatgtagtataacaacttgagattcaaggctgaaggtgtttggggaagagggaagaagaatggtctgaaggtggatttgagactcaagaaaggtatctactcctctttcagatgcgttggtgccagggctattggagaaaaacagttctaagtgaaagagccacagggaagcatgaccactgggaagatccaggttttccttagagcaaggtgaatggggcaatctgagaagagattgacgacattcagagaattctggagagcccagtggaaggttttagatgttggacaattgtcttcagtggttctctcagacaccaaggttctcctccagagaggataattagcatcagccttcctcttcttaaaattgttatggctatcccgaagaaagtgcagccttgtgagcccaccttttcaagtcctctccaatttagcctctccctacttttccaggcttatctcattttacactgtcattatccatgttattcagcttcaggcatccacaggctttttagtatttctcaagcaggcttttactcttccattttctttgccattgctcaagctcctctctcatcttggaatatcccttcccctaataaatgtctactagcccttctcattcctcaaaatgtaactcaaattccgcttcctccaagaagctttctagatcttatagtcagaattattcccctacttccccgtgcttccacagaacttagaagccttatcaaagtccatctgtttctatggtcttatagttctcccagaaggcaggaactctcctcaattcatctttgtatcttccgtcactcctaacatcatgcgttgtccctagtaggttcttaataaatgattttatgttgtttgtcaaaatctgttctactcagcagatataggttagcattctgaagttatatggcgtaaatcttaactcttctttcatatgacaatccttcagttgtttaagaaactcatccctagctattttccaggtgaaacatttcctagtgtcttcagtgcttccttgaatgacatgatactcaacttctttacctttgtaccctctccactcttagaaacattcttatttcattgctatctctttgaaaatgcagtgcccagaattgagtattccattaaagtcaaacgcaggcagtgtagattcagtctgtcctttcctttaattgatatcctgtgttgatattactataatacaattaaatgaatgttattaagatattcctaatggtgttttatcaacatgggctaattcagcccacattgtgagttaatatttcaagtctcttccctcaccttaaaaacacatcacttggatgagtacggtggctcacgcctgtaatcccagcactttgggaggccgaggcgggtggatcagctgaggtcaggagttcaagaccaggtggagaaaccctctctctactaaaaatacaaaattagccggacgtggtggtgcatgcctgtaatcccagctactcaggaggctgaggcaggagaatcacttgaactcgggaggcggaggttgcggtgtgccaagattgcgccgctgcactgcagcctgggcaacgagcaaaactctgtctcaaaaaaacaaaaacaaaacaaaacaaaaaaacatcactttacttatctacccatcattttatcatagatccttaaaccctacatatgtcgagtattggttgaaaatataaataaagccaatcctctagcctagaattataattaagaaaaaaatatattaagttacaattagaaacttgttatttaaaaaaagtatttttaaaactcatattattctggcaaggtagaatatgatttcagttccattctctttatttttagtgtacttggacaaatgcatcatagttctctgttgggaaattatggaagagctctcaaactgagtttcttaagtgcagtgagtcatagatcttagtagcagcttggacaatttagtcatattgaggcctattaagtcatccatctattttttacaaagttaataatccctgttcccgaagtgttctctaaggcccactcggattggttactaagaacaaaaagagaatttgggagtcttgtagattttctgttccatctgcctgaacaatttcagtatgtttatcctcctttgagtttacaaacttttatgagggcctactatttactaacaaggatttattgggaatttgccctccttggagtattttgaaatggtgcagaactctattaaacatgggtcttaaggcactcagtcatgtccaagagagacaatcagtcagggttctttgttaccaacaagagaaactaatcatttagtccaaacaaagaaggaatttaaatttgaagaatgtggatggaaaacctaaagagccagccttggaaaaggaatcgagaaatcaagaatagctatttgattagaatagaatatcttctatttgactatctggaatgattgaattcttaccggtttttctagttttgcatcatttggctcacgttttgaagatttaggaggacagttctattggctatgcacctttcctttggttggacagacagtgctgagacaaatgataggacagaagacctctctcttcagccttcatagtgggagggtaggactccttgatttcttctgctaccttgactacacacagcgagggagaaggacttccccaaaaggaaatagaggtgatgttaggaaacaactttatgtggaagaatgcccactacagggacatgtgcttaagctgctgtgatagaagtcaaactgtattaagggctggaacacagaaataaataaggttatggcagcataaccttattatgctgaagagaatttagaaagactcaaaacacatatggtctaccaatttgactttgaaggtcaactaggatttcaacagaaggaagaggcatgaccattcagatgcaggaaagagcataatgataggaacggtgcattacactggttctgaaagcaagctttatcgttaggtgtttaaaagctagatatgtcacctgatggctattacagccttagacaaattacttaatttctctgaatcttagtttctacatcagtaaaatgaggaaattaatacctaccttatagtattagggctgccaaattaaatacaatgttcccaattaaatttaaatttcagataaacaagtatttttgaaatacttgtttgaatttttgaatatttgaatattcctaattcaaatatttgaaattcaaatatttgaaaattcctaaatattgcatacgacacacataataaaaaattatatcgtttgaaattcagatttagcaggacatcctgtattgtaatgtattatgtctggcaatcctacatagccttgttatggcaattaaataattggtgtagaatgtccagtttgatttttggcacatacttggtgttcagtaataaatggttgataaataaagaaatcatttttcttgtcaccaacatgataagcaaaattcagaaccctgaaagtacctatgcctcagaatccttgttatctcagttaccacttcatttagcagtttcccagttaacttgtgctagaataccaataagatggtctctcattatgctgtataaatacagaaaccattcatcttcatcttgtatttgtatggtttctctttccttctgattgtttcaattctttctcctgtttatcaatttcattttgaccttatcctttagacactcataattaatgaatattattttctgcttcctttatggaccaaaaatataagtggtaaatggtactaggtttgggactataatttaagactcaagagcatagtaaactgaagcactgattttgatttttttgagtttgaaactataaagcttagtggatatagatcaaattatcccagctaatgactatgccatataaaatagaattggaagctttctgaaatctaaaatacttcttctattgctttttccttatctgttagacccatcatacaatcctagagaagtgtcattaatcacagaatatgtcctttagtctcatttagaatttgtaaaataatgttttgccgatatgtgttattcccaagtaatttctaatacaggttcttttatctcactttttaaaacctatggccctttccacatttatgcatgattattgttccctaagaatctatctagtatttaaatgctaggacataattgattttccaggagagaaacattaggattttcttgtttccaaacagctagaatgattagtactgtctgtatacttaggcattaaatgcatagtttgataataataaaattatagctacaatatattaagccctctaccatattcccaacctcaaaaactgttcaactgttttcattcattatctcatttaattcccataatattctcatgctattttccttatttgatgggtggggaaactaaggcatgaagaagggtaagtaccttgcctaaggttatacagccagtaaatggtgaaggcaagattctagctcaggtattcttattctcttatttaatgtgctattactttcttcttcacacaacttggcagaaacatttctagcaaattatcataaaaaagccttagaaaatttaaattaaaagccctgcagtagctcaaaccttagcgtaagaaaaccatactaaagaagggaccagttaggttctgttgattgcttgtgtaatcgtcttcaaagtttattatttccttcagtgtaagtgatgtccactttgtagcttctctttctggtctactatgctctggacttttgtttttcatcctccattttttgggttctgatataataaaattcattcctatttccctgagtttcaaagatttctttctggaaccaatgtcaaggcctggtctcaaattagggaacagactgtcttctgtttctccctttaaagagcagtaccagaagatgtggggagagggagaggagaggattattaaggagagacttttaaaagaagaaggacagtcaagaaagacttgttcctagttctgccaagagtcaggataaacttatgctttagggaaacaaaaataaggaaaagataaatatatgaccaatctttagaataacgatcataatactgcaaccctacatttacttgatattctgttgtttccaaagggctttcacaaatttttctcctgcatttcatttagtcctcatagcagtctgtgaggtggaattatgcctattttactatggcataggaagtgaagttactagctcaaaagtacaaaattagcaattgacagaccccaactaaaacccaggtatttaatttcttatgtggccgggcgcggtggctcatatacgtaatcctagcactttgggaggctgaggtgggcggatcacctgaggtcaggagttcgagaccagcctggccaacatggggaaatccgtctctactaaaaatacataaattaaccagacattgtagtgcaggcttgtaatcccagctactagggaggctgaggcaggagaatcgcttgaacctgggaggtagaggttgcagtgagccaagatcatgccactgcactccagcccaggtaacagagcaggactctgtcaaaaaaaaaaaaaaaaagaaaaaagaaaaaaaaaaaaaagctgaagcaggagaatcgcttgaatccgggagacagaggtggcagtgagctgagattgtgccactgcactccagcctgggtgacagagcgagactccgtctcaaaaaaaaaacaaaaaaacaaaacttattatgggtgttttttccacggtgtcaactttttatcttgaagatgagcattagttaagagtgaaattttgggggctttctatccccttttctgaaaatagacactttattgagaagtgtggctgaggtttgcttataggatctaaggaacctggctgttctcttgaacagaactgaagcgtggatgagataatcagtcttcctatttgtgaatggatttttggggtggctggaagataaaattgtatggaaaaagcgacaagggctactttggacttctgttttatttctcattgcattgaaggtgaatgtggtgcctttcagaacagttagtgctgtggtttagaaataacactgtaattatccttcatttgaatctcttcctctttaagtgggtttttttagatgtgtgatgtgagtttagtcaataggtgggggtgcttaggaaaacaagctattttggtccttggcaaatgtgggcattggtatctgtgttccttgctatcatttgctgagtaacaacattattttttttctaaaaatatataccacattcttctcttatttgcatttgcttttcattttactgagggacatatacacacacattttgatctataggatgcatttagagggaattttctgaaaaatcattttacaaccttttgagcacagaaagtgaatgaagaagagccataaaaaggcagccacaaagaaaagcaaatggttaatttctggaaaagagcattgcgttttgtggaatttaaaactgcttcttctgcctgaggctatttaaaataattttatattttagaagcttgaagagatttaagtacagcaatgtgccccttatccatagctttgtttttcatcgtttcagttacaataagaattctgagagaaagacagaaattgctctatcattattgttataattgttctattttgttattagttattgttatcaatctcttattgttcctaatttagaaattaagttttatcataggtatgtatgtataggaaaaaaagcatatatatagggttcagtactatccacagtttcagatatccactgggggtcttggaatgtatccgctgaagatagggcgggatgctttaaccatttagctcaggattatacaactataactagtagagctgagatttaaaagtctaagcccttagccatggtggatagtcagttaatagtgagcttttattttgcttgattgtctgagtttgagctgacaggccgatgcacaagaggggcagagtcctagcttttttgaggattgtcatttcgcaagggcaatattccttctcatatttatctcaagcccttcatgtataaagacttattcaagacaaaagggtaaacaacatttagtgaggctgaaaattgcacagtttctgttctgtaacgcctcctaatcctgagtttgtctcttctcctcatctgcaagagccctcgtcatcacaacagacctcagcatctaggagattggaagacaccacagaattctgcctatgtgattcacaaatccttcttgctatttgaagctttgcaattctgacttccaggccctctagggaacttttagtgcagggatgcattataacttaggagatcatgatcttaccaatcctggaaaacatagaagcaattctgctgaaggagagccattactggccgatgcagtagaattattatttccattttagacctgagaaatatctgcctgctgttagccaaatgtggttctcccatcaggacccagtaaagaacttggccattaggactactcagcattaatcatttgagggaatagctttagccttatagtgactagtgtgagtgaatcaatatgtttattcctgctaatatgagccaagctttcttctgtaaaagaatgaacttacaacatcataagatttatggttttacacaatactaataaaatgacatgaatattttttgcacgtatgaagcatcttctattgtgaagcttttttagtttatgccacacacaaaaaaaggattttggtaagtgctacaaataatgttaaaaaaacaagatggaactttttttttcagaaccagtagcatttcctacatgtaaatctatggtttccaatttcatattctccagaagagctgaattcatttcctttctctcttcttcagagacttttcttgaacactggctgatgccaggaaagtctgtaaagacagaatggacctccctcccttcttttttatttttatttttttaagatacaaggactctgttgcccaggctggagtgcagtggcatgatcatagctcacttcagcctcaaactcctgggctcaagtgatccttccgctttagtctcccaagtagacgtgattacaggtatgcaccaatatgcccagctaattttattttatatttttttttagagatggaggtcttgctatattgctcaggtaggtcttgaacttctggtctcaagcagtcctcctggctcagcctcctgcagctctggggttacaggtgtgagccaccacacccagccttcccttctttcttaacaccattctccatctcagtactgtcttaggaacacagaattcacctatggggagttcaatacaaaactcccagtttagaaaatgggttctttggtgcctcttaagtccaaaaatattacatgtgaggatttattttagatatgtagctcaagttttgaaatatcactgctacctattctataaaaaatgctgtgtttgagaatttgtattaagtatacctctcaggacaggaactaccaaataaaaatatttgtagaatataaatagaatgtagacagaagctcagctctagcaacagttattatgaggctatcatagaaaatatcatttgtcctcttaagtctgttttacacactccccatcttttctgtgacatggggagggtaagagctgatttgtcaggctttcctttattttggtttcaatatgaagtaactattccaagtcccaggttacaagatttttaaagtggaattgtttttacttagcctaggccccaaacctggagtaggccctcattttgcagagaatgaatatataaaatttgtagtgaagcacctagatctaacatgatgggccaaattatttatgtataatgtctataatttgtactacagcctccaaaaaattttagtttcccattttttcaatgagaaagataaggcttattattatttaatgagtcaaggtcacataaaagtagcattcaaatccaggttagtttagtgccagtatctcctttttcaatcacttgtgttaatttacatatatgacatatgtctataattgattgaacaaggaaaggaattttaagtgatttatttaaagtaactaaactaaggcaatctaatgaaattactaagaatagtgatttggtgagtgagtggagggcaagtggaaagtggtagtaatgtaacttttacattgttatgtgtcacagcagaaaaaccatatatagtatataaaattggaaaatcatgaaacaatgggacacacacatagaaggatccaacagagactcttaaaagtcctttttccactgaggaagaggacagagattgcaaaaagggtagctattgatttttattgtaagccctttggtactttgatattttgtttattatttgataaaatttaacaagattttactaaaaatcaaaaagttatgatctataatatgtctttcacagtaatctactgataacctatcaagatgctttaaattgtagactaaaaaaaaatcagagcgtcttcttagtttatattcattattgttattcataatgtgaaattgcagtgaaagagcattaactgagcatctaatatgttcaaggccttgttctaggttttataggagataaaagggggatacagtttgatcccaggcttcaatgtgttactgtctagttgaaggtgctctcaatgaggaagaaatctagatatggaaaaactaggaacttaaacattttctttgtctgcttcatactgtgctaggtactctgactcatttttcatagaaaacatatactatagaaaagacaaaatataaagagctatgtgagttcagtggatagaaaaatggtttttacttatcaggatcaagaaatgcttcctgaagcagagaattctaggtgggccttgaaagcaagaagggatttctatggacaaagaatggatgggaaggcattgacatatttgctaatcaagaaacttatgtttgaaactcatttttttgttgctgtttctcttgtataaaagtgctttgatgccctggaagttgaggctgcagtgagctgcgattgcatcattgaactccagtctgggtgacagagtgtgactgtcttaaaaaaaaaaaaaagcctagctgtaagctaggtacagaatgaattttaaaaatattgcttgtccagctaaagactttttattaaatgtaaatgctgttaccaaagttacagaatcacaattaagtattgagtataacttctgtccataaaatgtggggaaacttaaagacaaaatggagatcacatggattttgtagctattcttgatttttttttaattggtcaatgtgtttccacatatttagggatcttcttagcttccctctttaatttatttgtttagtttccttaggattgtacttaattgcatgttaattactgatgcccagtggggctgtattttaaagaatcttcagtttgaatctatagtatctttaccatcttgcctagtttttcaagtctttgtgttctgatccaaaggccaagatatctgtggctatggcaaagaactcagattcttaggtttttagaaattataacaaaaagctatatgaataacaataaataaataaaatcagtagtacgaagtaggcatagtacattttttacattgaagtcatttaatctctctcacttgggcactataagttaaaggtggagattgtcatctttgaagattcattggtacactgatcactctccatttaggaaagcttacaaaagtccttgttttacagctccctctcctttgtagtgttagacttaatgaacggcttattgtcagaagttccagaccattacattatactctatgaaagagtattctgtatttcttctagagcagagacagaaaaatatcttatatttgggggactctatgtgtgatcataatgtttagcatgaagagaatgttgcattttgaagctgtttggtttatacattttaaaaaattacatgaatttagaaaatctgttatattaaattggatatttcacatctatggtttaatatctgcagtctttattttcagtcttaaatcctgaactccaaataattattaatctccacaatcccactcttgaatttttacatgtctttaaagttataaaagtgttttgtgctaagggcagttgcaatggctcacgcctataatcccagcactttggaaggctgaggcaggcagatcacttgtggtcaagagtttaaaatcagcctgtgaaacatggaaataccctttctctatacaaaatacacaaattagccaggcatggtggtgcgcacctgtagcccttggctacttgagaggtgaggtgggagaattgcttgagcctaggaggttgaggttgcagtaagctgtgttcgcaccactgcactccagcctaggtggcaaagtgagactttctctcaaaaaaatatttttattcttattgtgaaaaacataaaaaagataaagtataaaacaaaatctacccatcatttcacagctgagggataacttctgtacctattttgagtattttcttcctgttatatttttctagtcatataaatgggtatgttttttaatatgcagtcatgcaccgcatgatgactttttcatcagtgatggaccacataaaccatggtggtcccattaagattataatggagctgaaaaattcctatcgcctagtgatgttgcaggtgttgtaatgtcatagtgcaatacattactcacgtgtttgtggtgatgccggtgtaaacaaacctactgtgctgccagttgtataaaaatatagcacatacagttatttacagtatataatacttgacaattaaactactatgttactggcttatatactctaccttttattgttgttttaaagtttactccttttactgattaaaaaaaaaagttaactttaagatagcctcaggcaggtcttttaggaggtattccagaagagagcatttatatcatgggaggtgagagctccattcatgttattgcccctaagaccttccagtggaataagtgacattgataatcctgaccttgtataggcctaggctaatgtgtgtgtttgtatcctcattttttacaaaaaaagttttaaaaaagtttttaaatttaaaacatagaaaaatgcttatagaatatggatataaagaaagaaaatatttttatggagctataaaatgtgtttttgttttaggcttagtgttatcacaaaacagtcaaaagttaaaaaaaatctaaaaggttacaaagtaaaaacttaccataagataaatttattattgaagaaagaaacatttttaaataaatttaatgtggcgtaagtatacagtgtttataaagtctaccaatgtgcaatagtattttaggccttcacattcactcaccactcaatgactcattcagagcaactttcattcctgcaagctccattcatggtaaatgccctatacagagagaccattttttatcttttatactcgatttttactgtaccctttctttgtttaggtattcaaataccattgtattacagttactacagtattcagtgcagtaacatgctgtacaggtttgtagcttaggagcaataggctgcaccatgtaacctaggtgtgtggtaggctataccaactatgtttgtgtaagtacactgtatgatctttgcacaatgatgatatctaccaatgcatttctcagaaagtatcccatccttaagtgagacatgactgtacttgggacatgtctctgtgtgtgtgtgtgtgtgtgtgtgtgtgtgtgtgtatgtatgtatgtatgtatgtgtgtatgtatgtatctatctatctatctatctatctatctatctatctatctatctaatctatctgtctatattcttgtattggttttcctcaccttttcattataaacgagcattttcccacatcattaagtattctttgaagacagaatttaatggcctgtatgcttcctttatggtgcttcttttgtgtcttatacttctatactgccctctcacatttaaaaaaattattaaaggtttttggaatctttgttattaaaaattctagttatctagtagtcatagctacttctacctgagtttatgagcccctgcttatgacaaataacaaataaataaattgggcttctatttattagtctatttaggaagtcacttgttttttagcttatgtaatgtgttttgtcttgatctgaagtattagaacacaggatcattttactgggttatgttggatttatttggcaaatccagttctcttatctccaatagcctgtgtttgtgactgcttggatatgggtgattttaaagactagtgaagagcatggattgtgattacatatttacacctcaatagctgtgtgactttgggcaaattactccattgcatcgcaccttcttttcaagattaaagcctaaatgatatcataaagtacatagcccagagccaggctgataattgaatatttttgttatttttctgtcattgttgtaattatgaggtctttggccatcaaatagaacaaagctgactagccttagttgagattgaaaagcatcagaacttttctttacccattagaagtaactggccatggaagaaaaaagcaaataacccattttaattctggaccagcaggaaggcgtctttgtctgtcctgtctaagaaactctcataagtagcttcagactttgcaatgaggcagctgcattagtgcatctgaaaagttcactgctgtggctggaatgttaaatagcagttcttgacagtgaccgaaatgcatacctggggtctcaaggaaaggacttaggacttccttttcgttattcacattgttcaatacctagtctgtctctatataaatgccagtgttgctttaataaattattatggatgatcatagtaatacctgtagctgctatttactgagtgctgactacgtgacaactaaggtttttgtgcattatctcatttaatcctagtggctgctctgtgagtctgttatcatcatccctatttcacaaaggaggaaactaaaatttagagaggttcagcattatctaataagaatttcaacgttggtctctcagactccagaatctgagcttgtagctttgctcttagctctgttgttttggttttataattactgcatagcctcattcattcattcagcctgagaatctactttgttgagaatctacttcatgccagctcctgttctaagtgcttgggttatagcatgcaggcaaagtccctgccctcccaaggcttattttctattaaatataatagaatattaagttaccttcaggtgttttactcctagaataagcgttcctgtgaggctatgagttatcttattcttgagctttaggaacgtaaccgaaattttgtataaggctgagtatacctcctaagcttatgagatttctacagaatttctacaaaatactggaagctagggcatgttccattttatgcatcaggctgtttattttagcattggctttttagccctggcagactcctcaaatcggagacgttcttactgattactttaagaagcttttagaaggtttggaaggtttattgttcgtgataaagctactttttgataccttggtttctttgacttccttaaatgttctataggtgtatggagcagcataaaaactttctttctttagaacatgccaaaaatacatcagacaaacctagaacaagaggcttaattacttcatagaataaattttcaaattcggatacagttgaaaaataaatgatgaatcggggaggtctaattatgagggacctaagtattaataccttgtttccgtaatatcaagaatattaaatccatccttaagaatgaattattataagaagaagatgatatcataaagtgtttgtgttaatgtcacatttaatccatgtggaagctgaaaataattttaaatatccttaggtagaggctatgttatattttttacgtagggaattatcagtaaatactatgaagtgtgtttccttataaaaaagtagttgccttattttgcattggaaatacaagtgaacctttttggtcccataaaatgcaaatggcttgtatatgttcctttttttttttttcttaagtcctttgtctaagaaggaggatcattggcaaaccagctagccattcactttggattttgacatagcttctccttgggaccctaatgacagactctctgataaccagtgcaaactccatgaatatctttcatttctctagaaggaggtgtggatttgcaaggctaccagctggatatgcaaatactacctgacgggccaaagagtgatgtggacttttcagagattcttaatgcaatacaagaaagtaagtttcactcaaattttaaattcgccgtgagagaagaagctattataatacttgggaggggtaataaactagaaaccttagatgtcaagctttaaaaaatattaacaaaatgatgtcttgaaagagatactgtgcaaaataattttgaaactagaagagatagtgaaagaggtttaatttgtgagattaaatcacataatagtggaatttttgaaaaagctataacggaatgatcaattctgtatattgtatttcatgtaataatatttagtaaaccttggagtattgtaaatttttagatttcttgattaatcataatcaaagaaaaacctttaagaaaacaaaatacaattcctctgctcaaatggaagtaataagagggaaatgttagtggagcaaggtgaaatcaggaacttcttctccaaaatgagtatctggagtcattgatgatggactgcatgccagaagtgaaccctcattttctaagcattttgagtaatcaaggtttgctcttcttcgagtattttatttctgttttatagctttcactcagaattttatcagaatcaacacatttactcaagttaaatatttagcattgaggatgggtgatgcggtgtctcatactaagtcattaccattgatatttcattatcagagctctaattctagatgatgaagctcctcttaatatcgaataatttatctcatgttggatttgagggattttgatgtgaagaacattgtataaacaaccattgcaattttttcttacttctagttttgggacattgcattttcttttctttttttattattatactttaagttctagggtacgtgtgaacaacgtacaggtttgatacataggtatacatgtgccatgttggtttgctgcacccatcaactcgtcatttatattagatatgtctcctaatgctatccctcccccagccccccaccctacgacaggccctggtgtgtgatgttccctgccctgtgtccaaatcatctcattgttcatttcccacctatgagtgagaacatgcggtgtttggttttctatccttgtgatcatttgctgagagtgatggtttccagcttcatccatgcccctgcaaagaacatgaactcatccttttttatggctgcatagtattccatggtgtatatgtgccacattttttaaatccagtctatcattgatggacatttgggttggttccaagtctttgctattgtgaatagtgccgcaataaacatacgtgtgcatgtgtctttatagtagcatgatttataatcctttgggtatatgctcagtaatgggattgctgggtcaaatggtatttctagttctacctccttgaggaatcactacactgtcttccacaattgttgaactaatttacactcccaccaacagtgtaaaagcattcctatttcttcacatcctctccagcatctgttgtttcctggctttttaatgatcgccattctaacttgtgttagatggtatctcatggtggttttgatttgcatttctctgatggccagtgatgatgagcattttttcatgtgtctgttggctgtataaatgtcttcttttgagaagtgtctgttcatatcctttgcccactttttgatggggttgtttgttttttttcttgtaaatttatctgagttctttgtagattctggatattagccctttgtcagatgggtagattgtgaaaattttgtcccattctgtaggttgcttattcactctgatggtagtttcttttgctgtgcagaagctctttagtttaattagatcccatttgtcaattttggcgtttgttgccattgcttttgatgttttagtcatgaagtccttgcccatgcctagggacattgcattttcttgttaactttcttatgaataattttatgctttttagttatccccatttatcattataccgtcctcttgaccttatgagatagttattacctccaccttacagatggaacaactgagggtggaagaaattaaatgacaggggaagatgataataatggagaccagactgcaatgatggctgtttgttccttcatttaattccttcatgaatgtgctcagtacaggatttaaacacattgaggtgaaggatcctgaaactgaagattaggctacttttaaaagaaatgtttttagcagagaatataaggggatcagctatttattccggttgaacaatccctttatattacattaatgaataaaagagaaaaaatttccacaagagaataaaaatcagattattagacattggagagaaaataacttttcatggaaagttataaaattatgtaattacttcacttgatttgaaagatgataggttgtacagtgctcaaagagttcaaattttttttcaataaatgataaaagttggcttccatgcaagtgctagaggtgaacttaaatttaaggagtgggggctagaatgaacttgcatcagaatgaactaaaggttagtaaggtactatttttatagtaatttttattaccagatcttagtaaagacgtgtgtatctgatgttaactgttctgtagtttagaagggtgatctttctatgaacaggtagaggagtataaatttatgagtacttaacagaagaaaaaggaaatgttacttgactttaaaatgcaaatccagccctttataagtttatgcattttctattgctttggaactaatttattttcttgttgcaaacaagttttgtgctaattagatttgagaagctgcccacacaggctgggtcatttctggaaggaaagattttgggccattcagtctctatttaggttccaaatatgatcgaaatttttagccagttcatggaaatctccaagcataaaaataggtagcttggtactttaagggactgtagcttagattatcgtttctggaaagctttgcgagaccatcgttaagtgtgtaaagaatatggagttctgcgactggccccagtgtgtgatgttcccctccctgtgtccatatgttctcattgttcaactcccacttataagtgagaacatgcggtgtttggttttctgttcttgtgttagtttgctgaaaatgatggtttccagtgtcatccatgtcctgtcggggggtggggggctagaggagggatagcattaggagaaatacctaatgtagatgacgggttgataggtgcagcaaaccaccatggcacgtgtatacctatgtaacaaacctgcacgttctgcacatgtaccccagaacttaaagtataattaaaaaaaaaagaatacagaattctgaacatcagtataattcctctcctttttgttaagattaacaagatgatggaaaattttcacttttttcttcaaatgttgtgactatttatatatagtatatatatatatatgtatgcatgtatatatgtgtgtatacatacatatacatacatacatatatatacatacatatatatacacacacacatatatatatatatgagaccttcaagatcaagctagaagtgcatatgtgcatgcttacatgtgtgtatttcaaacatttcttgagtgtctggggtaggctggccatgatggtgttttcccaaagtatctcttttcaatcttaaccctaagtaataatagataagattttctccattttaaaggtgaaaaaactgaatatagctccccaaggatatatggttactatgtgatagagtcaatatttaattgtatgttcatccttgttctgctaaatactaaattaaataaaaatgattaggaaaaatgaactactttgcatttttaaagttgtattatattttcacatcttgatgcaagaattttgccaccatgcttctacattgtgaaatacatttacagtattttatcttttagtgtgcataccctaagtatatcctcatctcttctaaagatgtctcagagtggctggccatactcaagtgctttttcagatcctccatattagatgtacagcttataaaaaagaaaagagttattttaaccatccatccatcttgcctgtcatgtgtcaggtactgtgctaggcataataccttaaggcagtggtgaatgtttggtacaaagtctaattcaggaaaaatgaaaacgttttcagatcacgtcttgttttggtgttcaacaggaaaacaacttgattgctttttaggaacaggcatttacatgtgaaagtataacaagggtgtgtttgtgtgtgtgtgtgtgtgtgtgtgtgtttgtttcttttcgttgatgttatttgtcccttcctctctattctcacccttcactctccattccaagatggtagtcaggtaccttgaactcctttgtttcagcagagttttgtgttaactaaagttcctgccttttttttctgaaagcctgagcttccaagactgatgcttgtatggaagaagaaattgcaagagagatgccctgtagagggagccaggcttctggtagggggaatggaaagggagggaatggctatgttgcatgcctgggagactgcaggggagccacctgaactgtcagtcacacagagagttcctggcctgagaaaggaacttaggagtctctgggaagggggcagtctcatcttcctgtttctttgttttatctccagtgccttgaacagagcatggagtgtggtaggtgcttactaatatttgttagtgattgagtgaacgtgtggaatcactggagacttgaaaggtgggcagctcagtagtaaccagtgtgtcttggacacctgactgctctttctaaatgttctgctctttacaaaactcctaggacctttgcacagttctggatacatgaggcaggaaagtgggagtgtcagcaataactgaaattaaattgtccacgaagccggtggaatgggaacttgcagatagatttagtttgatgcaatgataacaacattacagtgcaattcctactcttgagttcatctagtaagattcaaaccctccatccatagtttaaggagtggagtgcctactcaaatcttatgtacagtagcacctattaaaacaaaaataaacaaacaaaaagaaaaacactgcttttttaatcaccaaagttttcaaatccgaacattttaagaggtaagcattttaaaatatttccttctgaaacttgattgagaatcatgtcttaaagctctgcagtccatgaatcaggtgtatgtgtgtgtgtatgtatgtgagcatttattacattagctggctactgtgaagcatgtcattcaaaggttatactgtactttttcattctcactttaaattattttcaatgtccagccctttttagagaccattcatccccctaccatttgttgcccacccctcttgttttgctcctagtttttcctttcatgattcccagcatatctggatatatactgtagggacactcttgaatggcatccataccctgaaacacatgattgtgttgtattccatcaggttctgatgaaggaaagagggcacaagatagtgtttgcagtgagatctgaggagttaaaaggattgtgggatcattgttatcctgcagtctgtttgtgcttgcacgtgtgtctacataatcatatagctgtgcctacattaggggtggtgtatacttttgtggctgaggagactgagtcatttctcagtgacaccgagtgagtcactttgaatctaattctttagccctgatttccaattttatttttaacctgcatggtcatgccatttcagaggagcagatggcagggtatggggtatgggggtgagcggggccgggggggctggcatatattgagcagataatcttgtctggcaattttgtggctgaccttttacctatgttattttatttagtctttaactctctttgccttaatttccacatctgtaaaaggaaaatagtaatagtacatctatgtaaagcctttaacatagtgcctggtacacagtcaggggtgtataagtgttgactgccacctttgtctttattcctcaatcattcattctgtctgggaaattgtatttccatatttagaagataaataaatatttagaaaataaagaaattaaagcttgaataagttaaatatcccaatctaatagctaataagtggaagggctggcatttgaactcaggtctgtctgaatccagagctcatgctctttccaaagaaggtgaaattgtggtcagtagacttggaggctcttttatgcagagcatgaatgacctcactttatgttatggaaaggtcgccaaggctaatgaatgagcaaagattgaattaggcacatagttcttctctaaatgtcattcccagggctgtaagaagtgccatcatcattatttgcctttttatagaagtaaccaaggtgttcaccttttttttacaatgaagtagtagtaagagaagctcttcttagcaaatacgctaaatcagaaacaagttaatgatctcaaccccattgtggagtgctggggttatatacaataccatcatctgtgctgttttataaacattgccattattgagccaggtgatgacaatgacatctttttttattttaatttttaattttggtgggtacatagtaggtgtatatatttatggggtacatgaaatattttgatacaggcatacaatgtttagtaatcacatcagtgtaaatggggtatccaccacctcaaacatccattctttctttgtgttacaaacaatccaattatacttttagttttaaatgtacaataagttattattgactctagttaccctgttgtgctattaaatactagatcttattcattctatctaattatatttttgtacccattaaccatccccacctcccttccgctctactactcttcccagcatatggtaaccaccattctactctctatctccattagttcaattgtttttagtttttagttcccacaaataagaacatgcaaagtttgtctttctgtgcctggctcatttcacttaacataatgacctccagttccatccatattgttgcaaatgacagaatctcatatttttatagctgaatagtactgcattgtgtatatgtaccaccattttctttatctgttcatctgttgatggacacttaggttccttccaaatcttggctattgtgaatagtgctgcagtaaacatgagagtgcagatagctagtatactaatttcctttctttggggtatatacccctaagcagaattgctggatcatatggaagttctatttttaattttttcaggaacctccaaactgtccttcatagtggttgtactgatttacattcccaccagcagtgtatgagggttccctcttctccacatccttgccagcagttgttattgcctgtcttttagataaaagccattttaactgaggtgagccctgatttccaactttattttacaatgaaattatatctcattatgaaatctgaacattttacaatgagatttctcattgtagtttttatttgcatttctctgatgatcagtggtgttgagcaccttttcatgtgcctgtttgccatttctgtgtctccttctgagaaatgtcttattcagacatcttgcccatttttatttggattattagatgtttttcctctagagttgtttgagctccatatatattttggttattaatcccttctcagatggatagtttgcaaatattttctcccattctgtgggttgtctcttcactttgttgattgtttcctttgctgcgcagaagctttttaacttgatgtgatcccatttgtccatttttgctttggttgcctgtgcttgtgaggtattactcaagaaatctttgcccagtccaatgttctggagagtttctctaatgtttccttttagaagtttcttagtgtgaggccttagatttaagtctttaatccattttggtttgatttttgtatatggtgagagataggggtctagtttcattcttctgtgtatggatatccagttttcccagcatcacttattgaagagactgtcctttctccaatgtatgttcttggcaccattgtcaaaaatgaatttactatagatgtatggatttgtttttgggttctctgttctgttccactaatctatgtgtctgtttttatgccagttccatacagaaattagttttaaatgaatattttttttaaatctcatgactttttgtttgtttgcaaaggcatattttaaatctcaataactttctgtggcagaaggaaggttcctgctgtcatatctgtaataactagaaccgcaggttctttagggagatgtcaacacaaccatttaattgttgccagaacacactagcagaagtttctaaacttttgtaaaagcagtaaaatgtatttttccccaatatatgatcaacatataacttcaatatacaaaacagaaactgagttgtttggtataggtaggggtagaaggtgagccttgcccgctcagttgtctctttgtctgctccatggcccctgaaactcctcaaaagggctgtagggttccagagaacagagattgaaaactgctggcctattagaagggagtaaaatcggctaaggaagcattatgtcctttctaattgctttatttatttattttgagtttttaaacttaaacctccttttttcttattggtaaaccaggcagcctttgccttagggatgctgtcaagatacatttgaagaataatgagcatctagagagtcttgggcttgctcgtgtcatatacatgctaaatagtgtttagttcttaaaatcccagcctaaggtgttcaaagctgtattgtgtctttgtatttccgtgaatttttaagacaataatggatctatttgttaaattttagaaagttgtcagagctgtcagactacagatgtaaagtctagctttattcagataaatgttgaaatggcaacaagataattgcttggtggttaaatgacttccattcttgaaagccaaacatgatttaagaacagtaaaatgcttcccacaaaaacaaaagccagctagaaatggtatggatttggggtctgaattgaatgaaaattcatctttgtcacttactagctgcatggccacacttagcatttctgaacctggcttctttataataatacttgtctcataggttgttttgagaatgaaatgagaaaatagacctgaaaatcattaacacacagcaggctgtcagtaaactgtaattcctatctttgtctcctttcccacttccttcatgtttaatctctgtgattctaagagagaagtagacattttcaagccatcttactaaggtaatcagaataagaaaaaactgaaaattgatgtcatcctacaattagcttttatttatcttaaaatgcatattgagtgtctcctacttggtagcccttaagccgaattggagctaccttagctcttcaccttaaagggaccttagtctaaagacatagagatggacttattataaaacaatctggtaagtgttaaaattgagatataaacattttttgcattctaaaatattcccggaggtgttctttttttttttttttaagtgatactttgaggtcagtatgtaatcccttgagaattctgagtatcagatgcaataacttggaacttaggacaaaaatagtataatgaactggcgctctagagaatgaatatagatacttggattatgctgcaaagccctcttctgtcttcttcaatgacctgtaatttcaccttcttttctctgcatctgaaatttatatatctgaaacttctatactgtaatatcaaggtggggttattttgctgcatttggaaaatagagaagtaaagaaaagagcaatgaatcaaagtctttgatttttttgattgtatttcttactgtcttctaggctatttctaaaatacacttgctggtttttttttttcattgcctttatagcattgattcccaaactttgttctcttgcctggaagtgtgagggcttcccactcatgtcatgtccagcacttaactctaaatctttgttcaatgaacaaatggcagaaaataattcattaattagttcgtccatttatttgagtccttgaaatatatttgtgatctcttatccatagggtattaacaatagctaacatctcaaatgattttcactggaggaataattgaaataattgcaaatagttgatttgattagtagatttagtattaccaaagtaaattcaccttttcatcatgtaaagatcaccatgatctgcctgcctgctggtcctctcctgacttttctgctctgcctccatcctgggatgatgtaaaccaagccagctgtcataaatctctgagtttaatgctttactcagactctttagctgatttttcgtctcccaggcaatttaaggtccttgatcctcgttgttcagttataatatgtgagtccttgctgttttgttcccaagtcattttttaggctgagcttctaatctttgcaatagggaatcatttgagtatcccccttgccttcccaaatgcatggtatacacctaccctgaccaatctgtgctgcctaattctgttcacacagcccttcctgggtctgaatgaaatgcagatctattacttgagttgcatggtagttttgcattttctctccttcttgtcattctttttttttttgcatttttttaaaattatattttaagttctagggtacatgtgtacaacgtgcaggtttgatacataggtatacatgtgccatgttggtttgttgcacccatcaactcatcatttacattaggtatttctcctaatgatatccctccccgagccccccatcccacaacaggccccggtgtgtgatgttccccgtcctgtgtccaggtgatatcattgttcagttcccacctatgagtgagagcatgcggtgtttggctttctgtccttgtgatagtttgccaagaatgatggtttccagcttcatccatgtccctgcaaaggacgtgaactcatccttttttatggctgcatagtattccgtggtgtatatgtgccacattttcttaatccagtctatcattgatggacatttgggttggttccaagtttttgctattgcaaatagtgccacaataaacatacatgagcatgtgtctttatagtagcatgatttataatcctttaggtgtatacccagtaatgggattgctggaatggtatttctaattctagatccttaaggaattgccacactgtcttccacaatggttgaactaatttacactcccaccaacaatgtaaaagcattcctatttctccacatcctctccagcatctgttgtttcctgccattctaactggcgtgagatggtatctcattgtggttttgatttgcatttctctgatgaccagtgatgatgagcattttttcatgtgtctgttggctgcctagatgtcttcttttgagaagtgtctgttcatatcctttgcccactttttgatggggttgtttttttcttgtaaatttgtttgaattctttctagattctggttattagccctttgtcagatgggtagattgcaaaatttttctcccattctgtagatttcctgttcactctgatggtagtttcttttgccgtgcagaacctctttagtttaattacatcccatttgtctattttggtttttgttgccattgcttttggtgttttaatcatgaagtccttgcccatgcctttgtcctgaatagtattgcctaggttttcttctagggtttttatggttttaggtctaacatttcaatctttaatccatcttgaattaatttttgtataaggtgtaaggaagggatccagtttcagctttctacatatgactagccagttttcccagcaccatttattaaatagggaatcctttctgcgtttcttgtttttgtcaggtttgtcaaagatcagatggttgtagatgtgtggtgttatttctgaggactctgttccgttccattggtctatattttggttttggtaccagtaccatgctgttttggtacttgtagtatagtttgaagtcaggtagcatgatgccttcagttttgtttttttttgcttaggattgtcttggcaatgtgggctcttttttggttccatatgaactttaaagtagttttttccaattctgtgaagaaagtcattggcagcttgatggggattgcattaaatctataaattaccttgggcagtatggccattttcatgatattgactcttcctatccatgagcatggaatattcttccatttgtttgtgtcctcttttacttcattgagcagtggtttgtagttctccttgaagaggtccttcacatcccttgtaagttgtattcctaggtattttattctctttgtagcaattgtgaatgggagttcagtcacgatttggctctctgtttgtctgttaatggtgtataggaatgcttgtgatttttgcacattgattttgtatcctgaggctttgctgaagttgcttatcagcttaaggagattttgggctgagatgatggggttttctaaatatacagtcatgtcatctgcaaacagggacaatgtgacttcctcatttcctaattgaatatcctttatttctttctcctgcctgattgccctggccagaacttccaatacaatgttgaataggagtggtgagagagggcatccttgtcttgtgctggttttcaaaggaaatgcttccagtttttgcccattcagtatgatattggctgtgggtttgtcataaatagctcttattattttgagatacattccatcaatacctaatttattgagagtttttagcatgaagggctgttgaattttgttgaaggccttttctgcatttattgagataatcatgtgttttttgtcgttgattctgtttatgtgatggattaagtttattgttttgcatatgttgaaccagccttgcctcccatccttcctgtcattcttaatggacttctcagagtatttgactctctttctcatttaatgaacctaacagcaatattctaccaggcagataattatcaaacatttttctatttaggagaagaagtctaaggaaggtgatgggattcattcacaaatgaccctgtttggatgaacagcatctttgtgatgttcgtgcccatggatagaaaggcctcactcccactctgactggacagtgagctctgagagcagggccatgcctgggctctccagtacttcagccccggttcctagctcagctcagtgtctgcccgtggtaggcactgaatatacttattgattaaaatttattttaaaaattggttagtgttggaagttgagagttgcttttttcttcttagagaatcaatgtaagtttgaatcaaagattttattttgtttctaaaacttaccttgtagttatagctgataatatcagaaacagtgatgaaatatggatgaagtgcacatactttttatgcctgtggagtgtttatatggtctacagtcttcttactgaccacgggttcagctggacattctctcacagcagactttctaatctctgctgaagatactgagaggctggcaagtgataaggttggcttagtatcacctattgtctaacagattgccatgactgactgatttccctgagctcaagtggcagtagccccatgacttccagacagtgattctgatgggaaagaaagagctctcttcctttcccaagttagctgctccttctagaatcaaatcccttgggcttttcatgaagagtaggaattctcaacttcagcaccaattaatattctaggctggatcactctgtggtaggggctgtcctgtgcattgtaggatgtatagcggcatccctggcctctactcactgaataccactttcactgtccccctctccccagtaatgacaataaatatatctccaaacaatgtcaaatatggtctgggagacaaaactggtcccagttgagaaccacggacatagagggcattgttgaactgattgtgccagtgccagaaagtaatattgatagaagatgacctgatattttctatccttgggaaaagcctaaggggatacatacatatatcaagagtttctccttagtatgagccagtcacctagacatgaacctcagtgtccttgttccccctttatctcacaccccgtcctaaaccatttctcataacaaccattccaacttgtaaatatctcttctgccttctcatattgataagaccaaaatactcactttaagctcccagagtctagctagaatcgacaaatcagcatttgttgtgggtctgccatgtgtcagtcaccctgctaatatgcacattgatgtaatcctcttcgccaccctgagagagaagtttgctattcctgtctcaccagtgaggaaacagaagcacatatttacacagctaagtggcagagttcagaatagcgagcaggtcctctgacttggttaaacgatacttttatcttattgttcaaatatcatcaacatcgacttgaaatttaatttaatcactgtctgcttgaaaatttaatcacattacttgaaaccatggaatcctggcttgtgaataagaatcatgttaggaaaaccatatgccaagtcccagaaccatagaatgttagaggaaaagggctctcagatatcgttacattgtgaccatcttcaggtcatcattctgtcatttaacaaatatgtgttgaaggcttacctgtgccagagcctctgtacatcagtcaagacagacaaggtccttgccctatggaacttacattgtaataaggtaaacatccaataaacaagtctaataaataaatgaacaaataagataattaaggattgtgttaagtgctggaaatgaaatgaacaatgagaggacaacaattatgggagggagatctttttacatccagtggtcagggaagttgtctttgatcttgacagctcccaaaacactggacatattagtcttcctcaaaaagtgttagttcctctccataagcacctagcacagtacctggcacaatgtaggtgctacaacccttggctgtatgaaaagaccatggttttttttctttgtagccttataggtctaaaatcctataatatattgttttagtttccttttggtgctatagcaaatgactacaagcttagtggcctcaaacaatatgtttattatcttatacttctggaggtcagaagtcccaaaatcaagactctcctctctggaggctccaggggagaatctgcttttttgtcttttctgtcttctaaaagccacccgcgtttcttggctcgtggccgcatcctgtatcctcaaagccagcagcatagcatcttccaatctttctctctgattctggccttcttgcctccctcttcttaagacccttgtaattacatcaggcctacctatatactctaagacaatgtccccattttaagatcctttgtttcacacatctataaaatcctttcggtgataaaaaggtaagatattaacacgttctaggaatcagatcacctttgggggggtcataattcaccctctcgtagttagcaataaatgttaactttattcctatgcccattatattttacagatgaaaaacttggaaagctaaaagtgttgcctaaaatcacatgcttggatatagctttatacctggtcatctcatctacgtagatcatctctattctctctatatccaaactctgctcttttcattagagaattcaccacaagttacgtgtctttgttttcttcagttattgccacaagggcaggaagccaggtcacttttattcaccaaggtgcaatcatcacacagctctatgcctgacacacaatgtgcacatctctaaaatgtttttgaatgaaagaatgaatactgtattacgtgcttgggtaagaagaacccaatccctcatgaattattttgtgcagtggcttctgacaggttataaaccctcagccatttttaaagcatcaaaagaaaaagtgaactgcaatgctggcccataattgaagtggataaaacagaagggactcaacccatatctttcctctgctggtgatgaacttaaatttctggcgtgctgtaaggcactctgcatttgaacgtggtagcctgtacctagaaccgtgatatacagcactttatatattgacatgttattaacgtcaacagtcttttgagagagcttctgaatggctcacttcattatttcaattcaggataagaggaagaaaaaaggccaaaaatctaagtgcatgctttattgttgcattaggttttctctgttctgtcttagagaagtaacaaaggaggaaaaaaatcacagttcttactgaatagttcaagtggcacgtttatgggttcacttggcaagctatacgacacttaaatgaaaaaattaaatttaatttaaaagtataggtcatctccaacccttttccaacctagaagtcttaaatcaaagtaccttatgccaaacaactatgtgaaggaaagcgaaacaaatataacacctcctgctatcatggaagacaaattatatttacattacggatgtactttgctttttattttccttaatcttgcctaatgaatacactgtttggtcaaacatgttttatgtctgacatacttttcttttaggaaataatatgcttgtcactcaaggagttaatgaaatgatgagaaaatatgaacccaaagggagatgttttctcttttagcattgctttcaagatcccagatttttacccaccttataatgtatttactttggttctagtggccaaggatgtcaatattctttttgatgaattagaagctgtcagcagtccttgcaaagatgacgattctcttcttcaccctggaaacctgactagtacttcagatgatgccagcagattggaagccgggggagaggtaagagtatatgatttcttacaaatgtaattcgtgatccaggcaggaacctgtgaagcatgttccaatggactgtttaaagtcataatctcattgaactgtaggctcttgtaaaacaagggacaggttttatattcctttgacatcccccatgtctaagcatatttcaaggatcctaaatctacctatacacaaaacaaagtttcagtttttcttaaacctatcatttttttaaactgtccgtcattttaagatagcctacattcttgagtgtctcccactggtacaaaataaactttacagggatgggcttccttgtatagatcccccagtgggtagaatagtgacctaaaatgcaccagccttcagttgattgtgttgtctgaagtctctctgagtttccatttgcctctgtaatctggaaacttcattgcaactgtaaatagacctatctatttgtgtgccattttggaaaaattagtattttttttggaggcattcccctttgttcaggttgtgtctcaatagagtttaatatttcctttgtacatgtactgggtacaggtaataggcacaccgaatcagagtaatttatttattgcatattcctaaggtttttatattccagagctagttaactgctaaaaggatgacacctggaacagagaaaattgtttactcttgccaagctttgcagacttcaccccacaaacaccatatgcagctatccaagtttctttttctgttttttttttttctgtttgtttcattaaaaaaaaacactcattctgttattatctgtttacacagatactttggaaaccataatgtggcgtaaagaatggactttgaaagggacctcagacagcaacttgtctcatccctgtaacttacagatgaggaaacagtatcagaaatattagggctttgccaaaggtggcacagctcattgttctgcttggagccaatacccctcctaatgtcttggctgaagccatttttgaaggcagatgctaatatgctgaattcacaggacagccttcttgcttggcaaataagtgttaactaaagtgcttattcaggtagactcctgagtgtctcttaatgtaaaatccaaaacatagtgaggattggtcatcaattgaaaatgtctacatcaagacatggtacatggtcattccatttccccagctgagatgtttttttcgattaaggtttgtgcaagaatgtggtttctagcaatggcccttcaggtctggcatgtttaccttcttcataccaccattggaaaagatagaatccacccatccacttggctgggtttatagacacaattttgaaatctattaggctgagaaatttggctccagcccagtgagcccatacttgatggtctctttcaatgttgtacagcaagcccgaagagcctggatgaaaattcaatccactccttttgttctttactttttaatattactgcaaaataatatttgtaacttctatgtaagttacaaagtatgataataaaatgaacacctggaaccaccatctgatttatgaaccagaatgctatttttcaaattatagtgacaaactaattgtagattactaactccagtttttttttaatggaatggaaaattaatattggagtgtatgaaaacagaaagggtaaacaattgttttgtgaaacttgtctcatattttgtatatgtatgtttacatatatgcacacaaaggtaaaatgtttttcttgttgtgggtaaaaaaaaaaaagagaaacactgaactagaatattcctaaaaccacggaagctactttcaatcccatacctctaccctaccagaggtatcatctttctaaattttattgtgttttattctcttgctctaaagacagttttaccacatagattcgtagtcttaacaacttatatttagatttactttattttatgctttgtaaaaaatggtatcatgtggtatgaagtcttctgagacttgctttttttatcagtgttgtctttaagattcatttttattgttagatgcaactatagtttatgcattttcactgctgtataatattccagtgaatgaactgtctataatttatttatctatttattgtctgttcatggacatttgagttgactccaactttaaacatttttctactattataagtaatgttgccatgaatattcatatacatgtctcctacttgccttatcaagaattttttctctaggcttacatgttatgcacatattcagttttgcaagataatgttaatgtgttttccagagtgagcatatcaattttcactctcatctcacctgcaggatatgaaaatccttagttgcatcacattcttggctacacacggtatttttagatgttttacattttgcgcacttaactcaatgcttcttccaatttttattttgtttcctcttgattacatttttcactaatgaatatgtaattgaacacaatgaaaaaaattattattattattattattattattattattattattttgagatggagtctcactctgttgcccaggctgaagtgcagtggcgcgatctgggctcactgcaacctccacctcccaggttcaagcaattcccctgcctcagcctccagagtagctggaactacaggcacacgccaccatgcccagctaatttttgtatttttaatagagacaaggtttcaccatattggccaggctggtctcgaactcctgacctcgtgatccacccgcctcggcctcccaaagtgctgggattacaggcatgagccaccgcacccgaactgaaaaaagttatttagttttaattgttctttaacattactcacttgaacctcaatttgatgaatgacttaaactggtccctttctctttgtgtgcagacagtgccagaaagaaacaaatcaaatggactttactttcgagatggaaagtgtcgaattgactacatccttgtgtacagaaaatccaacccccagactgaaaagagagaagtatttgaaagaaacattagagcagaaggattgcaaatggagaaagaggtaaatagtttgcttggatgagaaaaaaatatatacatatctattcatatgaagaggcaataagaaataagcaagcagtcttaatgttaaccaaacatttcatttggtcagagttttccagtcttcagagtttggggaatgttccaatatttagactttgacagcacagtttgcttttgagataattttaatgccaaatgattccatgaaaatcaaaatattctattccaattaaatggattgtttcaaagtgtgattccttatctaacttcctacgtctgccatttctctgtatatgtaaatggagggttctgttcgcgtggattaaagaaaactttgagtgaaatccagtcactctctctagaggctctttttacatttcaggaaatatcatgagcttgggcatcctcgtacaccagaggagactgcctggccaatttggccaaaagcagctggaacttacaaaaaagattccagttttaagagacattcaggctatttttttcaggtccccaagctcaagagtgccttaccagtgtttggttcttccccttccttccttctctgcatggggagcttcaaggcagaactaagtaaggaatgtacaagaggccagccaggcctctgatagtaatccatgatgggcttatggtgttctcaggaatactgtgcacatttgtagaacttggcccgttaactgaattatgtaactcttctcggcttctccctaaacattgtgcaaagcttctggagcttttcatagtcaataagaacaacacattggtaatttaagatacttctgattctgttcctcaaggctgaggggatagatctttgaagtcagacatccaggtttttctttgtatgatacagttgcagttcgtacaacctgcgagttgtgccaaggtatcaaatattagaagcataatatgcatatacttgttatctgatcttgggacacttcagataaatgggatttttttcagatctgttaggctgacctcagctcttgaatgtttataacacggaagcagcatttttctggaatgtctccaagagaattggaaaaatggtgagatgaatgtggctgtaaggaaacaggttcttattctcaggaaagaagaaccagctttctcaaagaccatcttaattagaggttccctggtacaacaaacagaattaaaaatgttgtttcttccacctttgtggagttccagaaaatctttcctatacaaactgagtgtatagttgataaatcttactctttaagttctaaattgtctcagacaattgcatttttttcttaacattaatagcacattcatatttttctccttaatcatgccttcttcttttattctcattcctaagtggcagaatttttatatgaagaaataaaagatctgaattgctacttaatctaaaataatggaagtcctccctctgacccattctgactctgtcaaaattctgattcccatcaaaactagatagctttgttcaattaatgcaagatttatattttaagcttcataagtattctctacaggcctagggcttcttctgtatagatcttttcaatgttatttcgtgatttattcgttagaacttaaaaagcctaatgcttttccaaatagcgcacattaaagtgatggaaagtgtcctgttgtgtatcctaaagcatcacctgtactgcagtgtttagctaccagaatttgaggaggatcatgctgcctgttgtacagttgtgctgcacagtacagtgtggagcatgctgtgaagaatggactgcttgtacgattttgtctatatacaagatagttttgtttgttggaatttaaaaaaaaaattttaacaggtatttattttaatgtgtactggaaaaaatagcaattggaaaaagggaattatcactatatggcaaaacatcataaaaacttatctaagcatttcccccctccccactttcccccaaaagttcttctctgggcatcaccttccatatttctcctttcctccacaatcttttagacactacaaacagttaggtcttcccctttctggaaccttcttcacaagtgacctctcccgctgcctggctcgagtcttgccctgactttgcataaatggtgcaatttctctctaatgcagcctcccagctctgctttgcatcttcgtggactcagtcagctcagcaagaaaagggcctttgcaggttctcttatagataaattaatttttccctgccataaataattaaaagaaaatatcccttggctgaacagtaaacaaaccttcatcctttattctcataataagtggcagaatttttatatgaagtatctacattgtattattaaatttagaaaccgttggaagtatttttatttaaatcaagttttttataagcagctacagcagaaagacaattttaatggcgatttcagcttccaggagttaattcaaccttttataggacataaaatgaagaacttagttcagggtggaaaagaagaaacaccctagggacccttgtatatctgaaacgtttgacactatgcacattttatgaattattagtatcttcttaattagctgttgtcatgatgtctaacaattatgaaaaacatgtttcacagacagatgcttatgtttccaaatagacaaagacaggctttctagttcagtttaacatccttatctctttaacattgaatttcaagaaacacaactaggataatctttaattcatgataaaagtgaggacatagtcaagtttaatctttcttaaaacctttgctccaggctgattagtcaacacataagtgcttgctttggtaccctgggtctttaatattctgcaattcaactttcataatagcccagagaaagcaattcacaacaaagttcccaaacaaaatatcattgaagtccaggtgatttacttcttagtatctatccacttaaagtgattcccttcttaaaggtaagctcatatttactaattaacattttctatttctgattttttcatttttaattctatgtccattattgatctttggatacctattttgaaatcattgtcctcaataagacatttatcttttcttttgtataactagtaagaggatgagttaactttgaattatttggaatgtgtgagtaacagttgtactaatggagcaccctcccgcttcagaatcatgtgaaacattggggaagacctttatcattacagtccttacaaaactaatataattaggtaaatcatatcatcttgatgatggttatttcattcaaaaaatatttattgcacactcactctatgccaggcattgctttaaggactaggatctcagcagcaacaaataaaacagaaaaaaaaatccctgctttgttggaacttaaacaaaaaatatgtacaacatatacaaatatcagtaagtgctaaagagaaaaaagtaaagcaggaagtgttgagaggggcttgcaattttataaaagtcagcaagagtgggcctcttttccacagaaagagaatagcaagtgcaaagagaacagctccacaggatggagcatgcctggtgtgttcatggaacagtgaggatgccagtatgactggagttcactgagcaaggtgaagaatagtgagaaattacaccaacaaggcagtggaagccttagtgatcactgggggatgttagcttttctctgagtgacataggaagccactggagagatttgagcagaaatataagatctgttttctgttttaataagggcattcgggttgcctggtaagattagactgtgaggggtggaggtggcaagggcagaagcagggagaataattaggagattcgttgcaagaatccaggaaagagatgatggtagcttggtcaagcacatagaagagaggaagatgagaagagtagaaagtagcactgatgggaattgcagacagattgaatgggcagtgtaaaaaagaagagtcacagactatttgtctgacacatggtatttatctaagcagttgggagaagacagttgccacttacagggatgcggaaaagagtaggtcaaattgtagacttgttaagattgagatatcccaatggagatgttgggtaagatagaagagtctgggattcaaggagagatctggactagagatacacatttgaatgagatctccaaaggagtaactgcaaataaaaatgagaagaggtccaaggattgagccatggggaacactagtgttacaatttggatgataaaaaggaggcagcagaagagactaagaaggagtcaccaaggagctagaaggaaaatctagagtgtgtggttcaggagagatggaggaatcaactgtgtcaaatgctgctgatggggtgtgtacgatcaaagctgaaagttaattattggatttagcaatatggcaggtttgggtggtctgggcaagagaagtttcagtggagaagtcaggggtgaaagcttcattaaagtgtcttcaagaaagaatgggaagagaaaatacagagacaacgaatacaaacagttctttcaatatgtttcactgtaaaggaatggagagaaatagaatgataactggagtatgaagtttggtcaataaagagttctttctattttagatgggagaaataaatacatgtttttatgctaatacaaactatatatttgagatggaaaattgatgttgggaaagagtggaggaagaatttttagagaaatgtccttgaagcaataagaaaagaatgaccacaagtatctcccattgcatggactcacctatctgcctctgtgcccacaaatgccacccttccccagtgctaagggtgtcctgtccatactcattggtaaggccaacccttcactttgcttctaagaccccataccttctcagtcccactcaaatacattgcttccaaaagagataaaatgtagtacgctttaaaaactgaaatgcacaaacaatacaatttgtggaagtagtttgtttctgtttgcactcatctctcagaaggagtgaaaaatccaactgcagtaaacacacacacacatgcatgagcacatgtgggtgcacagtcgaggttgaatatcttggatacttctgtgtaatatgatacaaattacattatcaaaatttttatgctcacatttattaatcacttactattataatttccatttaacagatgagaccattggtaacttgccccagacaacataagtagtaagagataaagccattattaaaacctaagcatacttgctctttgcccttatattgtgttgatttctggtatctaaaggtgaatttcagggttaaagaagttaggagaggcagggcatggtggctcatgcctataatcccagcactttgggaggccaaggcgggcggatcacgaggtcaggagattgagaccatcctggctaacatggtgaaaccctgtctttactaaaaatacaacaacaacaaaaaaaattagccggctgtggtggcggacgcctgtagtcccagctactcgggaggctgagctgagatcatgccactgcactgcagcctgggtgacagagcaagacttcgtctcaaaaaaaaaaaaaaaaaaaaaaaaaaaagttaggagacaggctgagaagacaagtagtgttatgaaaaggaaaaggtaaaggaacaaggaaaattgggatgaataatgaagttgggtgctgcccagactgtggttcttatgcctctagtagccatagacttgaatcttggtacataaccacttacaagctgagtggtcatgggcaatttatcagatttttatggatctctgtttccattgttaatcctgaaggtgatataatttatcgtaaatgatgaagattaagtggacctatatatagtgccaatctttgtttttcctaatttttacttttaaatttcatattattgttttacttccagtgtaagttgttcagctaccttctatttatggcaagtgatatttgttttccctttatgactgatataaaagctttttgtaaaatgattatttaaaaaagggagttatttaaagaaatatacaaaattaagatattgtagatggtattacaaatttgacaaaaattgtgaaggtggcccgcgaatgatagcattctgtgttacttagctagtccttgtggtggacagactctaaagtctgtgatgcctgcttccttttcacaccttcccttccccctgagttcaggtgggacctgtggcttatatttaaccaatagaatatggcttttgctatcatagaatatgacaaatttaatgggatgtcactcctgtgattatcttatatggtgtataagatctcatctcagcagactggcgtcagagagaccctccttgctggctttgaagaagtaagctaccatattgtgagacagcctatgaagagggccacctagcaaagaaaggtggggtggcctctaggagctggcatccagctgacgtccagcaacaagcagggatcttagtcctacaaccacaaggagatgaattctgccaataactgagaatcctggaagcaggtctttcttcagttgagccactgatgagactacagccccaggcaagacctacatcatagcctggtgagaccctaaagcagagaacccagctcagctgtgcctgacttccaccctctagaaactgtgagataattaatatgtgtagttgtaagcctccaagcctatagtaatttattatgcaacaatagataattaatacagtgattaaaagtctgggatcacacattctgagtgttcatttggttctaccattacaagctgtgtgcccttgtaaaagttaacttatctgcaaaatgaggctaataatgggatttatctcatgggttattttaattaagtgagatcatttatatcgagtgcttatctctgtgccttttatatggtaagcatttagtaaacttcattattatcatcattactgttatcataacggctaaatacaacgtgttaacacttttattttggaatagttttcaaggtaaactttaagaaaaattttcatccagtttacaaattctttataacgcaaccattaggaatagcaacatcagtgggtcatatattgttactgtgtatgcattaatgagatttataatttaatgctcttggaagaactcggaatacatttggtaacaagtttagcatgatcaaggttcagatgtttatctgcttggagaggatttggttttagattcatctgggtataaagttatagatcaattcagagctaaacaacaatagtaacaacaacaacaaaaactgtatttgattgtccatcccagtgtttctttacccccattcaaaggaaatcttcacaaagatttccccacttaaagagctaatctcatgcagatggctctgttcccttgtagacttcctgcccaaattaccctaatttcatccccatttatatactgcagccacatccagcttgttgctgtagatgctctctcagcatccagaactccgaggatacaagaacgacaacatcctcccttccttcacagttgaaaacatgatgatgagtgtctcaaataaatgagtgtcaggactatgtgcactacccagatttctgtcctctagggctttctggtcagaaaagaaaaaaaaagaaaaagaaaatcagacttttctccacccaataatctccactttactccactcaatcttcttatatgtcacacacttgtattaccaagggtctcaagttaaggtgacaagaaaggagaatttaggacagtcataaccaaagaaggaagaaagcagattttcttctgaacctcagagccctggcgattccttgagtgtctttcaggagctaccaatgtcagtccacacttgtggtggcttttctgttaacttgagtcttaggctggatttccaaagcataagcagaacttgaggtgagaattcttcctcaagttgttgatgggtggggcaatctcaggagaaaggggcatgagaggagcagaagagaacagctaagccaaaagcatggcctcagctggacactaccttcagcctgatcccacaggggaactcggtaatcagcaggtgcagcacagagctggtctacttttcagacacgggcccccacgtcagtcagtcattggctgaggtctgtgaaggtggtgagaggtaggcactgtccgtttggctgaggatcattctgggtaccagcagcatacattaccactggtattgaattagtagtagagatgctgccaaatctgtggtattcagacagcactttttgagatgccagcaaacatgaaattcatgggggtccttgaccaagtgaagagagaacaagtacacattggaatttcttctgttttaatttgtcaagttgttcttctaattttaggatgctatttctcaaaggtaaagattccatgttgctagtgtaatcactttgagggaggacatacatgtggccaacaagcatattaaaagctcaatatcactaatcattagagaaatgtaaattaaaaccacaatgagataccatctcacaccagtcagaatggctattattaatactaaaaagtcaaaaaataacagatgttggcaaagttgtggagaaaagggaatgtttagacactgctggtgggagtgtcagttcaatcactgtggaaagcagtgtggagattcttcaaagagctaaaaacagaactaccattcaacccagcaatcccattactgtgtatatacccaaaggaatataagtcattctaccatatagacacatacacatgtatgttcgctgcagcactgttcacaatagcaaagacatgtaatccacctaaatgctcatcaatggcagattggataaagaaaacatagtacttacacatcatagaatactatgcagctattaaaaagaacaagatcatgttctttgtagggacatggatggagctggaggccattatccttagcaaactaatgcaggaacagaaaaccaaatactgcatgtttttacttataaatgggagctgaacgatgagaacacatggacatatgtctcttcttttttgagagagagactttgtcttactggtttttgcattccaaagacttattacagtgcttagcttgtggaatcctgagtttgctacaaaagattgtggatagctgattttcacagctgagtctgggtaacaacagtcaattcatctccagggtttttcaacatagaccctattggcatttagggctggataattctttgttgtagagggctattctgtgctttacaggatatttggcagcatctctagcctctacccactagatgccagtagcacctccttcaagtaatgacaaccaaatatatctccaagcattgtcacatgtcctggtgtggggggagggaggaatcatccctagctgagaatccctgggtttgacccttgatccaatattatatggtttgttgtagtgtctagggggtagcgcttccattcttttatccatggtcaaccaacttatttcagcactcttaacatcagactcttgaatcagaaaagaggcctatgtatttgaggggaagaatagagtatgtgaagactggctctcaagccagacagctgggatttagatccacttactacttcaccacttactaagtgaataactgtgtaaagcttttaatctctctgtgccttagtttctttgtttgttaagtgccagataattcctatctcaagggctattatgaggataaaatgagttaataaattacaatatgcttaggaaagagtctggacatattgacagctttaacgcatggctgttgttggcattgatggtactgataaagaagggagtgatttcaaccactggtcatcctgttcctgaagctcaagcattcaatcctgtcacctcttgggctgagagtccttgtgtgtctggggaaagctgaggggacctggtagatggcaagagatataacgataagtcccacctcatcaccaggactcagtccacctaccactgccccatatcagtctgtagaatcagggctgtattcttactggttcatcttgttagggcagttttatcaaattgatgatggtttgagagaaggtgttctccctcctttccctccctcccttagtcttactctaatttctgagaccggtttaaagatctaagggcctcattattgcctcaactgcttttgcttatttaggtagacaaagtttaatcaaaacatttctgttgccaggtcaagatgacctgtacaaagttatcttgatttattcaaaggattattccaaatcaacacgtatttcatataactcacgcatattacttcagtcaagacagaccaactttaagggaaaaaaatacccattatacaaggcacagctgaaaaactcaagtcattttatgaactattgtcatcccacaaaaagaaacttatttaatctaaaagatttctcagcagtctaaatttaacttctctgatataaagcacgttttgcataatcatcattatgtgccacatgtgggcattgtattatatttatgaaaggaattgaagtcctttgtgatacttttgctcctgctgtttttgctatgttatgataaattgctgaaaattatgcaaagtatatatcatgaatatgacactaattattcattaatggcatggagagatttaaaagctttgaagcagcctggagaactgtaaatccatttacaatctccagcttgtaacccttacaagtgaaaaatttgaaaaagatgaagtgtaagctgagtattattaattgaacttgacataccttagttgcaaaaatgatgatgcagcactgcctcttgaggcaagggccctggcttagctcacttcctgttgtatcttaggcatattttaagagcagtctgtggtatctaataactccatttccagatgaagtaattcattcattcattcatcaaatgtctgatgaatatctactactattgaaggaagggaggcattaaataaatatatcagatgtaataggtattgtggagaaatatacaggaatactgggaaggagtcactatttcatttcaggagttcaagaaaaatctctatgataatgggtgaactaagcacaaagagaaattggaatttgcatgtctaaacccaactctctaaagcattgcagaattttcccactgctgggtttcctttgttttgtgcattcctatgcaggctggcatgggtgtaggaagagtaagtggagtaactgaatgggggggtatggtagcagggggaatagctggatttggctgtgggatagaggtaaactctggtgtttgcatctaaatgaacagggaaaaaagtcaagtgcacgagcagtgttgggattttggagaggcccgacctagttgcaaacacctccctaacttgtccttttccattaatcagttgaactctcattctgggtgctacctcttcacttttgcctacccagaaacccaaagtttcttctttaaaattcttccctagtacttataattgcctagcccctctttcattcagggttgtgcgggaaagccactctgtgtcctccaggaatgaagtgttcaataaataattttacagcactgtaagaccacttaaaaggttgggcatgaaggtcagggaatccacctcccatcacttcagcctgaagcaccacagcagcaggtcacaggtgccggcgtggaagccactgggatctcactaatgcccttctgcagcacatgattctcaaaacttacctggagctgcttcaaacctcaaatctgcctgtaactacctgcctgagaaacagcctctcctttcccaccttccatctgagcacccatcattgtacactttaacccagaactttatggagaaggggattctgggaaaccagaaccaagttctggtcgcagcttctcagcaatgcagaggactcagaaggaggtgctaaggtgacaacaaacaatatagtgcagccaccagccctcctaacaggttgttccctgtcccttcatttgaggctatgctagccccatctctgtaatacccagatggtttaaaagttgtaaggtctgaaatctaacacctgcctttgagacagaggagcagctatttctgttttttaacatgggcatggctgagtaaatcacccagtcagagttcctcccagaaacccacatctttgttctgatgctaacgttaggcaactgtcttttttcaaagcatagcagaattcactgggacccaatatttaattggatagtcagcagcagccacaagcctgcctatggaaatgtccttgtgtttgtgatgcaggggagggaaaagaaacaaggaaagacaagctaaaaattccttccaccataactgcccacagaggaattaaagaaggttccctttgtcgtgtccagcccctgcagtgagagtatcaatcctcatgcacacgtgtattgagcgtctattatgttccaggcattgtgccaggcactggagaataaaaaataaatgttctagttatctattattgtataacaaacaactccaaaacttgtatgttaaaataatagtcattctttttgctctcaaatctgcaattgagcaggacttggtagggacagcttccgtctgctccataggacatcagtcggagcagcactactagtgtctggaggaccccccttttaaggtggctgactcacatggctggaatgttggtgttggctgtcagctgaaagctcagtcagggttgtgggctgtgggcctcttcacaggctgcctaggctttctcatgacatcgtggctgggttctaggagaacaaggtaaaagtgaacttttacgacctagccctagaagcatttattctgctgtactccactgggaaaggcagaatgaaggggaagggacatagattccacctcttgatggagagtcataaggttctagaagatgtgtgggatgaacagtaatgttggggccatctttggaaaatataagctgccacaatatgctcagcgtatttgaggagctcactaactagcaatgaaggcagatgtgaaacggatagaatacagtttgaaaagttctatggaagccctggggaatttcatactctgcagagatttcaggaaggttaagagaggtgacctgggacttaaaggatgattagatattcaccaagtcagaaagtagaagggcatggcattccagatgggaaacaacataaacgatggcatgatagactttgaattgaggccttagggctcctctgtgcacctctgcttcccagacagagtgtgaatcccatgaggactgcacggatttctccctagtccacagtgcctggctcatcatgtcatcttgactttcacattatatatgctcgcttagcaatttcccatgaacataattgacatcagatacaattgttctagaccttaatgacagagctagaaagatgtgcattttatagtaatttttttccaaaatgttgcaaccaaatatcatttagcctctttacaaccaaatccatcacactgtacttatatttaaataagaatcatctcaatgccaatttctttcaggccaaggattttactaaacaaactgtaccagccattacctacaaacttagccaagatcatgatggtcttcgaagaaggtggtgttactgctcactagagtactttgtttttcagctccattcttctttctctctgttttctacacatgttgaaattaaaaagagttttctagaagaccaggagtagagcaggcagaaaaatgaaactatactacacatgattttccttgaccttagcagtccagcaggcaggaaagaaaagtacatgtggtgagaccttgtgcccattagagtttcagaagtgcattatgtcgcctcttggggactctcttcctcctcagtctgtaggttcctttcttcagccagaatattcttttggattgtgtagcagtaaatcactttggcattcatctgaggctgccttgattcagtttctcagactctaataagaatcttctgaaatctagtcttttatcagtgactcatggataacatcatatagttataaaagggtaacctgttacaggcgttcgctgttcgctgttgcttctgattgttcaaggggatctcccccaactgcacgtatctgtagaaactccagtcaagtgaaaaactgttagtcttgattccttatgtcacataatgttttacttagttgacagaacacagttaagccatcaattaagtactgaattttagtttgtcatttcctttttttctctggtcccatttgtacatagcaaagctgtaccttaatgcctttttaaaattaactctttttaaggaaagggagttctaaataaactcttaaatacttggaactgaaactttctttgaatgatgtcttagtttattttgtgttgccacaacagaatacctgagatggggtaatttatgaagaaaatattatcatttagttcatggttctacaggctggaaaatacaggaagcacagcgccaacacttgctcggcctctggtgagggcttttgtgcttcgtcacatcatggcagaaggtcaaagtggaagtagacacatgcgaagagaggcaaaacctgggaggtgtcctggcttcataacaacctacttttgtgggactaatccattcctgcaggaacaggtgcagtctcaccagagtgagaccaagcaccaagctacccacaaaggcagcaccctcatgatccaaacacctctcacaaagccccacctctccacactaccacactgggggtgacatttcaacatgagttatggtggagacaaacaaaccatatccaaaccatggccagtgggtttaaattgtccaaaaatgtcattggggagtatattgactgtgataataagcctgctgttgaattatcccaaccattttttaatttattatttttatttcttctgacagagtctgctctgttgcccaggctggagtgcagtggcgcgatctcagctcactgcaaactccacctcccaggttcaagcgattctcacacctcagcctcctgagtagctgggattacaggcgtacaccgccaagcccggctactttcctgtactttccagcctgcagaactatgaactaaatgataatattttcttcataaattaccccatctcaggtattctgttgtggcaacacaaaataaactaagacatcatttttatatattttttttagtagagatggggtttcgccatgttggccaggctggtctcaaacccctggcttcaggtgatctgcccacttcagcctcccaaagtgacagaattacaggcatgagccatgcccagccacaaccatttttttaaatcattatttcatgtccctcattacttagctttgattctgtagttcatcatcatgaccactcacaagcacctgaattctctcactcctttattcctttgacttatttgccgggcaaagccccgaccatggttaaactgcatcttgttcatgcccacccctgagtgatttaatgttgctggaaaaaacatgctgactggttcactttacatcatgaccgcagtctcacacaggtaccagagaatgctcagtgagcctggtacttttgcttcgtcctctctataaaaatcaagtaactttcttcctccctcttttcccatttcactctctctctctttgcttctttctttcattgattcaattttaaaatttcaatcattaaaaaatcatatagtgcctggcacaattcaaggcacttgggatacatcagtgaacaaatcagagagcccctacccttgtgaaactcacattctagtgagggaaaccgtgaacaataaacataataaataagtaaataatacagtatgttagaaggtgataaatagagggccaggtgcagtggctcatgtttgtaatcccagcactttgggaggccaaggtggaaggattacttgagtcccaagttgaagactagcctggacaacatggtgaaaccttgtctctacaaaaaatgcaaaaaattagccaggtgtattggtgcatgcctgtagtccgagctacttgggaggctgaggcaggaggattacttgagactgggaggttgaggctgcagtgagccaagattgcgcccctgcgatccagcctgggcaacaagtgagaacctgtctcaaaaaaacaaacaaacaaacaaaaaagaaggtgataaatgacatggcacaagaaaaaccagagcagagtgtgggtatgagagcactaagggaaaaggatagtcattttaaatagggtgttgggtgggggctcactgaaggtgatgtttgaccaagatctcgaataggtgggggagttggcccactgttacttcacactgccctctctctgcccaatcaaccttctcacctgttttctctgcaccctcatccctctcaacccccctccacagacacacacacacagttctgctgataaccttgcctatactctgatagaaaatgaaaatgctcagacaggatcttctgtgactccccaccctcaaccttccctcccaccaccactctgtgtgtgctgtcgcgggagctctcctattattcgctgaatcccctctcacctcaccttctcaaggactttgctcctgtaattgtcttcctctatctctcctgcatcatcatttttcctctctactcagttgttacaaacatgctcccataactcacaagatgaaaaatctcttgacccctatactctcctctaatgaccactccgtttctcttctacacttcacagaaaacttcttgaaagatttgtctagtgtcctgtctccatctcctcacctaccattctgttttcaaacttctcagtttgggctttctccctcaccatttcacagaaaccccttttataaaggtggcctgtgatcaaatccagcagtcatgccgtctctgttatcttactggcctcaccagcagctttcctccacatggtgagtcattccttccttgagaaaaacatgcttctcttggctttggtgacatctcatgctttcctggattgcttccttcttcattggctctttctcaatcccctttgctcaccttctcttctgtttgatcttcaaatattagtcttttaagacttgatcctgggtccccttttcttctgtatctccatcttcctgtgacttttgtccagttccatagctttatatagcttctgcctgtcactcgaggctttgtcatctcagaggctttaggcagcagggtttagtttttgatctcaggatggcagaagtggaggaggaggaatgctctttgctgcgaccagggacccagataacagaagctgcatccagacacctgcctctggggcagggaaacacaaatcacacaccagacttcaaggctctgctcacagctcaatggctagagctcatgatatggctcctgcctacccaagtgggctaaggagctcagatttccctgtgcctgaaggagaggagaaccgatgccagggacacactagtgacccccacagaaaatgttttcaaatgtactttatatatacatgtacatacatattcacacacacgcacacacacacacacaccctataaagtaggtgagggtagttatatcagcattataccaatgaggaagtgatatgagttgaggtataacctatcagatttctctgttattaaaaatcataagagccccatttattgacagttttgtataacctttaggtaaaaacacttgatagactataccgctgtgtgccctgtaacatcctctaattttgatcagcatttcaccaagacataaatataacagactgaggagggatgtcataacccttcccaagtgcacatgtatacctatgtaacaaacctgcacattctgcacatgtatcctggaacttaaagtaaaataaaaaaaaaaaagacagatagtaaaaaaagaaagtatttccaaagttaaattgcttcctcactagcagaagacaccaaattcttctgtcttttctgggtcttgcttatttcatggctgttaatctctgcagcgtactaagggcatagcgattcatgggttactgattgggtcatagctgtgaatggctgtcagtgggttgatgttttgtgataataaaaagtatactgtgatgataaagttgtccccaagttcagtttatctcatataccatctagaagagtagggaaaacattatgatggtctgtaagaagtgaagggacgtttggaattttatagatcagaactgacattgcttacttctaaggagagatttagtactgggattacctacaaagggagtattttctctcccaatagatagtagaccaacctctgttcatactaattacattatttataattagggtcatcattgctttgctgaattttgagttccctgagatcttgaactatgtcttaaccttctttgtatcccgagggtccaattagggcctatgcactaggcaacacagtgcacagtagttaaatcatctttaggtgtttgctgaatgattttatgagtcattgtgttgtgaggcagataaaacatttgcttttcataatagatctaagaaggtgatggaagaaggttgtctatatcagggtgtattaattagcagtatcagatatactcccactgccggtggtcttgtggatagatgtagccatatgactacttctgttcaatgggctgggcacagaagtgttatgtatccttatgaggccctctgagctctgccttccctctggcagagtgacccatcagcatgaaccactaaatcactgcaacgagctgacctgcagtagacatgtagcatgaacaagaaataaactttatcatggcactagccgatagaaataatgtaatttaaaatattcgggagctacatataaaaggtaaaaataaacagatgaatttaataatagttttgcttatccaatagatctaagatatcatttaaacatatgatcaacatacgaattattgagatattttacattctttttttgtatatatgctaagtcttcaaaatctggtgtgtactttccacagtcagcacatctcaatttgaactagttatattttaagtgtttaatggccccagttgcctactgtactgccagtatagctctgctgtttgaagttactgatatttgggggttattagttgctgcaacataacttagcccatcctgactgctacactaaacattgattttccttggataccctgatgaagtaagtcttccagacttgacatggggatcaccagggttggtacaaagtgacaaagagtatgttgcatcaggggattcactttatggcaacatagagaacctctaatgaaatgtgtgaagatttgtgctcagcccctcagcactgaacatctcctaattgtggcctagaggagagtttactttagtttctcataaatttagccacattgaaacctctgtggtaagaggatgaatttttttctgcctgataatagtgttttaacaaggtaatcaataatgtgagaaagctactcgaagtctcgatcacaagatgttcataaattcatttaggaagcattccttctcaatgactgtgtgctcagtaacatgctgggtgctgggaatacaactgtggagaagtgtacagtctcacaaagacagcaatgaaatctataattagagtattcattagctggaatatgacctgcattagttttatatcgcggctgaagagattacttcaaacttcaaggcttcaagcaacctatgtttatgctcccacagtctctgtgggtcaggagtctgggtacagctcaactgtgtcctctaatcaggatccctccaaggccaccccagggtgtctgccaggttgcattcttttctgcagctcaaggtcctctcgcatagttattggcagaatttagttttccttgtggttgtaggtctgaggtcttcattttcttgttggccttcagccagatatagttctcagcttctagagacccctcagagaccctcacacaacacagtggcttatttcttcaaagcgagcaggagaatctctctgacctctaggctcttttttaaggactcatctaatgcattcggcccaatccacgctgcaatggaaggagcccagccatgaggctgttgcagtattcaagaagagagatgatggttgctcaaaggagggtggtggcagtagagatggagagaagtggatagattagagagaagtttaaaaggtagaatcaataagacttggtgatttgttggatatgacataaggaaaaaagaagttaaagatggctcctggacttgagctactaagaggatgattgtgccatttcctggtctggggacactgagaagaagagcaattttgccagtgaagcagatccattatagacattgatgtgtctgatctgccagtgagacaccaggtaccaggtgccacaatgaccactggctacactgatctggagctcagaagagaggtgtgggccaaagatatgagtcttggagatatcagctaataggtgacatctaaacccattacaagggatgagatcatctagggaggacaggtagaatgagactagagcctggatgaagtcctcagggacctccacttaaaggtctactaagggggagggagtggcaatttcacacacaccaatttcttgttgctgttactaatgtcactttcagggaatgaatattgtaatcatttaggaacatatagtacttcaagaggcttctctccaccaggacactgtgtgtgtgtgtctgtgtgtgtgtgtgtctgtgtgtgtgtgtgtatgtgttgcagagaggaaattgcatccgaatcagctgaagagcatttgtaaactacactcacaaattccaatgtgtccctaagggaaaagaataacagatgcaaaaaatttctttttagagacacgtgccctcattttttagagaaaactggagctcataaaagtacaagtcatttgcccagtgctacacagttggctagatgatagccccactgagaggagttaaaggagccctttaaccctcgaggaatgtacacttatccatcagtttcacaggctagattccagaaacatcaaggaattctagtgtcagctattgggggttacccaaatgtcccccaagcattcagtacctgtgagtggaagaaagaaattctcacttattgaaccagtactatacaaccatgacagctccagaatgatgctgcaaggcagatattattttcctcattttacaaatgaagaaactgaggcttatgaattgagtaatgtgcccacagatggcagaaccaagcttgaaatttgctcttactactggccttacattaatttttaggatgttaaagccaactgtatacattgtgcattgactgtaatatataattaagcattccttcaaaaaaaaattacagtggaattgagttcatgagcaaatacatagtgtgagcctctcagctttcttcttgtgaaacagcagttctgaagccagactgcattgatgagaaccaggctccattccttacttgagtaaacttagccaaggtaccagacttctttgtgctttagttcctcatttgcaataaattagaataataataataccggggttgctgtgaaaattgaatgatttaatgtatgcaaaagctttgaaacaccacctaacgtgtagtggcactatgtagctggtcccgtctctatcattactattcatttgcattcactatgattttttttaatccaagaggcttatctgagtttccaattagaaattaatatctcctcctagccccagaattttagagttttgctttgtcctcttaacagtatagttatgagaaagtgatgcccagatagttacctaaggggatacagagcagatgcaagtggctaacctgatttgatccttcacgctcagtaaattgaaacgtcaagcatatttatgcctcagggcctttgtcttctactcttctcactgactggaatgctctctccctgtgtaatagaacagcctccctgagtaatttcttcaggtctctgttcaaatgtaaccttatcaaaaggcttgtccacaccactctatctaaaatagcatctccttcccaccattactttctattttcttactctatttttcttcaaagcacatcatcagaagtattacacgtctatttattgagggtctgtctccccattagagcttgagttccgcaagagcagggatttggtctgttttgttcacagctgtattcccagcacctaggacaggccctggaacatcacaggccatcagtaaagatttgcagaatagatgagtggatgtgtgagtgaatgctaagttacagttcacacaatgggattcatggctatctgcaaagaccaccatgatttacaggtgcattgtcacctacacaactttgggacaaactggacagctccagcccctcactgcagttaagagtactaccatctgtccagttccccaggccaaataacctcttcatcattctaggcacgggatttttttttcaccctccttatttgttcagtcccaagttctttcaaacctacctccactagatctcaagtccgtctatttctcctttcgttctggttctaaccaccatcttgtctcacctggctactagaataactttcttattgaacttcccactcctatgcttcctgtggaccattctctgcaaaacatgcagcacgcacttttggaaacaagtgatccctgcctgtaactcattagtggcttcctattggccttggaaaataaatccaaacttcttaccacattgtacctggcctggcatgatcattcccagccctcttctctaatcctatcttaggtaactctctccacctcacactttacaatgttcaatcaccccagccttttagttcccggaacaatctctgggcctttgttcttgctgtttcttctgcttggaatgcttctcacttgactcttcctatgcctaacaccgtctcatctttcagatttcaggataaaagtcacctaatcacagatcaaccagcaaatcttaatcaggtgcctccagttcttttctgccacagaactatattcttttcctttttaaatacttttcataattttacatcatgcttatttgttgtctgatgtctgtctcccactctagattgtaaatcctatctactgtggtatatccatcacctggaagagtccctgacacagagtagccacttaatgaacatttttgggtgttattgaatgaatgtcacagacgaacctgcaggaaaccctgaagatactgagggaaaaaagacaggaattgggtgcttggatctcaggatttctggtggttcgggcttgtcatcaaagactgataaatccttccaaaatactggtttcttatttattaccttctcaggttataatttgagtgagtaggaatgctgtgttcttttcaccataccaccaatatgatgtggcccctcttggagataacaacaagcatatttttagatttactatgagcaccttaacggcattatgccatttaatacgattcaataagatatgcattgctatcatttcctattttacatttgaacaaactgaggcacagagaagttaaatagcttgttcaagatcacagggctggtaagaggtagataaatgaatataaatatgtgaaatccaacctcacagtccgaattgctaacctctgaggcacagatgcccacatggcattgtacctatactcccatagtggcctctaccagccctttaaatatcatgtttatcctggacacacttgctttgtatctctggcccagacttctaccctgagctccagactcatttgtctaactacccacaagacatcttctcctgggcatgtcaaacttaacttttccaaaactgagtttatgatctacctctgtacccccatcccccatgcccaaacctggtctgtctctatttcctcttctcaataaatggcaacaggaatcatgagatgtggagatgtgtgtgtttatactatatatatacacacacatgtatatatatacacacacacacatatatatatacacatatatatacacacacacatatacacacatgtatatatatatacacacacacatacacacacacacacacacacatacatatatatatgcatacacactcctttgagagatggactgcttggattagatagtggcatggcatttctcctgccttactgttgcaaggactgtgactgttacataccaaggcatggaccaaaatttattaaatagaaggttttcagtatgttcttgctgaacaaaagaaaaaaaaattttgtgtgtgaatcttatctctttttactccaggtaatttcccatgatactcgttaattttctcagtcatttttctaagaatattttcccaaacttctctaagtggtaatttttctctccccaaggttttattcccaggaatttgtattgcagtatattaatgaaacaactctatgtttcataaaaatcattttcatttcttttcactttggctcttgtgcacttggatttatgtggcaaggaatacttaataataaggaaagacctatctagaaacagcggtgtaatcatttggcagtagagaaaagaatgatttatgggccatataattagcaatcatctgtttctcatttatttctcagggctgaagttcagaaggcattcagtaacaagcagtaggtaatgccttctcagttcttccttgaaaaactgaatataaataataagccccatacactatattttcccttaagtatgtaaagaggacacacacacacacacacacacacacacacacacacagaggactcatagatattcatcgccattcaagagaattcaggtaatattttttctcaagataatcaaaaaaacctttaatagccccaaataaaatcacagttcattagtaacttaagtttgctttacatgaaggaaagcctctttatttttgttgctttgttttctaaaatatgaaattcttttaagatgaatttgtataaactgataaagcaacaattcagtctatgcatcttaaatgcatttgcaaagccatggatttatttaaacttcagaagttatcaggtataattcaaaaggaagttaaaaggtgagggtatggaatcagctctgtctggggtaaacattcagtttggctgtgggtgagccacttgtcacctctctttctcctcctctaagaaactgaaggaaaaccactctcacagggttcatatgggaataagatggggtaacatgtgaatgtgctttgacaattgcaaaacatgaaaaataataaataaataatattgttattatttaaataataagtgatttttatccagctgaataaatcaaaacagctatccttttatgcataaaatggttgagatcccacgtcagaattttagttgattcagtatgtgttcagataatgaacttagcttttctacatatagaaatgtatttatattgttctctgagtggaatattttaatatatttttaatgtttacatacatttatgaaaagtcttcaaatgattattttcccactagattgtttattttctgtaagacctaacacttacagtaaatctatggagagagtatactctaagcgctatattctgctctaaatcatttgtttaattcagtgactctatcacatttccatatagtgtcttcggtgttgcccaattttactctttctctcataggaagatgagtgaatatagaaccttataggaaagctaagtgaatttaaagaaatcccattatcatgattaaaatttccaacttaggaagccacaaagccttcccagatctgaagtatatcttcatataaagaaaaagaactatttttaggaaatacagtctttcttctgctttataacttggaaaactgtactatgtattgaaaagcaagcggcaatcttttctgaagtccaacaaatgctcagctgaaaagctgtgagaccatttcagatccccaaggcatcattgcgtccacaggcatgaaatggggcaggactgactgtgtgtgtgtgatgtttctgtatgttctctatgggcatcgcagcctgtgagctcattcacatacccctaactacttagctctgatctaagcagctgtgccgggaggactgaccataataggttactcaacagaagaaaacagtgtttacaaagagacaaagcattggccatcaaattttcagttgttactggtttgtccactccctggacaggcacctcatttgcagtaacctgcagtgttcactctaagagtcacttcattgacagtcacttcctgcttcacaggaatcacaatatccacctaggccaggtctaacggcccacatttcactaatcatgttcatggattagataaatattgtgtgtgtggtccctccatgccaagcactgtgctaggcccaaaagatccaactatgaataacagaaatattccttgttctcaggagggttatactcagggcactacttgtcccaagccagaagataaaacctcatttcagcctgaactgccagaaagttagacttttcagaccaatattagagagtgcctcccactactgatgggccctggccttcctacccttaggaaattcagcatcacaccagtctctgagaacactgcagttgatgccagtttgattttcataatatcttgatgagttgatttgtgtagagtatttataacccttgaatgtttataattcaggtcaaaaagactctgaattaaagtatcataaatgaattacaactttacatccatctgcaatttgaaaacaatttcccggagtgcaaatttaccccagctagaggaaaaagttgagcttctatttttgtcagttgtgcaaaaacaacaagaagaaacaacaaaggattgttatacaatactagtataaggaaagtctagccacaaagcacaaagtcctaacatatctgtcaacattcctaaactataaaaacttaaatgccatgcagtccagatcaatcctatatgagaaagatggggataagtaattggccactttactaatttaaactagcttggctcatattttctcactttccttctacaactgatccctccttgtggaaagtgacttccaaagagaaatctcctaattggtttttcatgtccttttgtccagaggcatagaccaaaatctgttggatggttactggggtgtgaagtcctaattttacttccctatgttctgggttgataaaaagccctgaaggaggcaaaggtctttgtccaaagaacacagctctttcaaaaagctttgccagtcacccacccagattgcaatctcacatcttttggctcccttcatctccaccaccaccaacttttgcttttgcctggatgactgagaacattccttcttctccctcatcatttattctctatgaaacagccacagtgacctttgacaacctaaatcaaagtggtttcccagtgttcctagaataaagtgcgctgcacgtcctgtcttctgctcactttctcagcctcttctgatgccactcttccctccttagtacgccttagccctttgctcttctttctctccctcaacataccaggaagcttcccagctcagggcctttgcacccagagcgctcatcccatgctctttccccagctggtgccttctcctccttaggtctcagctcacatgtcacttccacagaggagactttccttgaccccttgtccagatgagtatgtagccccctcccataactgtttctgtcattactttatcttcagaacactcaatattatctgagtcttccctccctcccttcctccctccctccctccctctccttccttccttccttccttccttccttccttccttccttccttccttccttccttccttccttctttctttcgacagagactccctcttgttgcccagattagagtgcagtggcacaatctcagctcactgcaacctccacctttcgggttcaagcgattctcccgcctcagcctccccagtacctggggttacaggcacctgccaccatgcctagctaatgtttgtatttttagtagagacggggtttcaccatgttgtccagtctggtctcgaactcctgacctcaggtgatctgcctcagcctcccaaactgctgggattaaaggcgtgagccaccacgcctggcctatccttgcttttcaacttgtttttgcctatcttctttaacatttttgtagaatgtaaatgttattcatacctcccttgtttacagctgggtctccagctgacatgagtgccacacacacagtgggatgtttgttaaatgaatacttgcacttgtaagggtctggcctattggtgaggaatgccccaaatcataaactctgtccaggtccatgcattctaagttccaactcaacttaaactgtgggagccttgaatatacttttcaatttagtttcttttttctgtttcagtcctctctaataaatagtgacattatctttgtgaagttgcatgccccatgggaagtccttggaagatatgcagaacaaatgaatgtaagaatgcctttcaggtaggtggaaatgtattttattccactctctctgctgcttcactgtaaatctaatgttctcctctctcagaacaaataaaactgaaatgcagattggaaggccattagaggagggaatctttcaaatgtttaggatatgcaaataagccttcatggccaataatgatttcatggctttttgtgaaaaattctggctaatttagttcttagcaggtagatatttccagtgcctgtaataaagaagcattttccaagtggcatttttatttccaaagtgccatttttagaagtcctgtgtactgctgctttgaacagccagaccacaggcagcagttgcacaggggcatgttttcatgttctttactgactagtctcttccagaaaaacattaaaatgtatttctgtagatacaagtgcaagaaatttcatgacagtgtgatcttctttttaaaaaaaaaacaaaaaaaaccactttttttaattttaaaaagtcataaatactttgcaaacacgaatattgatatttgttccaaggggaatagaaaatactttgtattccttagttatttaaaaggattaatttaccttcatttcacaatgaatatttttattttccctatggattatggaaaagtgatctgcatttgctatacagaaataaaatattaaacctcaaattagaaatgccaagatatgtgggtcttttgtaatggaatctgctaaaaagatggatggatgtagtcccaaggacagttctgaggggactcgaagaataacgtacttttggtttgcaatttgccagtaagaccacattaggtgacagaaatgaggcaaattggtaccaactctacagtctgtctcttaatgagctgtggaaagttgtggagacaaagaacatttatagagacagagagaagggttagggactcatttagagaaaggcaatttccattcacaggcttgtaatgtatctccctggtgcatcttatcttctttgttcattggcctgtatgtcctaataccaagtcaaaatagaggctatgatttctagcatctgttttcctggaggcaaaattctcaaaatggataataaatatagttctgatcttatgatttatttttgtatttaactgttaaaaagaaaatctgagaactcaaggattaaaaaaaggaatacatatatatatccactagggagagataaggaatgtcaatttagattccactgaaaatttttatactataatagttaaagccaaatatgtatcaatgatataataagtgtctaatgtggattaataccatattatacctaagaaccgaaagagaaagaaagaaaaccctacaaaatatgtctagatagaaatttatacacccctctccagtataaataaatctcataaaaccttctgccagaacacacttctgtaacaaagaacccagggagatgatagaaacttgagcaatggtaatgcaaagccaattctcttactacctgcaaaggattttgtatctgaagggcctggccacatcatgaataacacttctgcatgcctactacacagcagaaatgtgctgcctccaagcagcattaatactgttttaatgcagcattgagagaatgtgaaccaagcaatgaaatgaaaatgaacatgaacaattatcttctttttagatataggaattcctgcaggacaattttagaagaaaatattgttaatgtgtgacactaattgacctcattaatattgatgtaggtttacctactaaacatggcttcacttgttgtaacctgatggattaaaaacttttgctattattgtgtccacagtttcagacaaataactctagtctaaggagatacatgcatttccaaaggaggaattctcctactacatcatttcaacaaaatgtacaaacatcattttagctgaattttaatacgcaaagaatcttacctgtattcataattttctgtagattcataattttctgtacttctgaatcccaagtttagtctccatggatttttatccctataatgtttaaaaggaaatataggaatagatttcttatgagaaattacagtaaaacctgcttcttaaatacttatatgtccatggatattttttataactaatagaccttactttttagagaaatttttaggtttatagaaaattgagaagatactagtgttccaatataccccttctcccccagcctacagtttctttattattaacattttgcattagcgtgatatatttgttaaagttggtggaccaatattgataaattcttattaactaaagtccatagtttactctagggttgactctgtgtgtgtggttctgtgggttttgacaaaggcatatcatgtatccaccattgcaggatcatgcagagtagctgcactgccctaaaagtctcctgtgtttcatcaccttccttctcccccgacctgtacctctggcaaccactgatctttttattgtctctatagttttgcctgtgttttaaagctttcacaaatacgcaaaaaaattggtgatatataaacttaccatttacagaagtcagagagttcagtaacagttcgggatatacataaaaagcacctgtttcattattattccattcagtttcggttgaagcctgaaatatggaaagtgaggttgcattttaataaagaatctaatacatgtattctccattcaaactacaccaagaattttcatttttaacatttttaaaagatagatatatagcaatctgacagaataagactgatttttgtatagtttccagaattccttgattttacttatttaattcatctaaagccagggccagtggttagccagtgtgccccggtgtggttatgtacagctgggtgttgatgctgacaagtgagtgtccttcccatactggttgtgaaatacatatatatatatttatttatatttatattactcctgtctataccatgagagacgtgtcttgtgtaaacttaaaatgctatataaatattagttaatataatagcgtgcccactaaattatgtatgttgccctctgatccatctttgcattttcctggggaaaaaagctgacctcagctgaagctgtgcaaataccaatcactccaaattatcatactgcacatgctttgtaggcaaggagcaaccattaaaaaaaaattatggtaatgggtagaggaagaaatatcaatggaaactgtttcataagatttcatgactcaaaaacgcatgccctgtgttcccactgtatttctcactgttaatctctttttagttttttcttcttcacctcttacaggcttctatcttcaatctcctttccttccttgctagttcaaactgtaactgacgatgggttttcttctcgactggcttcatttttgctgttcttccaggagaaaaatctattacctgccccgccgttacaagttcatgagcaggttagtagcacgctctgtcctgacagtgtttgtctttctgttggcccgtgtgctccaacaatgacaaggagctataagctggggaagatgagcctgtgtcacatgggaaagttggctgccatgcacattttaaaatcagctgtgtctgattagcctgaggagaaaaaaagatgaaaacgtccctctccgcgtcttcccagtaacttcttcccacttggggggattgccattcatctgcaagtgtgctggggctattgctttttagcccattcttttttttttttttaatttcaatagtttttgggaaacaggtggattttggttacgtggataagttatttagtggtgatttctgagattttggtgcacccatcacctgagcaatgtatactgtacccaatgtgcaggctttcatccctcgccccctctttttagcccattctattagataaattatcaaaaatcccaatatctttggcctagatgttctcccttcccttccctttctttttcttttttctttttctttctttctttcttttttttttttgagacagagtcttgctctgtcacccaggctggagtgcagtggtaccatctccgctaaccgcaacctccgcctcctgggttcaagcgattctcctgcctccaagcgattctcctgcctcaacctcttgagtagctgggatcacaggcatctaccaccacgcccagctaatttctgtatttttagtagagagagggtttcaccgtgttggccaggctagtctcgaactcctgacctcaggcgatccgcccacctcggcctcccaaagtgctgagattacagggtgagccaccacgcctggccaatgttatttttttctacaaaaattcctccctccactatatgtaatttgaaagcttgaagtgcagatagtcatccttagctgctggctacttgacttcatgagtggggtcctcctatgttagtaatattttgttaataacatatgcagatgtatagcctcactcaggtgcccttcctaccctcttttctgccaaaaaaaaaaaaagaaaaaaaaaacccaccagatgaagattgcatctactatactttgtatcctccgaaagcttgtttttccttgttttttgaggagctagggagaaggggaatgcatcaatgatgatgtcctctaatttgattctgttgtgatcattggagaatctaatttcaaaatcttaattgatcttatgttttcattcaccctgagctgagctgagctgatggttaaactgggaaactagtaaatttctctgaaaatcctagttagttcaactctatgaaatttagaattcaggttccctctgtttatatgctatgttgagtgataaataaaagagtagttggtacattatggtgggtttactcaaatgcatgtttactcagtgaagtacagtgtgagaactgacctccaaagaagtgaaaatgttgtttctcaaaaattgcctgcgagcaagcttattggcagttctttcattaagcagttgacatgacatttggattcaccatgatttagattgctaccttgtcacactgtaatcatctgtacaatcctgatataacagtttagcctatattaatagttctcaaactccagccagcatcagaatcaccttgttaaggcacagatttctaggcctcaaccccagagtgtcttgttcagtagatctgcagtggggatggggaattttcacttctaatggattcccagctgcagctaatgctgctggtcacgggacgatgttttggaaaccattggtctgtatgataggccaagctccatcttctcattaaaatacggatttgactgactatgggacgggaaaacaaaaaccaatatcaaagaaaacctgaaggaaacacagcaaggtgaagagaggtttctcccaactttgagggctaagtggaaatatcaagtttgtacatgatactgtttcagtattctagattctaaaaagaatgtagggttgggagaagtcttattcttgtttggaattgccaagtcagcaaagtcagtatgtgtggaacagagcacattggggtcataaaacctatgttggcactggatgactttgggcaggttacttcacttctctgagcctaagtttttcacatttataaaatgatattaacttctcccctgtatggtttatgtgaggtttagtgcctagtatgtagctgatgtgcacaaatagtatctattaatacttattacatgtaataattaatacatgtaataattaataattacatgtaataattatgtctttgcagaagggtatccttctattctttctgtcgtgcttctgaatttgttatccatctgtaagtctctcctttcttctatcctctagcaactagtccactaactgttctgagtttatctgccaagtagtcattttctccatttatattctctatacaggcattggctctacttcccacacagtcacctaatttaaaacctaagggtccaggtgtggtggcacacacctgtagtcccagatacttgggagtctgaggcagtgggatcacttgagtcaaggtgttcaagcctagcttgggcaacatagtgaggccccatctctaaaaatgtaaataaaaaaaacctaagggtcattttggatgttttgcttgctcatctagtcagtctctcaaattctgcgggtgcagatgaatatttctaaaagtctatatattactcttcattcccactgccattgacttaggctgagctcccatcacctcttgcctaaacatcagtttatcttcctgcctcctttctgaccccttccaaactctcttctattcatctcctgagtagcaaatctgattattgtcacttggtggctaccatagagtgatcacaataaggttaaaagcattagcttaattacagccctttataaactgtcctcgcccatcgcttccctcccaccactctttgctccatccatattgagctcatcgtttccaaacatatgttatgctcacgtgggtttatgtgcttttgcgtatagtggtccttctggaagatcctttcctttattgttcaccaaggtgaggtctactcagtcctcaaaactcagtccacatttttgccttttgcccaggtcaaatgatctcttttctgcttttccattagaatcctatggccccatcaccctgtgctgtaatctatgatgtaggtgtctagctctctacctgggtggtatttgaaggcaaggatgactcattcaattctatatttccagcaccaagcacataggagatggagtgaatgaacaaatgaatctccacatgcgtgtatgaggattggagtagggagaaaggaaatcacgaagaaaagaagcatagaaaaaccaggtctgcctaaagtttcagacacagccttggggtgaaaacatttgctcaaacagtgggggtgggatggacaataagggcttaaaagaaaacagtgataaaaggaactatagaatctcaaggttttatgggatattaaatgccatcaagtccaaccattcatcagatacttaaacttctgctttctggtcagccagtctatgtttgaacatctctggagatagtaaactccctggcccatctgtgggcagctgtgactgttacaaagttcttctttaaaataagctataatctctatctctttagttttcactctttgattggagttctgccccctggatggataaaaaaataatctagagcaaaaaggcaaagcatgtgagaaatattctgaaatataggcaaaagggcttagcacttagcagctatttggaaattcagagttgaggagaatgaggttctgacacctaagggctagggaaaatattgttggaggtaaaagaagactggaaatcgagaggagatacaggtgtggtgaggaagttgactttttaaaattgattctgtattataactcaacagtagatttcttaggtgttggtgtcttaaaggcctttggaactgatggcaaagcagctgaagagagtggtaatgctagagaatccagtgtgggagtcagcatgaccttagcgaggggagtgtatggaatatcccaggaggagatgtaaagggtgaagagaagagcgcctgtggcagttcctttgaaaatctgcattaatgggatgggggagacctgaggagaatgaaaaagaacaattagagaagtagaaggagaatgaagagagggtggtgtcaaaggcaccaagaatgagattccacaaggagggctgtgcttcagcttctgatgatcaatcagagatgagaatcaattttggatatttagaagtttcagtaatctctgtgacagcagtctccatggagtgatggttctcaaacatgtgtcaggatcatctggagggcttttaaaaacacggatcactgggcgcatccccagtgtgtctgatttggtaggtctgaggtggggctcgataatttgcacttccatcaagatcccaagtgatacctgtgctgatgttactgatcctggaccacatgttgagaaccatcactatagagtggaggataatggaaaccaaattacagccagtggtggaaggatgagggctggatgaatcagaggcaatgagggttcactgctactttgataagtttcatggtagaggaaggagaaagaggggacaggatttaaaacaggagccaagaggaggaaggcagaggagactatgaccttgtgacccatcacatgttctccatgtgtgcagaggagaggctttgagtgaataagagcttgagaaataaactcttctttcttttatttatttttttttttgagatggagtctcactgtgttgcccaggctggagtgcagaggcacgatctcggctcactgcaagctccgcctcccgggttcacgccattctcctgcctcagcctcccgagtagctgggactacaggcgcccaccaccacgcccagctgacttttttttttttttttttgtatttttagtagaggcagggtttcactgtgttacccaggatggtctcgatctcttgacctcgtgatcctcccaccttggcctcccaaagtgctgggattacaggcgtgagccaccacgcccggccgagaaatccttctttctaaagctgaaggaatggcttacaaaacactagtctttgggctggaaacattggtgctacttctagcgcacacatcacaactacagaagaatttaggcattggaaggtactggaagactctgggccaagctaaaggaaaaagaaatcccaacgaaggtagttgattcagaatggcctctcaaaataggcttcattgcataccacatagaattaagtctttgatatcactgggatgtgtgactttctgaagcccagtgtatggtgtacatttaaaatccacgttgtcagaaaatgttgcatctaccttaactcttcatttcacatcagaacagactgatttagatgatggagagtgtctttttctttgtagccagctctgatattctaaattgaaggccacatatacaacttgccatctagtagtacatcaataatgcaacactgacctccaatatcctaaaattcccgtcgtatgaaatcttgatatttaagttagcttggagtttcatttatataagtgatattgaattttattaatccatgaaagcatctctgaaacaaacctattccctaagaataaatgaattaatatctctaaggtttctgagcaggcagagaaataaagcacttcttcataatatctttattttaaaaaatcacttgactctcataaagcatactcatgtagttcagacatggatttttggagttaatgctctttttatccatgtacttggtctattaaatgctgctttctttcttatctttggacaggcttatagccattataaattgcctatccaataaaaaggaggaatttatcatcttttggctgccctttttttttgccttcataaaatattgcaaatatagtctgtggaagatatgattacaaaataacaaatctgattattatgggtggcttgtaggtggagtctcattactactccttccttccaccccccatatgcattctgcctgacttgatcctgggtgaggcttgacagtgtgaatgctggactgtattgcattatacattcaatgcagtcacaacttatcagatgagcatacaggcaaaaggacaaaatggcttgtgtattttcatcctcgttttaaaaaactaatacatgtaaatgttccaaagcctttggagtcttctataaggtatttaggctatgctccaaatagtacccctgtgacctaaaagaataacattagctttctaagatctctaaattctatccaggcagaggcttgtaaatctggagacttggctctaagaaaatgaaaaacaaattcatgcctctgctgtctattatcattccaagagggtgtcatttactgtaatgtagagctgtgtgctactgaaagaaagaaaaggagggaaggaaggaaggaaggaaggaagaaaggaagggagggagggaggaaggaagggaaaagaaaagaaaagagaaaagaaaagaaaagaaagctcatctgtaggttccctctaggcatatcatcgctgataatgtaatctgttagaaacatgatgctattattataatattctttactggggaaaagtaggtgtcttcaaagtaggcctgcttcatttaattcagtctgattaggttatcattagtgtacagtccctcctgggttgttagtggctcaagggaaatgacctttcttctacttcctcaggctatgcccacagcatgcaggttggcattctgtacattgtaggcagtttataaaggtctcctgacaggttagcatgttgggagcaagatcctttgcacatatgtggccttttccttaatcatcatctctcctaagttgggtaagattatctcccctttagagctgagggaactgagggtcaaagagatcaaatagaaccttcccaagaccaaacttgggaagccatcgcagagctggcaagtttgtacccatttgcttatactgtattgtcagctcttcccaggtacccggaatctcacctatcatgaatcagcatgaaggaaacctgagcttaccatcagaacaactttctgtaaaaataactcacattgtagtccagatattaacttgacaagttagggccagaaatgcccaagtgtctgatccattttccctttattgatttgcctgtgtagtgtgtaagagggcttttgctcagtaaatagcaaaaatggaacaaagtgacaacatacccaaccaaaatcaatgctaaatcattaagccaatgttttctcttttctattccctattggtggaggcttcattaagtaaagtctatactaaagtccactcctatactgaagagacaaatggggtgctttctggttagttggtttccagactttaacatatctaagtaaatttcagggttaactatttagggatgtttattaggtgggaacacagacatcaatctactagggagattcacagattttgaacttttattgggaaaagagcaatctatgtagaagttcatcattattgtcaccataattttcttcgtcctagaaactatcactcaatcgagccctttgtgcatccaaggcattgtgtaagcacttgatatccatgatcatgtttaatccttaccattgccttgttctatggattctgttggctcatagaggtttaattacttgcccagcaaggtctataaaactggaatgtgaatcatcagcttccagctgactccaaagtccatcattgtatactaaaggttatctaacattgtatactaaaggttatcattaattcaagtttgaattaatcacataagtgacataatcaagatattatcacccaaatcaccaacaacctgtagtatctaaagaatatctggctgatcatcattttagagatgagagcactaaggttaggtgaggataaagggcttgtcccaggccacactgatgtatgaccacagaatcaagagtccaacttgaatcttatgctttccagcctagtggcttttgcattatgtgcttctgtcttgcatgattgaagggggccctaagtgaagtctgagtgtggcaaagtttggagacaggaatgtgtttgtggaagagcagactaggggagcactcactcattatcctgccacagagagatagactcttgttcccagagccacctaactgggaggtgagaacagcatgtggaatggcagccttaacagtgggagcctggctagctgttgccaggtcttgaggagaggatcagaccgagagtgttttaagaggtgtattcatttcctattgctgtcctaacgcattgcgacgaatttaacagcataagactacacaaatgtattagctcacaattctgtaagtcagaggtccaggaagaggaggctcaactggtttgtctgttcagggtttcccaaggctgcaatcaaggtgttggtcaccctgggcttttatctggagactctggggaaaatctgcttctgggttcatttaggttgctggcacaattcagttcatgtaatcataggactgagatctccatttctttattggctgaaagtcttcctcagcttctagaggctgcctgcattccttgcctcctagctcttttcatcttcaaagccagcaatggtgggtcaagtgcttctcaaactttgaatctctctgattctccttctgccacatccctcctgctagagaaagttctgctttcaaaggtctcatgtggttaacttgagcccatctgagtaattcaggatgctccccctatcttaaggtctgtaaccttccttacatctccaaagtcccttttgccatgtaacataacatattcacaggttctggtgtgtacatctttgtgggggcaactctggtaaccagaggaagacacaaactgctgaccatgtttgagtgtttggtttagtcgtagtgaagtgcacacagcatgcacagccgtgtgtaatggaacctggacaacatgccttgtccacctgcttctgctcaggctcctcagtgaaggccagttcacaccctccagcccccatgcccaaccagtgtctcggggattttatttatttatttatgacacggagtcttactctatctcccaggctgaagtacaatggtgcgatctcggctcactgcaacctctacctcccaggttcaagtgattttcctgcctcaacctcctaagtagctgggattacaggtgcacaccaccatgcctggctaatatttgtatttttagtagagatggggtttcactatgttggccaggctggtctcacgcctgtaatcccagcactttgggaggccaaggcaggcagatcacggggattttatttttaagatgttcttttgaatgtgtttcttccaccacagttttttaaaaagcccagttcctttgctttccatcacttttatgttagtcctgtgtggtccttaagaaattattaataatgcttgctatctgtctggcagcttctccaaagcatttcatactcaccatgttttatgagcccactaaccactctgtaaggtcagtaagatgataatgatgataatgatgattattgttactattacctctattttataaccttggaaaagaaggctctgaagggtaaataacttgtggaaggtcatacagctgaggcgcaagagagccaccccagttacaaatctcagcttccttttaccatgccaagcagcatcctcttgcctccttcttgcttcctctttttcacatatttcaattaattaatcattttaattaccctgttctactctcttttcatcatctccacatttcaattaaattgtggtgccacaggctggctgctgaaagctgccatttcactcctatagagtagttatgcctgattttttttttttacagctttatttgtttttatccatgctgagcactgtacccagctggattcaattcatagtcatcgcacacagagcccagattctgtgggaatgtgaattttacaaagtgtgatctgattagtcctgcagactggagatgtgtgggaggtaaaagctctataataaaaaacctttgggccaatggcctctttcttgaatgagttttaaggcaatcaaatgaaataaagccaagagccatggggaaggccaccatcttagctgaggaagtctaatttatgtgtccatataaggactaaatcattgagcatagactagtgatagatgctggtgaaacacaattaactttgaattaaaaagcaaaaaacagaaatgttaagcggcaagctggttgctcaatatttttatttttggaaaaaagagaaaaacagtaataatagccagcatttcctgtataccagacagttctaaagactttatatatgtattaataagttcatcatcacaactctacgaattgggtatcattatcatgcccattttatagataaggaaactgaggctcagcaaagttaaatcacttgcccaaggttttgctgttaatattaacagagccaggatttgaatctaggcattccagccccatagttcatgttgtcaaccactgtgtcatgctgcttctctaaagcccatcatctcactatattttaagtatatttcttttggggcggagggttctcttggggaggagggtcctagagccactgtgagattcttttcagtttgaccctttgggagttctgaagaaggacagccaccaccaagcagagttgggatcatggtgaggctggaacaatgctgagaataaaggagatagtgaaagagaagtttaccattattttttagtttggaattgattggttatataaataatattatcttcagctgagagtttcactgtgatggttaattttatatgttcaacctggctgggctaaaggatgcccagatagctggtaaaacattattttggggtgcatctgtgataatgtttccagaagagattagcattcaaatcagtagacttagtaaagaagctgatcctccccagtgcaggtgggtgccatccaacccattgagtggaactagaagatggaggaatagtgaatttgctgctgcttgagctgggacatctctcttcttctgcccttagacatcagtgctcctggttctctggccttcagacttggatcaggatttgcacggttagctcataagattctggagagcaagaagtcccgcaatctgcagtttttaagaaggaggcctaggaaacctgatggtgtaagtcccatttccagtgtaaaggcctgagaactaggaaggccaatgtccaagggcaggagaagatggatgttccatctcaagcagacagcaaattcaccctgcctccacttttttgtcctattcaggtcctcaatggattagatggtgcccacctgtgttggtgaggaccaacttctttactaagtctacaaactcaaacactgatctcttcaggaaacaaccccacagacacacctcaaaataatgtttaccagctatctggacatcccttaacttagccaagttgacacagtaaattagccataacattcactgaaaagaatacattgccatgtaaatatattgttttaattaggaaaaaaataaagcatgaccaaattccacgtgttttcagttaataaatttagaaggtattttttccagtagtatagacacttgaggtagtgctatcattttaaagtttggtgtggtttttgcgccttctggtgtttttctgtgaacagtgattgggaactgttcacttggaagccagatgttttcatcagcagaagtcagtggaaccgagggaccagggagatagccagagagaaaactgtagctgaaaaccacttttaggatactgttgttttcattgacttggcttcattagagtgacacatgtgtgtcacgatgccctagcaccatgagaaccatggagcctgcttaaaaagagatcaatgaaagccaaaaatccggctgcctgctgagaggctgctcaggggaggtgggagaggcaggaagcaaatcatggcatggagctctctgcacaactcccaggatgtgctgccagcaccccctcccgaaagttaattacagctagagctcttctctgacctcagatgttttccaaacacaaaatgaattttttagaacctacagaatgtaagttaagatctctgctgcttgcttaagggactgttggaatccttttcagagctttccagccttgttaggactgcttggtcatttattattggcatgtgggtggacatctaactcacagctgctatttcacaaacagtaataatattgaggccacttggtgaaatcaaaacaacactagagttctggctgtcttctttccatctataaaacaaggatatcctgagtgcagtgagagggcctggaatgtgtggtatgatagttgtggctctgcggagaccttcctcctgtgtttcagggcattgctgacatgctgtaccctttggtcttgccttccatgtaccacaggatcgataaacaaataagcaggtttcggagatggttacctaagaagccaatgaggctggacaaggagacactgccagacctggaggagaatgactgctacactgcccctttcagccagcaaaggatccatcagtgagtgttccatgttaaagccccatctcactaaggatgtgcagctgtggtagagcctcaccctgcacgcctttgattcctgggcatgaggaaggaacagcatagtgcccttctcccctaaaagtcttgtgagtgttcatatcccttttatttcagtcaggggaagataactgctgtaaccaacaatccctgcatctcagtggcttaagatgatacaatgcttgctcatgtgtgtgttgggtaaatgatcttctccacagaaaggcagtgacccaggctctgtcattctcattgctctgccaactccctgtgcacggagccccctgcaggctcatctgcatctagccagcagacaggaggagtggcctacaccttttcccattgaaaagagggttttttgttttccggtttttgttttatcttggttcacttctcagttcccctttcttcagcagttcactgggttgccttaggaaaagccacatcacctggcagcccacttgctgagtcatctgtcagattgtctcagaatggttatttgtcacttttgacatggggggaggaaaaacaagttggctaagtcactgagcctgtgaggaactgcaaaaatgaaagagaatttactctgaagcttctgagatgacaagaaatgatggctggatgcagggcagggcaggcaggaggacagaaaagcctgccgtgtgctggagactgtaaacaataggagaaacacagcctctcagtggaggcagagatcaggtcagccccacctcccttgcaacaagatcaggaattccaggccctcttgctccagcagtagtgacagcctccataaaaatgacttacctggagggaagaaaagggtgatggatttaaaaaaaaaaaaaaaaaggttgctgattttgtgagaaagtaaaccaggctgagtgctgtggctcacatctgtaatacctgcactttgggaggcagaggcaggcagatcacgaggtcaagagtttgagaccagcctgaccaacatggtgaaaccccgtctctactaaaaacacaaaaattagctgggcatggtggtgcacacctgtaatcccagctactcaggaggctgaggcaggagaatcacttgaacctgggaggcggaggttgcagtgagccaagattgtgccattgcactccagcctgggtgacagagtgagactctgtctcagaaaaaaaaaaaaaaaagaaagaaaaacaaaaaacgaaggtaagccaaatggcagttttcaagaagttgcagggagtgccaggtggggacatatttcagcaacagaaaaacggttaaagtctgtggagctctgcagggcaaaggggaaaagaaaaatcaaagaatagatgttctgaatcaaaaatgtgtaacagtaagagcagtctaatgcaggggaagcaactctgtacgcctctgaaatagccgagctgatccccacaggtcagattaaagccaacccagctgcagtatgtgaacatttgaaagggtcattgaagcaaacatggaattcacagactggcctcaaaatcttagttcgatcctcaagagaaagtgggaactggaagggacataatgttaattcagagatcagggtgttttcttaagagaaaaagacagaaaaaagctgatacgttcccattcttaatttaaacccctaccatgtctctcttgttcatcttggaagttttttagacaatgagttgtttccctaattcttccggaatgatgtctggtttacaggcaggttttccctgtgcttctacctgtttatgatagagttcctagcacagtgcagaagggtatcaccaattttggatgatggatggatggatacattgataggttgctgggtgggtgggtggatggatggatggatggatggatggatggatggatggatacatggataggtcactggatggatggatagatggatggatggatggatggatggatggatggatggatggatggatacatggataagtcactggatggatgagtggatacatggatacatcaccagatggatggatgggtggatagatggatggatatatggatggatggatggatggatggatggatggatggatggatggatggatagatggatggatagtgtatatggataggtcactgaatggatggttgggtatacacatggataggtcaccagatggatggatggatggatgggtggatggatggatggatggatggatagtgtacctggataggtcactgaatgaatggatgggtatatacatggataggtcaccagatggatggatggatggatggatggatggatggatggatggatggatggacagatggatgaatagatacatggatgggtataggagtggttgtgtaggtgtataaatgaatagaggaataaatgaagtaagtggtatacactctgggattttatttcacttcaaagggaggatatatgagatataggtaaatggaagaaaaaaatgaatgaatatatggatagatggatggataaattagtgaagtatgtgatgtgtgctctggtattttgtttcacttcaaagggttataggtgtatggaagaggagggtttcccacctcctcttttcatgctgtttatattctacagtgttcttgctttagaacaatacttctcagcgtgattcttaaagtcagaagcccttggatacccagtagaatttctagggactagaactgagaatcatatttttggaagtatttaaaaatatataataaatgagggatgattagattagggatatttagccaactctctcacatatttgagaagcccttttgacatgctttggtattaatttgtcaaataattgatttattcaatagtcactaatttagtgttcacttcttgccaggcactgtctgggtacagagggtataaagataaacaatactcagtttggaccctggtgtagtaaagatgcagactattttaaataattgtaaacagtatgatgggtgtgacttaagagggggaatactcaattctccagatttggagggaggttggtaagtgatgaggattgatcacaagagaatgcttgatatgggtcttgaaggataagacttgcccaagtggataaggggcgaaaggcatcccaagaggagacagtaacgtgtgtataaatgaacgaaggcgtgaaataggatggagtgttttgaggaaccacaagtagccttctctgagtaagagcataggtttgtgaggaggacctagtgttgtttgaaaaaagagagtgatcaatggaagatgagatatcaagacaggagaaccaaggaagaaaaagcagaggacagctggaatgaatcaaaccgaagaaccagacctcagtgggaccaagagaatagaggcaattttatcgtgtaaataagaggtgaaaaattaaataagtgtcttgaatattatgagtggtgaggatttatttctctttgaaaattgccatgtcacatagatagcatccctcgggtgtataaaagtatgacttgaagaatgctggctgtcaaattggaaacaattgttgggtacaatcagaaaagaattccctaaggatgttttgagagtgacattaatggatttaaattaatcagaagtagctggttaataagctctgggaattatagcatgatattcctggctttccaaatatagtccaaaatcccatgtgacttcttagttttccagaatgtttcatattgtgtttttcttggaatacaagctaataatagaaatgtaagtgtgttcgttagggggtgaggtgggaggagggcatgaaaatagtaaaaaaaaaaaaaaaaaaaaagagaaaaacattgaaagtttaataagtgtttcatcagagacatttcccactgaaaaacctttcgagattttccaacctccacccccaattctggttgagatgtactcatctatgttttagtaatatttttcttttccttaaccaatattaccacccattttaattactttctccaagtctagagactccttgaaagactatgcctttctcactcatttttgaatcccatagtaagtgcttaataatgattttttaaatgaaaaaataaatgaatagatagaaacaaaagtaggagaatcatgtaagtaaagaataaagctgatgtgaagtcagctgactgcacactcatctcaaaccaaatccaagataccttcttttcaaatgtagactacctccattgttccctgtctcagtaaacagcactaatatttgtccagttgctgaaactggagtctggaagctattctagacacctctctcatctctgcttcttacaagttatacatctccacggattgatgattttacatcctaaatatctctatacttcagactttgtcactgtatttcacttgaaattcagaaataatataacaggtctccctggttttactcttgtcaccaccaatccattctctcaggtgcatactgcatggtgtcttcaaaatgtgcatctaatcatgtcacttcattctctttaaaaactttagacaccaaaattattactatgacttacaagctcttaaatgcctacctgcactgccatcccctctccagcctcatctgcctttcttgcctcccactcttcatttgttgtgatccagacacatgcagcctctcctctctcagctctttggatatactctgccccaggacatttgcatatgttgtttcctctcctggaattctcttccgattctttccttcttcatgtagtatgctgttattcatcctccagaactcagctccaaagactcctgctatggaagcctcccctgaccctctccttccccactaatccttccaaagattgggtctctgttctatactgttgtagttaatgtttcctagataacatttttttaacaattgaaatgctataattatttgagtagcatatgattaatgcctgtctctctaggtaaatggtatactctgtggagccataggccatatctgtttttgcccatgattgtatctccaatacctaacacaatacctagcataaaattggcacacaatgctggtcttctaaatgaaggagtgaggattgaagtcagaaagacagcacagaataatctaattgtaaacctttattctttaactgcactgtacaaaaatattaaagttgagaatctattaaaaaacaaatacctgccagccacagtgtctcacccctgtaatcccagcactttgggaggctgaggtgggaggatcacttgagctcaggaattcaagaccagcctaggcaacagagtgacacccatctttacaaaaatttaaaactagcagggcgtggtggtgcatgcctgtagtcccagctacttgggaggttgagctgggaggatcatttgagcccaggaggttgaggctgcagtgagttatgattgtgccaccatactccagcctgggcaacagaatgagaccctatctctcaaagcaaacaaacaagcaaacaaacagcctagcattccatttgaaaatatatctgtatttaaggaggaagaaagcaaacctgtgggtgtacaagtcaacatacaaatgctacttggtcactttatatgagcttaccaaggtgggcctacaggtagaaaaattcttattgtatgccagacactatttaagaactttaatacaatagtttgagggctgaggtattattattatcaccaatttacggatgaggaaagtgaggaacaaaatggtcaaagaacctgctataggtcgtacacctaggcgaggctacctgtctaaacaactcccaaatatcagcagtagaacagcatagaagtttacttgttcacagcactatctagtgtgggtcactctgggggaaggaggcatatgtctctgattcatgtagtcattcaggtacctaggctactgttatcttgttattctgccatcccctaaatcccttacagacaaggaaaaagagagatgagtgattttttaggaaatttttatgggccaggcctaagagtggtatatagcactttcacacacatttcgtagtctagagcttagtcatgtagtaatgctgggataactagtctacctgtgtgcccagaagaaaaaaagaagcagatttgccgaataaataatcgcagtctgtctgagtgatagagcaggaattcaggttcgaacaggaaggctctaggtctcacccttataagcattacgctctattgtgagatttctcagcctcagcactaatggcactggggctgaataactccttgttgtagggaagagtcctgtgcagtgtaggatagtaagcagcatctttagccactagatgctagtagcattccccaaccctttagttgtaagagaatcaaaaatgtttccagacactgccaaatttcccctggtggtagtggtgggatgggtacaaaatcacatccctttcctccagccttgaaaaccatggttctactgtctttcatcacatgacaccctttaggcagggccacccattctctgtgataaattaaactctatttgaatctaatgactatgacagccaagtccatttaagaattaatttatctctcttcacctctgtgcctgtgaatgttgccctgcttaagtatcattgcccttcattcttaaaatggcattagcgatgacacccttgaggcaattactttctaaggtcaatacccataataaaggttttctgctggtagacagaaaaaaggaaatatgcaagaagagtcgtgttactttttataatagatatacaggacattctttcaggaaatagatcaattctgattgtctttcagaaaaatgtgctagatatagacagaaaaatgttctcccctgcattttctgtgtttttattattaccattattttatttttgtaaacacccataaaaattgaggttaaattaaataccagttcttaagagaagaatatgaaatttatgctatgctacgtgcacatatgtttaaatatatattcactcatccacgtattccataccagttgttgctctgggtgcttggagatcaacagtaaacagaaaggcaaaaattcctgccctcctggagcttacattgtagctgggtgtaactggtaataaattataaaccagcagttgtcagtgaggggtaatttgacaacgtctagaaaaatttttggttgtcacaagttaggagtggagattgcgactagtgtctaacgtgtagaggccagggatgctgctgaacatcctgtaatgcacccaacagctccccacaacaaaaaattatccagcctcaaaagtcactattagtgtgctgaggtaaacattttttgaagtcaatttaaaagcaagtgaaaaggggataaatgctatgggaacagagaaaaagagggtggggtgaggggaatggggaggactgcatgggggtgggggtgcaggttgtatttccaaaagacagtgtttcagttcttcaaggcaggcctcctacagaaggtgtgattggaaaaaatcttgcaggaggtgagaagggcagagagagttccaagaggggaacagaaaacaaaaccaaggccctaatctgggagaagctctgattgtgtttggggaagagaacaaagaccttgtggctggagcagaaataccaaggagaacaacaatagtgatgagttagaggcgtgggagggagcctgatcctgtaaggcctgtgggcttttacagaggaatgacgtggtctgacttaacttttgacagtgtcattctgactgctctggcaactgcagtcatccgtgtgaagcatgatgtatttatattttttcaagtttctatcttttcaaaatcaataatgaaaatacatgccacatataactcagcattgacccatttctttgcaaagcttttgtgttgtacacaaaatgttttaactcatgtactgtgcatgtatgaaacagatattattgaaagaccccttgaaataaagtctgcctttaaaaggcacagattttatgtgaaataaaatcacatggctttagactcctactttcatctcctactagaccgtgagctacctgaggacaggagctatgtgcctgggagcaaggggcacccagggaatgtttgtgagaccaaagagaacaggaaaggagcaaggcagaattggcattgttaccgctgggggacagagccagggctctggagccagcttctctgatcttgatgcagcatctaaaaactgtagaatatttagaagagaagtgaaaaatgcggtcaaccacaatggtcaattgtggtttccatgtccaacttgaactttcccttgacttgattcagttttggctttagttctgctaactgataatctatcttctctatcaaacattttacggccattaaattctgttatcaggattcacatctgatactaagatatttaattcatgcatcacactttttaattatgtgtgatgtgtagtatacaaaatgggcattataaaaagaccacctgacacaaaatttgctttcacgcctttttctgcttctatgctgtgagctagggcataagaaaaaagtctagagaataacaaaatgacatagttctttgtgcctaagaaaaagcgctaacaatggaaatgttggtgctggggtcatggagggtttgtaagaatgggaaaatgttggctgggtgcagtggctcatgcctgtaatcccagcactttgggagaccgtagcaggtggatcacctgaggtcaggagtttgagaccagcctgccaacatggtgaaaccctgtctctactaaaaatacaaaaaattagctgggcgtggtgatggatgcctgtaatcccagctactcgggaagctgaggcaggagaatcacttgaacctgggaggcggaggttgcagtgagccgagattgtgccactgcactccagcctgggcaacaagagtgaaactccgtctcaaaaggcagtggggcagggagaagaatgggaaattgttgctggagggacagtgagtgggagattctctgagattctctgtaacatccctttgattgtcttcttatcttttgactgttctcagcagaaaaggcagcaagttaaagccagtagtgatcagccaatcaaacagtggtagcaccaatggcaacaataaaaatgatagcaaccactgtttactaaacaactccttcattccagggttacaccataggtatattacaagtctgtgagggtaagggtagaataatgatggtcagagaggctgagtgacttgctcatggttgctctggtcactgttagatgagtgaacagaaagaagtgtcttttcagctgggtgtggtggctcacgcctgtaatcccagcactttgggaggccgaggcaggcggatcacgaggtcagcagtttgagaccagcctggccaacatggtgaaaccctgcctctactaaaaatacaaaaattagctaggcgtggttgcgcgtgcctttaatcccagctactctggaggctgaggtaggagaatagcttgaaccctggaggcggaggttgcagtgagccgagatcccaccactgcaccccagcctgggacagagcgagactctgtctcaaaaaaaaaaaaaaaaaaaagtgtcttttctccacagtgctgccacctcctgtaggtgccacataaatggagcctaaatacaatttttcaactgccttaccctagggataagcctgtgcatgtgaagacatctgatttcctttggaatttattgttaaagcattcgagatgcattaaacagacatgaaataaaatggtaaaaatataaatgaatattctgaaccaaggagaatataagttaaagtaggcattcaagttcagggaaaaagtaggctcagatttgcaggcctcagtggcctatgtatctgtaatggttgacgaataaactagaaaattggcctttacaccaaaggggccaagcggaagggagaaacgtagtaactcatgtgattctgattgtcagagacgaagaaaaccaataccataggtaatgggttgctttttgactctgaaataaaattcttgcacagggtcattggagtggacagtgaaatagtgatatggtggacagtatccctggtaacctctttatcacaggtgccttgcaggacttttctgaaggctgtttctggtagtcccatcagcatggttctgaagacttaactgctcatggccataactttctgtgagagtttaggcaaggtatccagcaaaatactgcagtatacctgtgatggttaatactgactgtaaacttgattggattgaaggatgcaaagtgttgatcctgggtgtgtctgtgaggccaaaatagattaacatttgagtcagtgggctggggaaggcagacccacccttaatctgggtgggcaccaccaaatcagctgacagtgaacataaagcaggcagaaaaaacgtgaagaggcgagactggcctagtctcctagcctacatctccctcccgtgctggatgcttcctgcccttgaacgtgagactccaagttcttaagtcttgggactcagactggctctccttgctcctcggcttgcaggcagcctattgtgggaccttgtgatcatgtgagttaatacttaataaactcccctttatctatctatctatctatctatctatctatctatccatcctattagttctgtccctctagagaaccctgactaatacaacacccaaactaatctagttgtctttgttgtttgaactgtattctttaaaaactaaatttgaaaactgatcaaaaagcaaataacatcacattctagttgaaaatggttccatgtttgagaaacaatagaagctaaccagtgggtacacatctctatacgtcaatgcataaagcccttcgtcattttatatcttatcacaagagctaggcctacaggctgcccatcagccatgattgtatggccacctaaacatctgaccccacagaaagctctctcacactagccagctatggaaactcaggttgtcaatattagagtcagtcattccaggaggcccctctcaaaactcaatttcagaaaaggtcatttcaatagaaccatatgaaatttattataggaatatgatagctaacattcatatagtgcttagtgggttccaagtacttcacggttataaactcatttagtcctgtgagtaaggtatcgtcattatccccatttttacagaggaggaacctggggcacagaagggttaagtaacttatccaatgtcaaacagttggtaagaggtagggcctggatttcaaggccaagcattctggccccagtcttatctttttaacattgcatgttagttttctatggctgctataacaaattatcactgacttaactgtttaaaacaacaaaatttatcatcttacaattctgaaggctagggtgcaacatgggtgacactgagctaattaaggtatgtcaaggctgcactcctttctggaggagaatctatttctttgccttttctaatttctggaagctactacattccttagcccatggcttcttcctttatctttaaagccagcaacggtagttgagtccttctcacatcacatcactctgactttgcttctgtcttcacatctttttcttctctgactcttttgctttcctcttccatttttagggacccttgtgattatattgtacctatctaaataatccaggtaatctccctgtcttaaggtcagctgattagcaactttaattccatctgcatcattaattcctctttgccatattgcttaacattctgaggatgaggatgtggatatctttggagggccataatattgcctatcacagctgtacaaatttgccaatccaaaaagtgccaagggttgggacagaggacaggaaagttttgatgggaaaaaagaaggaaagaaaagagagagggagagaggaaggtggcaataggatttggggacattaaatgaaatgacatatgtaaaagacttagggcctggcgcgatggctcacacctgtaaccccagcaatttgggaggccaatgcaggcagattgcttgcagccaggagtttgagaccagcctggccaacattgtgaaaccccctctctactaaaaaaaaaaaaaaactttagccaggcatggtggtgcaagactgtagtcccagctactcaggaggatgaggcaggagaatcacttggaccagggaggcagaagttgcagtgagccgagatcatgccactgcactccagtctgggcaacagagcgagactccatcttaaaaaaaaaaaaaaaaaggcttagtccagtacctggcagatagaaagcactcaacaaatcaacaaatgatagttatcattatcattattaccacaaaccagcagtatactgagaatcctttggagaatctgcaaagttgcagttggtgtgtaatgggaaagtttgaggtgacagagactgattttgcaaaggctcataactgacctgaactggaattgctttgcttttaagccaaatgttactcagtgttccagatactttgccatttaacattttatgtgtcagtaacatatgactacttgcttttaaactctcagcatagatatcggaagatagtgattcttctaacctgtgccttttactgtatttttgtttcaaagaactgaagagttttttttattgttttcatcgatctgaaatctttagagaatccttcaggcagaggtaccaagattgatttacgtaggattaaggttcttttagtgcctcaatgacttaaagcagtctctgaacacttattttattgcagttacttattcggcattaggatcctcaatattcaggttgtttgtattgatccttagagtcaggggaaacatatctatgttctggaaagtcttaaactgaaatgaaaatgaaaaaagccacgcatcttgagatttgtgcttctcaagatcatacagctccttttaagtaggacataatttaatgactttaaagggacaaagaggtcacctaatcaggtgggaaaagcatacctctgggtatctggaggcccagtagttagttgggtctgttatcttaatatttgtgagaacatctgtgaataagtcacttggaaatattttattacatttatctatctgtaaatacatagtttgtttttctgcttatcagttcattcatttaacaaacactttcaatgcctattatgtgccacatattgtactataatagaaaaatatatacaatatgttgatgtatatttatgtgtgcatgtatatttatgtgtgcatgtatatttttatttaaaattttaacttcagtatgttaagttcgatagtcaagaggctattttcctcatcagaatggtaaaaggcaatttaaaacacctataggaaagggaaagagttgtcaaatttacgtacagtaaaataaggaggggttaacctaagaggaaggaagggaactaggatcccatctgttgctatagtatacgtatgtagtcacactgtgcattaagtcttaggaaacaacagtggtgagaggagacaaggaagagcagaggtgaggaaaacctagtgcttcacaggcaggtagacactctggtgccccattggtcagtattctgtgccaggctgtgcactgcacgccctccacattatcttttttgacccttgcaaaaaccctgaaacataattttacagaaggaggcgcagaaactcagaaacattaaatactttaagccagggttacccagtaacaaatagacttggagttagaacccaaatctgtctcattgcaaacccatgctccttccataatacaacctgacatatattgactgcccactagacaccgggctacctgggaggctactggtattgttatttccgtttagagaaatggaacacggaggagtaagtcacctacctgagttgcacagttggtcaaagtaggaaaacaccctgagcagctgggggagggtcatttctgggcctgcttctgactcacatccaggagtggcactggggagaaggagttgttaaacctgtaaactgtgaagatggtagtttattcaaataaccactaattcaagaccacgtcttagaaatgtctttgtctgtggggaaaaacctgattcttctcacttcccactttcctcacccctgatacaacacccacaccatcagtttggtgtttcccattctagatgagtgatttcaccactgtgtgttgaccaaccttgacgctcccatcttcctcgctgcccaccatcaccaccaaatcctttcggcccttctcctcctttctaaccccactgccattgccttagtggaagcagccacttagatgaacaattacgacagtctcttcacctctgtctttcctcactcccaaatctgtctatcccactcatgtcacaggacatttgcaaggctgctggcactggttcctacagtacctgtgcacagttagaagaaggacatccttcctctaggaatattcgtagcgcatggattggcaagcagagtatggacagggtcaacccttcatcatgcccttggctgtgcacctgcaggagtgaataatgcacagtagtgccacgtgtagtaacattgcttccttgcttaacagcttttaatgattccccagggcctttgggataaagcttaaatttcttcacatggcatacaaaactgcctttttagcttcttcccttctccccccagccttttgggctggtgctcctgcagcatgggaatggaagtgaccctaaatattccatgactatttttcctcttcccaaggtgtgctctctttcctctcactctttggtaatatcctgttcttccctcagtaacgagttcaggtgtcatcttctttatgaaacatcttatgtctcatgtctcatgcagacagcattagacttctgggcccattagcctctgtaaatgctttaattatggcactgactattatatcacagttacttgttttcatgactgtgttctacacaaagcccaattcagcagccaaaagtaattagaagggagctccagactaagtttctcaaaggacataaagggaaaccatatcctcagcatccatttattatcatcctttcctctccttccttagtcaaaggtcatcctcctactgttgacaaaagcattcctcctctgccctagcctatacggtttttctttcctcttcctatgttgctctcctccccacaaacctcagccctctctcctattgctttcttatatggattgccacagcttctccatcaggaaaaaagaaaacactcatcttcttcaggcgaagccataaattacaggattatcattgttaggttagagactgtgtcagccaggttctgctgggttctgatacaacaaaccctcaaatctcagtggcctgcacaaaggtttatttatagctcacataacatgttagcaacgggtcaactgaggctttgcctcacatgattcctttatcatgggatctggactgaagaagcagtctgtaagacatgcattctcatagcagagggaaaaagtaatggcacaaccacacattgacttttgaaatttctgctcagatgtggcatatatcacatatcctcacactctgtgtgccaaaacaagccttatgaccaagcatagtatcaatgtggtagggaattatatgctttctccaggcagggagaatgtcagtaacatggtaatgagtagagatatattttcaaagcagcaaattgggactaataagacagtatgctcaggaatacctcgtattaatattgttttgttttgtcacattcgcatggcacatcagtctgtgagcttacggggctcagatgatgtctcatacttttttttatgatttacacgtaattgcacatatttatataggaggaataagttctggtgatctattgtatagtaggatgactagaattaacaatcatgtattgtatatttcaaaatatctagaagagaagtttttgaatattctcattagaaggaaatggtaaatgttttgttctgaacacctagcatatttttagaaaaggaattttccatgcaagttaacaaagacctgggcagaagagagatctctgtagggtagaaatcacacttgaaactggaatatttgaaaattccaaatcaaaaatctatctttatacttgggtgatattcctatcagattaccaagcaggataggtagatggctgcttctgtggtgtgtagtttctcagagaaggaggtctcctctccaaagaatgtttctttctctagatccctatactacttaggttccattcaggaaaactgaaacctggcagttatttttttaaaaaaaggatactgtgggggaagtgaagaactatagtgtcgcaaaggaaacactgaagtcaagcagatgataactgcaggaagtgaagcagctactgcctctagagttgggggagcaaaatgaagaggttggggttatcggaaccaagatgctcagagaggccctgtggagctgagcctcggactcctggggaggagattctgcccttgtggtgctgggccctcaaggatatggggcaacggagtgagcctagtttggggagtgttgcttttcagctggaaactggaaccagctgccattgtgaggtcagaggatcattgctgacaggaacaggcaggcaaacaagaaggaccaaggtcctttcacctgttctcccttccagtctccctctcatgccctgtactgacagagcatatcagagagacagacagcaatgcagaaatgtagtttgcagagtctctattctggcattgtattatagaaaagagtaaggaaggggaaatcagagataacttaatagacagcacactccctaatacctggaattttacaatttgaactttaatcctttggctaaagtcatcctcaattaaaataaaaatgtcccttggaaagatgaaaattttaatgtccttctttattgacaccccattatgaatagtttattgaaaataagaagaggaagcaagagatacagatgaggtattttggccgtagcaggggcagatagagaatgccacaaagatggtggagggccaaaaaagagcaatgaaaacagggggatcatggaagataaattttaccaacttccagattttgcagatgcttggcagagtttctaggactttgctgctcccagcaatataaatgaacagcagggacagagatggatctgtccatttggtcaacattcagaacaactcagctcatataaaaatgagacccatgactaagatcagactaagatggagggagccatggttgagtcactgaataataaacttatgcagggacaattgcctaagtaattcaagcaaaaccttactattgactgaattacagtagtgccctaattagtggaacgctgagagcttagcttattctaaattggatttttctggtctgaggattaattaggaaatatttccagacttgttttatagattaaaaaaaatgatttcctctttattctggctcacttttgaatagcaaataaaactaatctctaataaatttgaatattgcattgttttcatttttgagtgtctatctcagttgagtctgcatcaagtaccagttctgtggcaagaactgtgtagagctggacaaagatgaatgaatcattttctgaccttaaggattaatggttgagctcactcaagctctggttggaaacacagggcctgggtgcccaatcccagctctgtaacttgtaaggtatgtgattctgagcttcaacctcttcatctgtaaattggaaataataaaaaatagccatataatattgtgaaaattaacaacacagtatatcagtgcttatggtatatgttcgataaaggtattttatttttgttgataattttgatggaaccttatatataaatagataattttagtatatgtgaattctataaatgctgattttcatgatccagtcttaaaggtagatagtttaagattggtgggaagttttcccaattctaggatattacttttttctcttacttttttcttctcttttctatagcatcctttctcctttcttttcccctatcatttcctcttcctgcctcctcctcttcttccagaattatccagattgctatccacctctccatttctcttggttgtgtatacctagccaatatcaaaggtactgtttggcctactgtgccttaccaataggttttcaacctctggctcaattaatgcatatccttttgttagataactgactctttaaaatatttattgatgcaaccaataaataaaaagaaaaaggctattccccagcctttttctactgtgatactttacttatgcaacatgctccctcatgttttcctgttcctgcagaaagcacgttagaatacctgggagtaaaatgatcctattataaaggtaccttaaatccattctgatttatttttttaatcattcccaagttttggcattctaatcatcattactgtcaaatacacacctcaccattttgtcttattaggatgttgtgacacatgggtgaataagaccccaaaatttgactattgcttctttcttaagacctgtcctattggacatgcacccttagtcctagtaatgctcttcctaaagtaggtacttcctcaaaacacttgcacatgtgcattttgcagaacgttcattagagcattgtttataataataaaactttataaatagcctaagtatccactagcaagacaatgagccagtaaactgtactgtcccatacagtagacttctgagcagcagggaacatgatggactagagctccttgtatgaacatcatgaacctcaatgctgagcaagcaaagcaacttgcaggagagtaattatagcatgataccatttctataaagttctaaaatatgcaatactgtatttttaggaatacctgcatgttgtggattataaaacattcctgatagtggttacctctaggggaggagaatacaattaaaaaggaggacacagagaaacttcaattatatttgcaaacttttgattcttaagtttgttagtgggtatataggtgtttgatgtcgttcaccagtgcatttttgtatgtttaaacatattttattaaaagaaaaagatgttcacaagatcttatttcaaaatagcaggaacttatacactgggggcctgtttgaaccatgagagtcagtaatcttataaaaagtgacaaatagtgggccaggcaccatggttcatgactgtaatcccagcactttaggaggccgaggtgggtgtatcacttgaggtcaagagttcgagagcagcctggccaacgtggcgaaaccctgtctctactaaaaatacaaaaattagctgggtgtgatggcatgcgcctgtaggcctagctacttgggagactgaagcagaattgcttaaatccgagaggcagaggttgcagtgagcggagattgcaccacggccctccagcctgggggagagagtaagactccatctcaaaaacatttaaatgaaaatttttaagtgacaaatagatgataataaaaatcatgaaactaccatttatgagcatcatgtgtatgtaaccacactgcatgcagtatctcttaatcctcaaacatcctctgaagtgggtgttatggttgtccccatttgaaagataagaattctaaggcttagagatgttacttttctaaattcaaacagttagtgcttggcagaaccaagattctaacccaggtttgttttttctttaaccaacaaagtagatattattgtattccttcaagatgttgtcattccaaccaataagatataacctagctatattatttgggggggaaaagagtgacccagaactcagagttttgtttttgtttcatttggagataaggtcttgctctgtcacacgggctggagcacagctgcgtgatcatagcttactgcagccttgaaatcctgggctcaagcagtcctcccatctcagcctcccaggtagctaggactacaagtgtgtgccagcacactcagcttgagtttctaaaaaaaaatattgcgagctgcccacatgtttacaatatcttgggctcacaaaaggtaaattctatctatgaggcgacttccctcaaaagtctaccttcaagctggaacatcagtatttgtcagtctaatctagtgcataaaatactgagccctaaaagcaataagaatcattgtgaagattctgactttatttcaatgtggatgttttatttttgaaaataattcaattttttaaaatgttagttatctttgacaaatatgttattccaaagggttccttccttccttcctttcctaccaccttataaattaaattaaaattagacatgtatacattttaaatagccctacaaggtttgttttgaaaaacagcaatcccatgcttcaaccctttatatttgcccctcccaagaagcagcccctttcaactcttttacctgtttattttggcaattaatgcctcatatctaaataaactattttattattactttgctgtttttcagttatagcagaatctattacttcccccatagagaataagaatttgctgtttgtttcttccctacaattcttactacagtagatacctattcttatcctttcaacgtagttatattacaatttaattacattatcataatgtagatcactatttacataatgactatacaaatgctacccagagctaggtcatatagtacaatatgaatcattttccttttttgcgctatttttgcttgaactggagtaactcattctcttgatttttaattttcaaaattttctatgtacctattactaattccatcttacattctgccagttatttggcagagtttacctaaattgtctaaatttcaagatgttcagatgcatcatacgtaatcaatttcatcttcctgagaaaattactctggagccttctgacaagttccaatctgaactcttgccttccgctcctgttataaattatcatcttggtatcttcctttaccaaggatatcctaggattctctttgtctttcacttttgtggcatcttctgtttcctgtgtatcatttcttacactttttttattgtaccctcattttgcattctctagtgacttcctaataagattacgtggatgatattatttttgcgatcatgcatactgttatgggtcaaattgtgaccttctgaaattcacatgttaatatcctaacccccaatatctcagaatgtggccttaggtggtgatagggtctttaaacaggtaattatgttaaaatgaagttattaggatgggccctaatccattatgactggtgctgttatataagagaaaattaaaacacagacatacacacagagaagatcatgtgaagacatatagagaaaacagctatctacaagtcaaggagagaaaatttagaagaaaaaactctgctgacagcttgatcttggactttcagcctccagaactgtgagaaaacaaatttctgttttttgagccactcagggtatggtactttgttatgacagcccaagcaatgaagtatatgttcattatactgcactcattatgatagttgggctaggtatagaattctgtataaaaccaaaatctgtttttctcacaatttttaagttcttgatcttttaacttctaaaattaatattcaatattcctgctgagaacttcaaaaacattccaattcctaattctctgtgcgtaacctttctcctctatggaaccttatataattgtctctttggcctcagtgttctataatatcataggaatgtatcttgatgtggttctatgtttacttatattactggatgctcagtgaaccctttcaacctgtatagtcttgtctttcggttcagaaaaattttcttgaataattcttgaatgttttagctgatttattccttttttgtctttctggaattcctatttttcagttattggacttcctgggctgatcctctaatgtccttatcttcctctttttttgataatctatatatttttgctctgggagaattcttcaagttattttctggaccttcaccccacttctttaggtcactgtgtgccccagttctaagattttctgggatttcgtagtataaatattattgttcttgggttttccccagaactggtttagcattcagttttttctggttttctaagtctattattacatagatctgtctgcttggcacattccaacattttgatgctgttgttttgtgctatctttgttctatgagtgttcttactgttatttaaacatacacacccactatgcatgttactatcattttcatgggattttgagagagacagaaaaattgtatgcaaatgtttaattttccatctttacttggaagctcaagagcaaatgtttcttaatttgtatttaacacttagataacgaagatgatatcatgaagtacaattagaaatggccatttgaataaggaaaatgactcacagtcctttacatttcagtaacctgtcatcctgatctaaaaaaagaaactttaaaatctttaccaaatagtcagaactttcaatgttatatatttggcctgacaatcttctcatctttttgctcataaaatgtctactcaagattagaagttagatattgtgctgcagttgcctaaggcccagaaaacgctcaaaataggccttgtcacataaaaaattaattggttgctttgttcctacttagattttcattaatttgaggacataatataagtgacagttaactgtatcacctttgcttctccttgttaaaaaagaaatacctatttaaaagtctaattaagaaagtttcctgaaatatttatttttaaggcattaaccttcccttattatattatggaataacacaactttaaacatcagaaaagactggtatgttggttatctattgctacataacaatctactacaaaatttactgacttaaacattttatttgcttattattcttttgttttagcaatttgtgctagattcagctgggaagttcttccactgctttcacctggagtcaacatgtggctgcagttgtccctttgctcaatgagctggacagtccaaaatggtctctgtcattcacatagctgggggatgctgccagctcttggctgcatttctgtctccacatggctcatcttcaaagaggctcgtttgggcttctttaccctggcagccttggggcagcattccaagtgggcaagaatggaagctgcagaacctatgccaaaaaatcatggaaattacttctgctgtatactgtagattaaagccattcacaaatccagctcagtctacctcttgatagaaggagcaagaaattcacatcccaaaggagtgtatatacagacataggaggaatcatggccttttttctttttttttttttttttgcaatctaccacagactgctgtctggctgaaacttattcacattttttccatatagaaaatattctcattcccattccaggatctccatgggtctcatcccaatattgcatcaggttcacagtcttagatctcatgctctgcatcaggtgagttgaggatgaaaacccttggctacaactcctcaggtgtacactctttgtgagccagagacctgtgaatgaaaaagacaagttacctgctccctacaattccaacacatggtgatggaacagaggcagaataattacaataggtactgccattcaacatggggaacaacaagaagactgtagcagtcacttgttcacattaatctgaaacccagctggtcacatgcttcaggctccttcactccagggtcaaaaaacctaccttgattagttatctgtttctgtttcctactttgccacatgccttaaatttttagattcacagaggtcaataatgtgactataattctaaaataattgtacaaaaccatctgtaggtagttaagtgcttcttgacaaagttaccccttcctcctgaagtttttaaccatgcagattttcatacctttgagaatacttgtttgtttgacccacctcagaaatttcataatatatgtaaaaaaaaaatggaaaaaccatcttccttgcctttacttccccaaaagtagtaccacatacaaagcatcattataaaatgatactgattttgagaatcttcaaattacaaaaaaagttaaaatttatctataatataacctgacagtttctggaacacccagtggttctctatgggaatcacatgatttacttatttacttggggcctagagtagagcatgagacagaccaagccctgccctcacagagcttgcagtctgtagggggagaggggcagacaacaaaaatgtagacacatccccacctcatcccagctctatttttaaaaattttagggagtaaaacataagagaataaaacagggtaatggaggagagagaatgagtgacagagtgagagagagagattattggggcaggagagtgactatcttagctaggatgatgaagaggtgacatttaatttgagaacaaaatgttgggaagaaacaagttgtgcaagaatctaagaaaagcatgatcaaaagccctgggcagtaacagtctgggtttgtttgttcagggtcagaaaacaaattcaatgttgcttgtttacaatgagcaaagggaagaaaggagataaggtcattggtatgggcaggaaccatgaaggactgtgtggaaaggtgaagtcattgaagagttttaactggaaaagcataagatcttattcattttttttaaaaaatcattgtggttgctgtgtagaggatggacaaaagagacagtgaaattagatagtacagttaggaagctattgtagtagtcctagaaacaactttgcagtaggagggtgagaaagggtcagattcaggataatatttgggaagaggagcccagagaccttgatggattggatgttgggcataagagagagggtcaaggatgcatctcaagtttgtgacttgtgaaattgggtgcacttcagttccttttttttccacttttattttaggttcaagggtacatctggagaaaagggaactctcatacactgctggtgggaatgtaaattagttcagccattgtataaaacagtttggtgatttctccaagcatttaaaacataactaccatttgacccagcagtgcccttttttaagatggaaaagcctaggggaagaacaggtttttcctttataagggtccagatcaaaagttctgttttggaaatatttggtttgagttttttcttagacatcaagcgagatgtcaaacaggcagttgaatgtgggagttcagtcatttaccagcaagccttgatgacttgcctcatcaatactttatagtctcactttgtgactatctaaccctatccttgggcaactaagacatggggaccctcatttcctgacaagtagagactcaatgaattacccaaggacacacaactaaagtggaagagcagggcttgaaccaggtcttctggcaacctacacatagtcctgtagggcactgctaacccctcctctactctcctgcttattgtaatcaaggggagatgcagggttttaagataccattctggaggcagtgggtgtgccacatcctcaaagtgtcacccatgacttaggcaattgtttatccatgctgttcatatagtatccaccagccacatgtagctacttaaatttaatttttaatcaattaaaattaaactaagttaaaattcactttcttagttttactagtcacagttcaagtgctcaatagttacatgagtaccatattggatagcacagataaagaacattttcatgatctcagaaatttctattaaacagtgctggagtctagattaatctaatgttcccttcagttatattaatttgtgaagaaagtgtagtcttatcctaaaagctgtgatctaagaggaaagtttaggaaaaaaagaaagttacctgctttaaaattagcatattttataataagctgattttagatccagcattaatgagcacctttccccagctcacacccttgaatatttgtgtgtttctcatgttatctatgaaggtgtaggttcctctgaggagagaaactaggtttttttcacctttgcattcccctctcaaaatatataaatatacaacgcccatgcccatatatacacaccctcaatacatattgctttgcacagaacaaacataatatttacttgttaaatgacccagcatatcacagcattttacaacactactgtggacagttggccacaggaagaacctatcaatcagagcaaataaactccaggaggtctgtaactaaaacccgattgcgcagcgtatttatttctcatttctcccttcctagcaaaaggaatattgggacctcaatcttccaccaccccgggtgaaaacgaggttgctcactaccctagaaagcataaaggtcgagcctagaggagagtcagtgggaagttcaggccctggtctgcccattacttcatgagcaggccagcaaggtcttcctcatggggtgtgatggagatatgcagaaagcccttcacacacatgcacacaggcagacctgggcccctcacagttcccttcacaaacgcaggagaaaatttggagcaaaacagatgttttctgaattcctccttgccacttgctgtttgtgtgactttgggcaaattacattagcccgtcaaagtagcaggataaggagatgtgtggatataggccttgatcacagagttgatgctacacccattcagcagtttattcccctcttcaccgaatttcagggggaatgtgagagcaaacctagaacagaaatgtgctttccttttaagttttctttttaaaaatattttcaaatgttttttaagaggcagaatctcactctatcacccagactggagtgttgtgttcatagctcactataccctctaactcctgggcctaagggattgccctgcctcagcctcctgagtagctgggactataggttcacaccaccacacccagctaatttttttttttgtagagatggggtctcactatgttgccctggtcttgaacttctggcttcaagcggtcctcctgcatttgcctcccaaagtgctgggattgcaggcatcagctactgcacccagccaaaaattgcagttttttaaaaaatgtgtaatagtacttacacatggtaaaaatttcctaagtatgtacaatgaagttttcctcctgtctatccagccacccagttctccccagaggcaaccaatgttttccgaggtgtatgtgtcctcccatagtcattctgtgcatgcacaagcaaatatgcctatcaacatattcatatgcatgtacttcctaatatgtgcacattttcctctgacacaaatagctgtgtgactgttttgaaccttttctccttgtcctgtcttggagatttttttagatctacaccaagggcccttaatctatttacaggtgcagaatattccactgtagagttgtaccataattttcttatcctatcccccactgattaataatttaggttatttccaggcttttgctattataacccatgccataatgaacattgttgtacatctgtcactttgcacacgggtaagtatatttgtagaatacatttctaaaaaaagaaatccctagattagatggtatgtagtgaagatatatgcgtagttttgatagacctgaccaaatggcccttaaagagtttgtatgtttgctctccccctagcagtgcatgggagtggatatgagtttacaagccaatgtgaagccctggtcagagactgagccccaagcctcatgtttgccagagttgcttagcttacattgtgtgcatgaggggatgggggatatgtgtgtgtatgagagagagagagagacttcatttggagaaagctgtggctaactgtgagaaccatgatatggggaatcatcactgttccttctcataatcctccagtttgaaagaatgacccagaaaatgaaagtgttccacaccccgcaggaagatccttagacatgcagtgtggaggcagtagttcagctgatagctagaagagatggcaagagcaagagcagaggccaaggtataaggagatgagatttagtttcatagcccctgtgttaggttatttgcattgctataaaggaatacctgagactgggtagcttataaagaaacgaggtctattttggccacagttatataaacctgtacaggaagcatggcaccagaatctgctcctggtgaggacttaggaagcttccaattgtggtggaaggtgaagagagagcaagcatgtcagatggcaagagtgggagcaagggcaaggtggggcagggggaagtggggagccacactcttttaaacaaccagctcttacataaactaccagagtgagaactcactcattaccatgggcgtaacaccaagacattcatgagagatccacccccatgaaccaaacacctcccaccagaccccacctctaacactggggattccatttcaaaattagatttagaggggacaaacatccaaactatatcagccaccaacattagctagtgttcttcagatggtcagctcatttgatccaactttaagtgtttatcatgtgctaagccctttacctgtgctggaaatacagagatgagcatggccggtttctgccctcaagaagctcacccaaggaagtgggccatgtgggcggacagctttcatggaatgtaatagaaactacagcaatgatgacagctaactctgagaacatcttcaatgccagccagtgggctcagcactgcgtgtcatctcacttaattgtacaatagccctgtgaaggtgattacagtgttatccccatttcacagatgaggaaaccaagacccagaaaagttgagggatagccctaaaaccacatcataggtggcactactggagtatatgctgaggtctgtctgactgcagagtattgagataaatcagagtgttcagcatactcagagctaaaagtcgctcctcctcctccatcagtggttctttgcttccttctctctttatagcatcacattagttgttctcacgctgctaataaagacacacccaagactgggtaatttataaaggaaaggaggtttaatggactcacagttccaaatggctgaggaggccttgcaatcatggtggaagatgaaggaggagcaaaggcacatcttacgtgttggcaggcaggagagatcatgtgcaggggaactgccctgtataacaccatcagatctcatgagacttactcactatcacaagaacagcactggaaaaactcacccccatgattcgattacctcccaccaggtccctcccatgacacatggggattatgggaactatgattcaagaagagtgtggggacacagctaaaccatatcaagcaccacactgcatttcagagtgagggcatggaagtcaagccagggcctctggggaagatatggcctgagctgagatttggaaacaaatgaataaaaacctggaaacaagagcaatctggacagaggaactctcagctgacctccaggagactcagcctccaggcctcaggaagtagctggcagacagaggcaagcgagcaaacagagtcaccacaggggtagcctttggagccagactgcctgagttcaaatgctggttcagcccttttttagctcagtgacgttgggtgcatcacttaacctctctgattcttcacctgtaaaatgtggctaataagtactacttcccttatgggttgaaatagggattgaataagttcatgtattgagactgtttagaatagtgtctggcacatgccctgtgtgtgtattcctctacagaacctccaggctccaggtacagcctagatgtaaggaaaagaaaaacaaaaatttgaagcttgtctgtggtgcttattatagagaacatttacatgtgctcagaaaatgtaatgtgatgctataaaaagggaaggaagcagaaaaccatttaatggaggagggacatgggcttttggccttcaattttcttgtcaagcatagttgtgcttctcagctttcagttatcatctagaattgtgaggcaaaatgtgctttttatttattgtctatttctttatgacatctttacttggtgttaaaatataatggcctgtctcaaatcaggtgaaaaagcagaggaagataaaatacaaagaaacacattcagtgagactctcggttttctcctcttcctctttgatgctgtaaaatgttttcagagataaatgtcagataaatgctgcagcatcctcatttacccacacagcgtttatcgctcatccaccaactcaaattacctttctccaagagcggtattcagtaagagaatccaagagaagtaaaagtgagagaaaaatacttcggtaaatcagttctcatgatttactttttgtctccatattccctggcctttctttcctttatctgttatcccaaagtcacatttccagccctgtttccaaaccaaaccccatgcttggactactctttctcgaggccaattttttctcttcctctcattatttgaacaactcctgagaattcatttccttgaagaaaaacatttagcaaattccacatcataaattaccatgaccctcacatacctgtgtaccagccactcaccggatccctgggctacagaagtgatgattcagccctttgtcctgaatgagctcatggtcttacatggaaggaaaggcatgcagaaggaggttgaccttgcctttctctggcatacactcacattcatttccttgatgctcttgcttccccactatactgtaagcttctcaaggacaaggattttatctgttttgtttaccactgtataatttgtaccttaaaagagtatcctcagtaaacatttgacgaacaaatgaaaaaaaaatgacaatatggaatgatcagtaaattgatgtgcttgcaaaataagaaatagcacaaaggaaggagtaactgaatgctttgggggacagaagtgtagttggaggggtggggagacttgctggaggaggtgacttctgagctgagtgttggggaaaatgcctacatttatatgcctttgcatgatgtccagcttataggaggtgcccaaggaaagtttgcagggttgataaactttataatttatgaaggagttacatatacagtatctctaatattctaccattttttgcattcgtaaaaaggggaaacatggccatttcatgctggattatgtaaacctggaagctctatctgctacctagaaaacctcttagtagggtacaagcacctactggaaagccgtgtgtgtgtgtgtgcgcacacacacatacacacacatacctgcacatgcacccttgacaaagtagagactggctagggcacttgctgggaggcaaatcaatcttaagtgtgtgctttagaagaaagatcctattcacgaaagaacatggaaaaggtaaggacagaggtgatttccagagactggcctctcacctcacctgtgagccagaccacagctcattacctaactcctatatccaccacccaagccagttttatatcttaaaatttctgaaaatccattgattatgccatgggagagcctgaggtaggagagaagaggagagaaaaacaaaatgaatttttagttgaattaatataatgagcttactgagaaaaaacaagatacaagacctagacttgctattagtttatttttaggtttcttaactttgtttagctccagctccttcctagcatgaacgatgttgatgctgaaaaccaaaactactcatacctatgagcctactatcctggtgtgatctctggctccctcaggctgttccagacacaccctgtctatgactgactgaagacatctgcatctgagcaacaccaaattataacaaaaattagatccttcacctccgattaattctcaacttgtatttttaatatatgtatgcagcttcatcatacacaacaaagaaacgttcttcaacaatgccacaagaagtagaatcgtgcatcacattttacaaagaataaaatatgaagaaggaaaaaacaagattggtaagtagtatgttagtataacaaactacatttggcatttgggaattacagacttcttcccttggttttattaagtttgtatcaattctagcaatgcttgtcacttataaaacccctaactaatcctttgatgaataattcacaagtgtaaaatcttcgtcgcatccttaaatatcttctttaaatagcatgttgtctcatttgtctaagatcatggagaaattctctcattttagaaaatgttgtgtgccaggcactgaactagatgttggggagatatgcatagttctgatctggagcttgtgttcaagaaattaaaagcagacaataaaccaataagtaaatacaataacatgaagaaattaaactggatgatgatacagagataggctggtaaaaggtgggagtgagttcaagctgagatttgatgatgagggcaagcttcactgagaagctgaaatttgaactgagacctgaatgctggggaaccagtgtgggaagatcgaggggtagggtgttcccatgcagagggagctgtaagcacggagatgagctgtcccacaaaagcaacttctccagtcatctcctccattaaatagcctctaccatatatattttaggcatttttatgagaatgtgtccatattatattacacatttcctgccttattaaacagattattatatatcaggaagggttgggtggctttgttcttatctctttttccagcaagttttttatcaatagttttaataatgacctatatcagtcagggtctaatcaggagacaaaggcacaagtaaattgaacagagaaagttttatataaataattaactgtgacaggggattggagtaatggagggttggctagtcaagggtaagaataactctaaagaatacaggaatagcagatgttaggagcagctaccacctctgagaagactcctcgctacaatgctaagctgcagatcctgctggaagaggtacagccatggcagtgcagtttgctgggggctctagaaatctgccctctggagtactgggggaagctgcctcgagtggctccaaggaagtcattctttgggagttgctacatcagcagcactactctgtgaagccccccaaggggatactgaaaatctgcctttgaggagtaccatgtgtttccagccaccacgcactgcaggagctgggtactgtagaagtatgtgctacagaagcctgctgagatatcatactggtatcaggaagagaaaccccttcctcctccagtgtccctcccagtgtcttctgctggcaaagcttaacattgaatcagctgacaaaggagaaatagttacaatagttacattattgcaaagcaggcaatgaaggtgcatttggagctgaggggaaataagttaatatctggtgcatagcccagatgacctgctcatcaagctttcgggtagggtgaaactagaaggttgcattaaatgacaagactcagtagctggcactcagccaaatccagcaagatgacatttaataattttgcgttgaccatttctaatgtgtattttcttttcctttcagtcttttaaaaaatatttactaattcagtgaaaatgttatttaaacatacatttggttattaatgagatttgagatttttcaaatgcttattttattcatttacatttgttcgaatagaaaaggaagtacataaaattttacattaatatcactgtaaaaaattaaaaaaataatttttaaggtaaagtcttacagtcaaattcagcaaaacaactaccttggtacagtgtgggagaaatgttgctcaacatcataagaggaacagatttgagagttgagctgaatgcaagcttggtgtgagtcactagcataatgactctgccaaaaaaaaaaaaaaaaaaacacctactttgatcccaagctgcataaattaaaatataacatggagaaatagatagctttctagtccagatctgattacaactggaatattatgttttgtgagagtcaatgtatgggggtatggtgaagtcaaacctgatttaggtctttcttaactttgatggattttagttaaacacattcccatttctctgcattagtcatccttccttgaaacacattccttcaataaagtcctctgtgaccattccagcttgaatgaattcttctctcttctgaattcctatggcaactatttttggagtctatttgatagttagtcatatacaactcttcttttgttgtcttgaactacattcaataacattatgaaaatctaccacataaagagaaccactcataacatttgcgtactgaataatttaaatgttaccttagttacttttatatcttaatttcttattcattcatatggtttttagaaacaaacttaggatgtgctatgcatcctttttacgaacttttttcagttaacattgtaccataaacatactagaaagcaagtgagtgaaagtgaagttattattgcagtagctgttctgaatcacttcataaaatgcaaataactccaaatggcatcttcactaataatggtattatcatttgcagtacaacttatgactcttttttttttgttgagacggagtctcggactgtcacccaggctggagtgcaatggcaagatctcagctcactgcaatctctgcctcccaggttcaagtgattctcctgcctcagcctcctgagtaactgggattacaggtgcccgccaccatgcccggctaattttttgtatttttagtggagacggggtttcactatgttggccaggctgatctcaaactcctgatcttgtgatccgcctgcctcggcctctcaaaacgactctttatgagacactagtgtattaagaatctgcagctgaatgctgctcatctggataataagatccttaactgtaaataaactgccttatttatctttatatcatcactgcctagcacagtgcctggcatatagtaggagttcaataaaggcgtgctgaactgaaaagcttttaaattattgtgcctaattttgcgtctcaaaatgtgggatgcttttataagcaaaagaaggacagagacagtgatttttaaatgttctgaagaagcacaggaagtgtagtattgttgctagtcagaaagggtctttataaaagtttctttcatttgatgaaataaggagttttctattcaaagacctccatgtgttgaaaattggtaataggccaggcacattggctcatgcctggaatcccagaactttgggaggctgaggcaggaggattgcttgagcccaagagtctgaaaccagcctgagcataatggtgaaaccccatctctacaaaaaatacaaaaagttacccaggcgtggtggtcagtacctatagtcccagccatcaggaggctgagatgggaggattacttctgggaggtcaaggcggcagtgagctgagattgtgccactgctctccagcctgggcaacagaacaggagtctgtcacaacaaagaaaaagaaaataataaaagaaaattggtaatgatgaactggaatcatatctaattagaaataaccaatcagatagtaaattattaagccacaaccaagcattatgctgaaaaacatggagcaaaactactaatggcctgtagattcaatatttcattatcatctttggttttgtaaataaaagaaataatatgttagaagaaattttaatttcttgatagaactaatgtttatccagtattattttctgcctgaaactctttctgaaagtggcatcttgcatgagccaacatcgattagaaataacatgaaaatactgatttgtagacatgattcataaggatattttagtggaatgtaaactgccactatgtacatttttcaacttcactctgaatttatttcaactgtaaaaatcaaacctggtgaaacccactttcaaaatagagccatttaatagctcaacaaagatttatttaacaatgtgggtgcatacaataaatcttgaaattgatttgtatttttgaatttggtgcttagaggagaaattagtaaagtgaaaaagatttcaaatattggctactttctcactttgcaggactttgataaattatgataaacttataaaagttatcatctgaggccaggcacggtggctcatgcctataatcccagcactttgggaggccaaggcaggtggatcagttgaggtcaggagttcgagatcagcctgaccaacgtggtaaaactccatctctactaaaaatacaaaaattagctgagcatggtggcactcacctgtaatcccagctacttgggaagctgaggcacgagaattgcttgaacccgggaggcagaggttgcagtgagccgagatcgcaccactgcattccagcctgggcaacagagtgagactctgtctcaaaaaaaaaaaaagttatcatgtgagtctcttattaggtccttatgaatcctattttttctaacatctgggatgtttgaaagttattgatgagatatgtagaattcccaatagagactccagggaatcaaagctttctacatagtaattcattacaaaggtatttattgagggcctctggtgcgctagacaaactataaagccttgtgatatttggatttcaaatgtttttcttagatatttagtattaatgtgaagcatcttaaaacatattaatgtgttactatgattaaaagcatctaaatattgattgatcctccatcaatgaaaagtgaatcagtgcatgtgccattttccagttaggctaaacctctagattctggtaaggatctaaagcataggtagcattcctctcaagccacttgagaaattatgataatctcctttgaggtgtattttaggaagtagcagaaatcttgatctgaaaggagctttaaagatcaacatgttaaacttccacttctggccaagatggagcaacaggcacaagatttactctcccacctgaaacaatcacaaaagaaaaaacagacaaaatgtatgaaacaactattttcaagacactgaatattgggcaacccaaaacaaggatctctgagagacagaaaacaaatgaaatgagccctgctgggccctatcttaccaccttgacatagtttctagacagcaccatgaaaagtgagaatgtaggcaggacctgaaagactctctaagttgagaagttgttgctaggagttgggaaacaaaggcagcgagagttcacagaaagaagtaccggaaggcagcgagagttcacagaaggaagtaccagaaagcagagaactgcacagggctagaaccttgaagatctgtagagggtctccctcaagtattcagcaagtgctgatcagtgcatacatgtccggagaatacccaaggccagagaaagaaccatccaaaagaatttccagtaagactggaacacctcataattcacagagcagtgaggagaatactcagaaaagtctttcctcctgcaaacataaagaaaatttagcaaataaagtttaacaatgtataacaagggtaatacatcatgaccaagtagaatttatcctggactgcaaggttggcttagtatatgaaaatcaatcaatataattcaccatagtagcaaactaaaaaagaaaaaccatatgttcatatttatgaacatgggaaaagcatttcacaaagttcaacatccattacagataaaaactcagcaaactactaatagaaattatcttcctcaacctcataaaatacatctatgaaatgcttatagttaaaattatgcttaatgataaaagactgaatattttcctcccaagataatgaacgggacaagtatgtctgcacttgccacttgtattcattttactatccagtgcaataaaataaaaagaattaaaactgtcctaattatcagatgacatgatcacctataaagaaactcacaatggaatccattaaaagggactaataggtgaatgtagctaggttgcaaaaaatgagattgatataaaaactcaattgtatttctctcaatctgcaacaaacagtgagaaactgagattttaaaaaccaaatcacttataattagcccccaaatatgaaatattaaatacttaaggataaatcaaacaaaagatacttaagaattgtacactgaaaactacaaaacattgctgagataaatttaagaagacccaataaatggagacatatactatgtttatgagtcagaagactcaatattgttaagaggtcagtcttaacaaattgatctatagattcagcacaatccagtcaaattcccagaaggtgttttgtgtgtgtatatgtgaaaattgacaaatgaattcaaaaattcatagggaaatgaaaggacctagaatagccaaaacaactctgaaaaagaacaaaaagtcaagtctttgacttgagacaaagggtcgaagtcaattcagtgggtaaagaattgacttttcaacatatgatactgaattcaaacccatatgcaaaaaaatgaatttaggaaaactcgtatacaaaagttaactcaaatggattatagttcaaagtgtaaaatttaaaaccataaaaattctaggagaaaatagaaaatctttgttaccttgggttaaccaagggtttcttaaataaaagcataattcataaaagaagaaaaaaatggataacctagacttcaaaattaaaacttcccttttcaaatgatgttttcaagagaatgaaaagaagggtggggccaagatggctgactagaaacagaagtgatcagaggctcccatcaaaaagaaccatcattaatgtgtgaatccttcattggcaaccaaggtatcttctcatcagaactgactaggtggctagacttgatccacagagaggaaggaagagcagtgtggtgcggcagcccgtctgagagccacacggggcaggggagcccccactccccagccaagggaggcagtgagtgagtgtggtacccagcgtgggaaaccgtgcttttttccatgggactgtgcaacccacggattagaagatcccactcaggaacccacgccactgggacctagaatgccaaccccagagctgcacagattctcaacaacctctcagctggaatctgcctaaccctgcagagctcctgcggggaggggtgaccagtgccacagctgctgctgcctgctgcctaagccatttgagctccttgggggaggggcagcagccagcactgggactcataactgcctgataagctaagctctctgtgggggaaaggatggcatccatctctataactccaggccatgcttttcccctgctggagccagggaggctggatggcttggtccccaagagtggtcccccacagctcaacacactggctgtggcagactgcaacaagagcgcctcttcaggcactgacatatccttcctcacttcctatatggtggggcttccctacaggaactccaataactccagccagagactcagggacagaacctggatctccctgggccttatcccctagtgggaggagtggctgcagtctctgcagaccagcagacttagcccagaatgccacccagcaaggcacactccctccaccaagagacagtgaaaatgcttcattaaatgggtcccatttcccttgtcacccaaataggtaagaccttccaacaggggttgtcagataccctatacaggagtgatcctactggcatcaggttggagcccctccgggttagagatcccagaagaaggagcaggcacccatctttgccttctccagcctgcttgagtgacatctccaggtgcgggagcgaaccagataaatagggcctaaagtgaacccccagcaaaccacagcagccctacagaggagggacctgaccagtgaaagaaaaacaaacagaaagcaacaacaacagcatcaataacaaaagaagtcctcacaaaaaccccatccagtggtcagctgcctcaaagatcgaaactagacaaactcacaaagatgagaaagaatcaatgaaaaaatgctgaaaacccaaaaggacagagtttctcttcccctccaaatgattgcaatgactctctggcaagggcataattgggtgaaggatgagatggacaaattgacataagtaggcttcagaagatgggtaacaaaaaactccactgagctctaggagcatgttctaacccaatgcaaagaagctaagaaccttgaaaaaaggttacaggagctgataactagagagagtttagaggggaacataaatgacccgatggagctgaaaaacacagcacaagaactttgtgaagcatacacaagtatcagtagctgaattgaccaagaggaagaaaggatatcagagtttgaagaccacctcactgaaataaggcatgcagacaagattagagaaaaaagaataaaaaggaacaaacaaaacctccaagaaatatgggacttcataaaaagaccaaacctacaattgattggagtaccacctgaagcagacgtgaagaatggaaacaaactggaaaacaaacttcaggatattatccaggagaatttccctaacctaggaagacaggccaatatgcaaattcagaaaatacagagaacaccactaaagtactccacaagaagatcaaccccaagaaacataatcatcagattgtccaaggccaaaattaaggaaaaagtgttaagggcagccagagaggaaggtcaggtcacctgcaaagaaaagcccatcagactaacaatgcacctctcagcagaaactccacaagtcagaagagattgggggccagtattcaacattcttaaagaaaataattttcaacacagaattttatatccagccaaactaagcatcataagcgaaagagaaataaaatcctttccagacaagcaaatgctgagggattttgttacccccacgctggccttgcaagagctcctgaaagaagcactaaatatgcaaaggaaaaactggtactagccactgcaaaaatacaccaaaatataaagaccaatgacactatgaagaaactgcatcaactagtatgcaaaataaccagatagcatcatgatgacaggatcgaattcacacataacaatactaaccttacatgtaaatgggcaaaatgccccaattaaaagacagacaggaaattggataaagactaaagacccattggtgtgctgtattcaggagacccatctcatgtgcaaagacccccataggctcaaaataaaggatggaggaaaatttaccaagcaaatggaaagcaaaaaaaatgcaggggttgcaaacctcatctctgacaaaacagactttaaaccaatgaagatcaaaaaagacaaggtcattaaataatgataaagagaacaattcaacaagaagaactaactgttggctgggcatggtggctcaaacctataatcccagcactttgggaggatgaggtgggtggatcacgaggtcaggaaatcaagaccatcctggccaacatggtgaaaccccatctctactaaaaatacaaaaattagctgggtatggtggcatgtccctgtaatcccagctactcgggaggctgaggcaggagaattgcttgagcccgggagacagagattgcagtgagcctagatcacaccactgaactccaacctcgtgaaagagcaagtctccgtctaaaaaaaaaaaaaaagagctaactattctaaatttatatgcacccaatacagaagcacccagattcataaaacaagttcttagagacctacaaagagacttagactcccatacaataatagtgggagactttaacactccaccatcaatattagacagatcaacaaggcagaaaattaacaaggatattcaggacttgaactcagctctggatcaagtggacctaatagacatctacagaactctccaccccaaatcaatagaatatacattctcagtgctacatggcacttattctaaaattgaccacataattggaagtaaaacactcctcagcaaatgcaaaaaaactgaaatgataacaaacagtctctcagactacagtgcaatcaaattagaactcaggattaagaaacttattaaaaaccacacaattacatggaaattgaacaactcgctcctgaatgactcctggttaaataatgaaattaaggcagaaataaagaagttctttgaaaccaatgagaacaaagagacaacataccagaatctctgggatacagctaaagcagtgttaagagggaaatgtatagcactaaattgcccacatcagaaagctagaaagatctcaaattgatacactaacatcacaattaaaagagctagagaggcaagagcaaactaatccaaaagctagcaggagacaagcaataactaagatcagagcaaaattgaaggagatagagacacaaaaaccctccaaaaccaggaactgtttttttgaaaaaaataagaaataccactagctagactaataaagaagaaaagagagaagaatcccataaaaaatgataaaggggagatcaccactgacctcacagaaatacaaactactaacacctctatgcaaataaactagaaaatctagaagaaatggataaattcctggacgcagacactctcccaaggctcaaccaggaagaagttgaatccctgaatagaccagtaacaagttctgaaattgaggcagtaattagtagcctacccaccaaaaaaagcccaggaccagacaggttcacagccgaattctaccagaggtacaaagagaagctggtaccattccttctgaaactattccaaacaatagaaaaagagggactcctccctaactcattttatgaggccagatcatcctgataccaaaacctagcagagacacaacaaaaaatagagaatttcaggccaatattcctgatgaatatcgatgcgaaaatcctcaataaaatactggcaaaccgaatacagcagcacatcaaaaagcttagccaccacaatcaagtcagcttcacacctgggatgcaaggctggttcaacatacataaatcaataaatgtaatccctcacataaacggaaccaaagacaaaaagcacgtgattatctcaatagatgcagaaaaggccttcaataaaattcaacagcccttcatgctaaaaactctcaataaactaggtgtcgattgaacatatctcaaaataataaaaactatgacaaacccacagccaatattatattgaatgggcaaaagctggaaacattccctttgaaaaccagtacaagacaaggatgccctctctcaccactcttactcatcatagtattggaagttctggccaggacaatcaggcaagagaaagaaataaagtgtattcaaataggaagagtagaagtcaaactctctctgtttgcagatgacatgattgtatatatagaaaactccatgatctcagccaaaaatttccttaagctgacaagcaacttcagcaaagtctcaggatacaaaatgaatgtgaaaaaatcacaggcattcctttacatcaacagtagacaagcagagagccaaatcatgaattaattcccactcacaatcactacaaagagaataaaatgcctaggaatacagctaacaagggatgtgaaagacttcttcaaggataactacaaaccactgctcaaggaaatcagagaggacacaaacaaatggaaaaacattccatcctcatggacaggaaaaatcaatattgtaaaaatgttcatactgcccaaagtaatttatagattcaatgctattcccatcaaactaccattgacattcttcacagaattagaaaaagctactttaaatttcatatggaatcaaagaagaccgcatacagccaagacaatcgtaaccaaaaagaacaagctggaggcatcatgctacctgacttcaaactatactacaaggctgcagtaaccaaaacagcatgataatggtaccaaaacagacacatagaccaatggaacagaacagagacctcagaaataacaccacacatctacaaccatccgatcttcagcaaacctgacagaaacaagcaatggggaaaggatctcctattcaataaatggtgctgggaaaacgggctagccatatgcagaaaattgaaactggaccgcttgcttacgtcttatacaaaaattaactcaaagcaatggcaacaaaagccacaattaaaaaatgggatctaattaaactaaagagcttctgcacagcaaaagaaactaccatcagagtgaacaggcaacccacaaagtgggagaaaattttctcaacctactcatctgacagagggctaatatccagaatctacaatgaactcaaacaaatttacaaggaaaaaacaaacaaccccatcaaaaagtgggtgaaggacatgaacagacacttctcaaaagaagacatttatgcagccaaaaaacacatgaaaaaatgctcaccatcactggccatcagagaaatgcaaatcaaaaccacaatgagatatcatctcacaccagttagaatggcaatcattaaaaagtcaggaaacaacaggtgctggagaggatgtggagaaataggaacacttttacactgttggtgggactgtaaactagttcaacccttgtggaagtcagtgtggcgattcctcagggatctagaactagaaataccatttgacccagccatcccattactgggtatatacccaaaggactataaatcatgctgctataagacacatgcacacgtatgtttattgcggcactattcacaatagcaaagacttggaaccaacctaaatgtccaacagtggtagactgggttaagaaaatgtggcacatatacaccatggaatactatgcagccataaaaaatgatgagttcatgtcctttgtagggacatgaatgaaattggaaatcatcattctcagtaaactatcgcaagaacaaaaaaccaaacaccgcatattctcactcataggtgggaattgaacaatgagaacacatggactcaggaaggggaacatcacactctggggactgttgtggggtgggggaaggggggagggatagcattgggagatacacctaatgctagatgacgagctagtgggtgcagcacaccagcatgtcacatgtatatatatgtaactgacctgcacaatgtgcacatgtaccctaaaacttaaagtataataataataataataaaaattaactcaagatggattaaagacttaaatgtaaaaccccaaaccataaaaaccctagaagaaaacctaggcaataccattcaggacataggcatgggcaaagtcttcatgacaaaaacgccaaaagcaattgcaagaaaagccaaaactgacaaatgagttctaattaaactaaagagcttctgcacagcaaaagaaactatcatcagagtgaacagacaatctacagagcgggagaaattttttgcaatctagccatctgacagaaatcgaatatccagaatttacaagcaacttaaagaaatttacaagagaaaaaacaaccccatgaaaaagtgggcaaaggatataaacagagacttctcaaaagaagacatacatgcagccaacaaacatatgaagaaagctcaacatcactgattattagagaaatgcaaatcaaaaccgtaatgagataccatctaacaccagtcagaatggcgattatttaaaagtcaagaaacaatagatgctggtgaggctgtggagaaataggaacacttttacactgttcttgggagtgtaaattaccccagccattgtggaagacagtgtggggattcctcaagtatctagaaccagaaataccatttgacccagcaatcccattactgggtgtatacctaaaggaatataaagcattctactgtaaagacacatgcacacatatgtttactgcagcactgttcacaatagcaaagttgtggaacctactcaaatgcccatcaatgatagagtggataaagaaaatgtggtacatatccactatggaatattatacatccataaaaaggaatgagattatgtcctatgcagggacatgtatgaagctggataccatcatcctcagcaaactaagacaggaacagaaaaccaaacactgcatgccctcactcataagcaggaattgaacaatgagaacctatggacacagggatggaaacaacacacaataggcctgttggggagtaggagggtgaggggatggaagttagaggacaggtcaataggagcagcaaaccaccatggcacacgtatacctatgtaacaaacctgcacatctgcacatgtatcccaaaacttaaatacataaatagaatgataagagaagccacacattaggagaaaaaagttttcaaaaaatatggctagtaaaggacatctatatcttgcctctagaatacataaagaacactcaaaactcagtgaatccaaaaatcttattgagcataagatatgaacagacatttcacaagagaagatatacagatggcaaacagcacacaagatgattttaaatattattcattaaaaaatgagaattaaacacgatgagatatcacaacacacccatgagagtggctaaaatttaaaagactgaccataccatgtggaggaccttgaactctcatatgctgctgatggaaatgtaaaattgtacaaccacttaagaaaacagtgtggcagtttttcaaaaagttaaatgttcatctactatatgatctagtggaatcacttctaggtatttgctaagaaagttaaagcatatattgatgcaaagttttgtatatggatgttcataacagcttaatttgtaatagcccccaaactataaaggacccaaatgtctatcatcaggagaatagataaacaaattattacatgtgatggaatactactcagcaataaaaagaaatgagctactgatatttgcaacaacatgaatgaatctcaaattatgttgagtgatgaaaaagagtaaatgttatatgattccatttatataaaactctggaaatttcaaactaattgatagtgacagaaagcagatcagtgtttgccctggagatagcacggggaagggtggcagattagaatgtggcatgataaaactttggaggcaatggatatgtttagattcttagtcgtactgatggtcttatgagtatatacttatgtcgaaacatctaattaaacaacttatgctgtctattgtatgattgttatacctcagtaaagctgtttttaaaaagatctgcgcatcccttcccattttatggatgaggaaattgagtcctgaggacaagagaacttttccaaagtcataccactagtccaatgcagaggcattaggtttgtccataatgaagcttctgaatgaaaatagaagagctcctggtgtaattccagggagctgaaggccattatcctaggtgaattaatgcagtaatagaaaaaccaaacaccacatgttctcacttataagtgggagttaaacattgagtacacatggacaaagaagggaacaggagacactggggcctacttgagggtggagggtgagaggaggatgaggattggaaaactacctgtcagtactatgctcattacctgggtgacataataattacaccaaatcccccaacacacaatttacccatgtcacaaacctgcacgtgtactccctgaacctaaaataaaagttagaaggaaaaaaatgttaaaagttaaaatgggcagagaaactgaatagacatttttccatataaaacacacaaatggccaacaggtatatgaaaaggtgctcaatatcactaatcatcagagatatgcaaatcaaaaccacggtgaagtatcatctcacacccgttagaatggctcttatcaaaaagtggtaagtgttggcaagtgtgtggagaaaaggaaacacttgtgcgctgttagtaggaatgtaaattggttcagctgtgatgaaaaacaatatagaggttctttaaaaaataaaaaatgaactaccgtatgatacagcaatcctacttttgggtacatatcccaaggaattgaaatcagtatcttgaagagatatctgcacgtccatgttcattgcagcattatttacaatagccaagatatgaaaacaacccaagtgtcccctgatggaagaatggataaaggaattgtggtacatatatacaatggaatattgttcaaccataaaaaagaagaaaatcctgccatttgcaacatggatgaacttggaaggcatcatgctaggtgaaataaaccagacacagaaagacaaatactgcatgatctcacttatgtgtagaatcttaaaaagccaaactcttagaaacagagagtagaatagtggttgccaggccctggggatggggaacatggggaggtgttgatcaaagagtataaagtttcatttataaaatgaatgagttctggggatctaatgtacagcatgggtggagatagatgtgttaattaatgtgattgtggtaatcattacataatgtatatgcatatcaagtcatcacattataaactttgaatagattcgatctttatttgacggtcaaatattttaatttttttagtgaatttcccagcccttgatcccaatttcacggcagcagagctttttttctaactcttggtgcccctaagagggttgatagcctagattgtttcctccaaaaagcaccacacttatatttgttttgaacattgtgagtattcaaactctgtattaattcaaatggacttatttgctgttttaggtctgaatcgtttgcttaccaatggctcctatgaagctgcgtttcccctgcatgaggtattgtgctgtctttaatctttatctttctttcaatcgtttgttactaaagtcagcttctagagatagtcaataattgaatttgttgacatttgctcagaatgaatttaatttgttcaatgggtaattagggagggtctacttcaattgttatatctcttcctcagcatagacttatttctatatatcttttcatgtaattgcgagaatacttaaatcaatagtcatgcagcatgaattcataggaatggcttagagactttaagtcttaaaattaaaaaggcattgacaatttgcatgaggcaccaaatccacaagaagaatgttcttgaaatatatagtctttgcaacaaataaatgtatagctattgcttaaaagagtgggaggaagccatcttgaaaagtctctggtaaccaacgggtgacaaataaaaattaataatgttgtactcatcattgttcacctaagatgtataaatactgtgactctatttcctacatagtctccatcatataaattactttcgcaagtgtaactgattaccccagctctactttccacagaattatttaatccagaattcccctacacctgggtttttaggaacataatccctcatgattattgagaaattattgtcattttcatggtgtggcacccctactgtggtcactatatggcacagagaatacaaagataaatgtcatagcctctgtcctctgggacctcacaaagtagccaatgtgcagcaactgttagctgatgttcagtacagcctgttggaaacaatggtaataatttgtcaatagactttggaagacggttccaactctccgtaaatggcaagtctttccaaaacatacttttttttggcttacagtggtacttctcttaattttaaacactaagagggtgcaaaagatgaggtagatttttcagaactttatttattaagaaaaccagaagctgccatctgaaactctgtttagactgccaggaaatgtgtttggaatgctccatttactatgacagaagcaaacattttgacacaaaggtttgctagagccatacgcaggtgtttctgaactctaaagacatactgttccccaaaacatcatgtggcttcatcatgtcattgttagttggcattgcccagaaaagggttttgtgagaactgcatcctccctgctctcagccccagctcatggtatgggctgtgtctgatatggtaagtggcagaagcgtctgtgcaggggagtgggtgggtgggcatgggagtgtctgaggagatgcagctacaaagccccacagagtgactcatgcctttcacaatgactttcctatctcagtaaagccctgtattctatgagaagttccaaattggtaatagcagcagcaatcattgcatcattgcttttctgactttttactctcagtttaacttgattatattatttaacctcagaggcaaaaaggcagaaggtcagatattgctgctcttgtttcacgttaaagatttagatagaggtttagagaaaggtgaaacctccttaagtcacacaatgagttggtggttgatctgagactcacctgagtttctttctcctagccctgtgttctttccattaagaaaggacttcttatcaggtgtggtggctcaggcctgtaaccccagcactttgggaggccaaggtggaagtattgcttgagttcaggagttcgagaccagcctgggcaacatattgagacattgtctctagcaaaaataaataaataaataaataagaaagggcttctccacttaatatgaataattagcttgcctccagaaagtaccgtttctctttgtgaaactatcattgccacaaactaacctcagaaaaacatgcacttctctggccctttgtctcctcacttcttcaatgaggaggttgaattaaatttgaattacaagaattctgaagtgacttccagcttttacattctagaattttcttgtcgataacattgtgacaaggttacaactatggctgtttaccaactatcctatcttgaaagaagtgggaagagaggccaggcacagtggctcacacctgtaatcccagcacattgggaggccgagggggacagatcgcttgagtctaggaattcgagactagcctgggcaatatggcaaaaccccatctctacaaaaaatacaaaagttagccgtgcatggtggcacatgcctatggtcccagctacttgggaggctgaggtgggaggattgcttgagcctgggagtcggaggttgcagtgagctgagattgcgccactgcactccagcctgggcaacagagtgaaacccagtctcaaaaaataaacaaataaataaataaaaagaagtagggaagagaactaataagccttgggcatggcccctgggccagacactttattcattcaaaccacataagaaaccaaatgggacaaatattagttccactatggattaggaaaccaaagctcagagcatttagggaacttgcccaggatcttctagctgaaaagtagcagaattgaatttgaactcagttcaaaccttcctgattatagcaagcacgtgcattttactagatatcagcagtagcaagacaatgtccagaataactcatcaaactgcctgccctttaatagagaggattcatttctttctcataccactcctatcacaacacctgctgtaagacacttacattaccatcagcatttccttgtgacttttgtgagtactacctcactggcagtggtgtttttatcccagggaagttatagaagtaaaaactccattcgaacccatggagcagaaaaccaccgacatctactctatgagtgctgggcctcctggggcgtgtggtataaataccaacctttggatcttgtaaggtgagtttttaatcagctgcaaatataaagcttgcacagaatgattagggcagactgtcagctgggacaagctcccaatgaagcaaaaagagcctgaagtgtacagctctcactcatatctggcttcttcacaagaggaaactcatctgaggacatcagctgttcttggtaaacctaccatcgctctgatgaggatggaatttcccccaaaaagagtcttagagaggggcccaggaatgggcatgtgagatcagccaggcctgtcacaagacttcgtaagaagcgagtcacccatgtgagtcttattgacaaaccatcttgtacaaaggtaacactgcttacatatattactgacaaagtaaaatatttactactgttagcaaataggacaaatggagtactgtcattccaatacatttcaggcttagttttcattcagaactaataacctttaaagattgttttaatctgcagatcaaaaagtatatcagcttttaacctatgataattgtgaagtggaaatgtatgtttttttattattattatactttaagttctgggttacatgtgcagaacatgcagttttgttacataggtatacatgtgccatggtggtttgctgcacccatcaacccgtcacctactttaggtatttctcctaatgttatccctcccctagccccccaccccccataggccctggtgtgtgatgttcccctccctgtgtccatgtgttctcattgttcaactcccacttatgagtgagaacatgtggtgtttggttttctgatcttatgatagtttgccgagaatgatggtttccagcttcatccatgtccctgcaaaggacatgaactcatcctttttttggctgcatagtatcccatggtgtatgtgtgtgtaaatatatgtgtgtgtttttttttaactatctatatcttcccaaccttctgccttggcagcattattctctgacatctctatttatttagaggctggttattaagattgggtaataacaacccacatttcctggattccttattaaagagaaagtcatgtctcatttcctagactagctagatgtgttgtttcacttaaataccagggccataaaataaaatgagcccagaggggaggacaaacaaaagacaatgcactttatatttgagcccttatcaccaagtgttccaagggcattgatgaattgtgatccattccttgtgttggtaacagataatccagataatcttagtgaatggaaaatattttctgagataagatcattttcctttggtcagactcagtgtatgataaacagtggggggaaaaacaaaagtaaattctcttcccagcctcggtgccatgttacaggattacattgattagaaatcacagataattgctgtaggcagcacatttcccattcatgacagtattttgattaagattttgcggttttggttagtcaatgcatattaattaactgtctattgtgtatctagtactgtgctaagtactattggcaaagccaaacagacgccaaatggtctctggctctgaaaaactcagttttcctcagcaacacaggccctgcatacttgaaacatcgagaaaagaaaatacaaggccatgcataattaggtaaaatgtgtgacagaggccataagttttacagtaattcagaaaaatggaaagaacggatgtggcagcacccctgtggaagtctctggagagctgagccctgaagaacagtggcatttatgttgggcaaataaagggggatgaaaagcacaaccaagccttgagtagaatgaaagttgtggagcatctagggaatgtcatctcttagacagttcctatcctataggttttacttccaccatatctctcgaatcgggccccacctcagcatctccactgccttcacttgttacctggactatgacagctgtgtgcctggttggtctccctttgcccactccggccccttccagtccattctgtcttctcagaataagcttgtatacaaccatgttattttatggaagggctaattctagttctgctatagagtagtagtagaagaaatgtaagcccagatcctagatttgatgggatgttcttttatcttggcttaccttgcttgcagtttacctcgtaaggccgctacaaagtaaaatgactatacgaagtttcataatgcttaactttacacactgcactgtaatttgcaaggccgttgtgtctttaacaggcggtactttggagagaagattgggttatattttgcctggttgggctggtacaccggcatgctcttcccagctgccttcattggattgtttgtctttttgtatggcgtcaccactctggatcacagccaagtcaggtacggggagctcttggatgagtttgcctttgtttagtacttagaggtggctgtttgcactttgggggtattcacagattgtggagacatttagcttttcactcaaacttcctaccctctcatggaaaaactcaaagtttcagttcactaggacctctccatccattgtccttgctgccatggtcttcagataccatgcaagtaaaagttaccttttcagacatacaagccactatatatccacagaacaagccgccttcattcactggctataagtgctctctttttttactttttcactttttttcttagctgatactgcaaaatagtgaactaacaattctctcttatgaattctgtgtttttacaacttgagccagaaagacatctcaccagcttgctagtatcttgggagcggttcagtgtcgatgaccattatcttggttgtctcaccagaatataggtcaaggtactcacagagatcttgttgcaaggctggacaatgatcttaaattgtaaatatgccttttaaatgtgattgcaaaaataaaagtgagtgattaagccttccacctacgaaaacattttactttctggtgaaattgttaatgtgttagttaaatatagttttcccccaggatagggctagaatctctagtcatttatgttttgttttccatattagttttaacttatcatacacatagagatcaagataagtatctttatatatcttcttactcccttaattcagtatgaaattgcttcagacctttgaaaagtgaaggacatttctataatttgggatataacaatcaatgtttggcttcatgtattttcctgagtttaacttattaatacataaagataaggaacagcctcataagtaggtttaccaaattatttaaatgggcaagaacttgtttacattaataacagataaagctaagatgcttctaagggcaaacatttaacctactggatcttatttactagttgaacattctggtgaagttagaaaaaaatgttccatgtcatcaaaaagcagtcctttctgttctcttttccagtaaagaagtctgccaagctacagatatcatcatgtgtcctgtgtgtgataaatactgtccattcatgaggctgtcagacagctgtgtatatgccaaggtaatttcaaactgtagcattttagatgaattgaatttaacatacaccttcctgagggatggtgggtaactctattctgtcatttccagtctttgattttcaagtgaatgttgtaggatagacttatctccatcattcagtattctaattcccatatctttgttaattgtccatgtatttggaaggcatggctctagacatcatccatggagctgcagcatggcacagtgtgaggagcacggtgctggagtcagagaaagttaggtccaaattttgactctgctgtttaccatttctctatctgggaataagatatttaacttctttgagtctcagttttctcatctgcaaaatggagaccatgatgcttgtttcacacggagttaaggtgtatactgagcatagtgcttggtaaatagacctcagtaaatgacagctatcatcatttgcctcctcttcatcatcattattgtcaaaatgacctccaattaaggctagctcagccacttacctctttagccctgaaatgtgccccctttctaagaaactcttttttcatagaaagaagctcagtcttctgagctttcttgtctctaaaatacaggaaatatgtgtcctctctgtcctaccctattggcatgacgtgaggactaaagaagagaatatatgtgaaagtgctatgagaaaaaaaatacatgacaccactatttctattatgtgttattgcatacctctttctcgtgatatgccttactttatttcttagacatattcctcacattcctagagttttttgatacttaggtggtggtgtccataacacaaaacaatagctgaagtttgagtttgcgaagacttttccaagagctactgccttttggcttgcccagattcagatataaatggcattggcagattttatccagcttttgtaatcactgaagcctggatctatctaattactctcttggcattgcagagttttgttcattttaaacaagggaacatttgataggcaacccaggatcccgcctatctataatgtctttagtactgcaggtggccggtctgtgtaggaggagcccagactgcagcagtgagcagtggttttagaaagatttgagctcttatgttgcaagggacaaaaaaagcacaaaatgctctgagccctatctttaggaaacactcagatagacctgagtggataaggataaatttaacagagtgactttaggacatagagatttggtgagcatcaagagctttgtcagtaatataattttgtttaaaggtcagatataagcctgaatgactcaggttttaaaattctgcttctggggaaaccccaaaatcagaagccaatttttttttttaatgtggaaagatatgcttgagtaaaattctctttttaggagatccttaataattcttttaaagaatcgtcatgaatagtttatgagtgctcagattttataggggcttattttgggagttattctccctaacttaagacctagaacaataataattataatagttacagctataataatagctagacaatctacattgattatttctaattctcacagcaacttcaagataggtgttattatttccattttattcagagactcaaagaggtaaaaattactcatgcatggtcatgcagcaataagtagctgggccttggtttattgcactgcaaaacatgccttctttaccactgtgccctgctgagccacaagatgtttagattctgaatttaacatttggccttgcctagaaacttagtaaaatgaaagataaaaagccttagaatgacagaattggagttatacagggtttcctttagaaatatttattagagatgtcagagtgatttcatgggactgtggatacacagaaatattaaatcagattggcgctgggatctagtccaatcagtggctgttctgctgatagggatgctgtatccttgactcttgtgtttgcaagaatcagaaacccaactcctactggcttagtcagaaagtgatgtaatggtacattttgccagaacagatactggggtggctcacgctgtgggatcatgagggcctcacagcctggaactgttcctccagggaccccggtggccctgcccacatgatcattctgtagactagttctctgtacaatagaaaagatggctaccagctgccttggctccaggcttacgttttccttcccttgtctccttaagtggatttttgtgcttattttaaactcctggtctgctgccacactgtgtctatgggaatcttctttggaggggaggggttgttgtcttccccatatatttcattattttggcctgttgggtacttgtcctctggaggcgtcagccactttgagtaagggtcagaggccaaggccaagtttgtcagtcctagtgagttacagagaggacagcgtgccccaggcacgactgagtgctactgctctatcagaggacttttctggtcagtttcatttttaaacctgcttagaacaaagcagaattgggcactttcccttgattgtaatctgccaatgctggggtttaagaggaggtggactatggagtgaatgccccagggcagctatccaggtagcacctgcttttcacccatgtctaacagagcaggactttgagcattccctgatattgctccaggaataccagcacctgtggtgtggcctgcttagctgatttctgagggaggggaaactaattgtccaatggccatttgagggagagaggctagagtagagcttatgtatttctctaacctgtgctctcactctacctggtatctacaacctacctctccccacacaccaccaccatcacacacataccagttcaagataacctcccatctcccctgaggtttctcagggtctttgttttttgtttttgtgttttgttagttcctggaatctactaccttgcttctccaggactgattttggcagaaggtgtcatcagcttaagctaactgactatctcattgggaaccggagcccctataaccttacccctcctcattcatatattgtcaaattgataactgcagcagaaagctgtctgtctccaaatgtttgtgtatcagccccagggcagtattctgattggttctattttgagccatgtgtcccttgggaccagcaggagttacctggagaaaggagaatggaagacagatgatctgggtagccaaaacaatgataactgcagtccattccagaatggacactgatggtgcaagctacactttctagcaactctcagtaaatactctgatagaggctgggcgcggtggctcacgcctgtaatcccagcactttaggaggccgaggcaggcggatcacctgaggtcaggagtttgagaccagcctggccaacatggtgaaaccccatctctacaaaaatacaaaaattagctgggcatgatggcgggtgcctgtaatcgcagctacttgggaggctgagacaggaaaatcacttgaacccaggaggtggaggttgcagtgagccgagattgcgccattgcactccagcctgggtgacagagtcagaatccatctcaaaaacaaacaaacaaacaaacaacaacaaactctgatagatagcacagtccagtcaaataccgctagaaccttcaaggttggtttgatactgagtgcccaatatacagcttaacattccctctggcatatgaaatagattagcttcagacatttgtctcacagtaggtatttgagtgctgcccatctctcctctattcaaagaaagagaaacttctggaataatctgaaatacttcacgttctgatataacatgaaaaacctctttatatttggtgcattctcgaaggaacaataaagtatactttataggtagctataaagtacccccaaaaaaggttattctttatgaacctatcagtcatcatttcaatttgtcatggacattggtattatttatactagaggcaggaatgagcttggcagttttgcagtaaaaatggatatttttgctttcttctgtggtgtttgcaatagaatatattattctagcaataaagtattgctagttgtctttgtgttatgtgcagtaggtaaatatagtgattacccaaggctttaataagggtagagttggatttagttaatggttctgctcttttttataaggctgaaatccagagggcagcccagaaaatgtttgctcaaaactgcataaacaaaatagccatgttttcaaagtgaataaatgaggcattaaaaacagtgcttgggaagttgaaaacctttaaagcagcactaacaataccttcctggtcctaaatataactatatccatacacatatgtacgtgtataagagttttgttgtgcacaaaaggggattcttagtagcactattggggatgctgataaatgttcaactagatgataaccacataaagagaacaaattgtatcctctatatatgaactaccttgcaattagaggaagccttttcttatttatggttcaaaaggaatattccccctacccaaaacaaagcctgtaaaactcattatataatcacagctatttttacagaacttgaaaaaatttgaattggaatatcatatatgagaaattaactcagcaccgattcttattattcacaggtaacccacctttttgacaatggagccactgtcttctttgctgttttcatggcagtctggggtaagtgttctataaccataaaacttgagttttcctcatatgccctatgatatattcctttagaagtttcactttggatgtgaaagaaagaagcttgagtaaatggaattagctttcctattagtagaaagttggtaaataatttattgggtttattttaaacgatattgtagaagagagacatgtctgatttctcttaaaccttcaacaatgtcattagcactctgttattagagtagaatttactttctgttggacacagaaataaagcttatggtacaactttagtttaggtcaggggagaactgaaacaccatctcagtatatataggactttctattgtaagtggctaatgtgtgagtacccacctttagctttcttctagctctgtacaaaattacccctaaaaacaaggtctattcacaggactgatttgagctttttgatataatttcaagctaacagccccatcacacaaggtgtgatggaaacagtcaaatatttggaagtaacaggacttgattgaaatctcaactccctttacacactaggctgtgtgatttttggcaagttatttaacctacctctttgtaaaatgggttaatatataatagtcaaataattataaagcttcaatttaatgatatagaaaaacatctcacaaattcatggaaagcagttaatggcagttacctttggaaaggaagattcatggaagagtaagtgaacaacgaggagagacaaactttatgctatatatttttagtctggtttgaattttttacaattatacttttctcctataactttaattgccaaaatctgaattttgatgtaacaaaattctactacctttagacttaggctcatcttgttcattatgtctgctatgaatattggaatcttccccatctttcaggccccagctgaaatgtcatctgctccagccaaaagatgtctttctcctttgaatttccatggcattttgttcttagggcacttaaaattattttcacagataacttgtcttgcctagtagatttatggtccttgaggaccattatgattatcagagatctcatattttttttttttttgagatagatggaatcagtaagtttctgttggatggatgggtgggtcaatggatagataggtggatggatggatggatggatggatggaaggaaagaaggaaaaagagaagaagaaagaaaaagaaattaccaaaagtatttatttatgatacagtgaatgtatttaagaggtcttttttgataagtggaaacataaaaccttgttcacttgagggagcttgttcttgatatattgtgtcttttgtacctagagactgtcaaaggaaaattgtcccacccatcacagctctgttgaagggacatgttttgaaccccatgactccagtccctctcagccagtaagcatttgaaccaagatcagtcaaaccacaggttggtgagtggcctgggaaaaggcctgaggttctgcccagacaaggactggtagggccacccagattcttattctccagaatgtggactagaaaatgtaaagggaaatagggagttagcagcaggaatggacactgaaaaatacagagggcaggagggagggagaaaaagaaagattaaaattgaccattgggtagaagtagggaccaggaggaattaggaggctgaagttatgagaatcagaacctagaaatagatagaagcaaagaactagtggaaaaattagagggcgaaaaagccaactgggagaaaatgtaagacaaccagagggaagcaaagagagaatatagccaagtcatgttactagtggagtgtcaggatgaagacccagactctcttgtggctgaggcctctctcaagcttcgggcttccatatcctgtctctgaacaggccatgtattttttcctgtaggattcctgcctcccttggtggaccttgtgaaaagctttcactgttcatgctacccttaatgcttctctgtcccttgcaaacaaactaaccctaacagaattttgattacaggcctgagctctcagataaagaatgcgtatatagttttactagaatctattagtatcatacaccgtgattcggataagccatataatgcttaagctttgccatggtcacaaatgaggggactctggaaatatattcatttcctaaaccagtattataaatactaaatgtattctgtaaaccttaatgtatatagtattctgtaaacgtaaatactaaatgtatattgtaaacctaaatgtattcatttcctaaacttttcaggtcatagcacacataaaaatgaaaatatttacacagcagctgctgtacatggaggagcctcctcatggccatggatagggctgtcccaaacaccccagcctcagaagccacaagggttgaaaggggcattattgttattcctggcataggcatttggaagttctgccttgggctgctaatttactgtgcaatgagttaatgcttctatataagagtggtatcctggtggtatcctggaagaattaaaacacaaaacttccttacccacttcaatatttcaccaatttcaaatatactttgaattaaataatggtttcttctcacagtttacctcctgagactacatagaagtaaatttttgtatgatgacatttgttcataaggcagaggttattactctcccccactacctccattataaaatggattgcataccctctttgcaagttgtgttttatgttatagatgacaaataggttttgttttatccccttgccaacctcagctgattggtgctggctgcctggagcatggagttgagaagtttctgaggttgaaagtgggtggattggagatttaacagcccttgtggtttggagtatactttgtaagactctgatggatgttttataataaactttgggcacagaggaacattttagggccattccaggcaagacatgcctggaataattcaccctctgaattgctttgtcttagatgacaacttattgcttaaatcccacattattcccagaaatgtgctagtttgagaaaaagaatgagttgccccaagtgtttctttgtagatagagataatgccttttgcagaaatctgaaagagtcaacaatattaacagttatattaatagcattcatttccgagggattactatgtactaaatgcagtcctaagcattgcccatgtatcatctcatttaatctctccagcaagcttttaaaaaggtactgttcttatcctcatatgacagataaggaaactgcagcagtagctagaaagtggcaaagccaagagttaaactgggcagtgtgagctcctctgctctactgctagaatcaggtattgtttgttaccatttccttctgttttagagacctgaaccttaaaataaaggactgctatgcctgtcctgagcctcatttatcctgctttgagacagtaatgttctataaaaatgtgtcagttctaatggagctcagtttaatggtctcaggatcatctcttatgatcgacaagttacagcattaaagaaaacaaatgcactctattttcaggaaattgctagatatggagctgatgagaacagatgtaagtggtttacaagacttctgaagggctgggcttgacgtgttcattttgttacctttgctttgtgtgttcaccggaaaaaaataataaggctccatctgtaaccagtttgtagcaactgggagggccttggcattgggttaggaatcctgacagaactctactacctttgttcaggtcacgtctgtgtgagtgcagggctccctcgggatccctgaggtatgctgtgagcctgggtctcggctggaattacagtgtggctcattcctcaatgctcatttttgttcagaaaggtccaagggtcagaatgattatggactaaataactcctctcccgagggaaaaaatgagtcatcagggaactagatgttggcagagacctgtcggggaaacagattatttccctctgttctgtttctggtttggtttgttttttttctctctctcccccttgtttttcattttttacttctaggattgccaaaagttaagttatccccagtaaacacaccaagcaagatccacaaagctctttaatcaaaatgacaagatggtaattatttagtgtgatcctgttagtaattggtgaatgaagtatgtctcatttaaaaaaataaattttgcaagaatcagccttttgtttctagatatttatgctaactttatattttatagtcttatctacatgttccacaaaaaaatggtaattgtatgttgaaaaaggtacacatttactaaaggcctaccatgtttgtatgcacattcacataggatacctcatcaatttctcatcacccattagaaagaaattactaacctcattttatagatgaggatactgaggctcagagaggttatgcaacttgcccaggattccagtagctgataaggtgtggagcctaaactttaaaccagatctggtctgtttcactccagagtcattccaaagtgtgtccaccatgttgtgcatcttctgtgaagtgtgtcaattaagatctcattaactcatacacaaaaatgagttagatgtgatctctgctttcaaaaatctcagtatattaaagaagcgttgataattataatacagggcaagtccaatttacaataggccaatgagggtttatgtagtcaacttcctgaggcaaaaggaaaagcagaaaaggttcacccaagaagagatattggaaagaagtcttagctttgccaggcagagtagtggggttggaaggagacatagataacattcttaggtgacaagagtatttgtaaagctctgaaaaggaagaattggctgttcagagtgatagggaggttgagtgtgtattagtttcctaggactgctgtaacatagtactacaaactgggtagcttaaaacaatagtttattgcataacagttctggaggctcaaagtccaaaatcaaggtgtcagtgggattctgagggctgtgagggaaggatctgttccatgccagtctcctggattctggtgatggctgatggtccttggccttccttggtttgtagatgcatcactcctatctctgcctctgtcttcacctggcatttgccccgtgtctctgtgtcttcacatggctatcttcttctcaagacggtggtcatattggattaagggcccagcctactccagttatgaccccatcttaactaattacatgtgcactgaccctacttccaaataaggtcacattgtgaggtactgggaccttttttgaggggacacagttcaacccatagcagagtacctgttgaaggctgagagctacttatcacagaccacttgagctacaacagaacatggcttcacgctgtaagcaacagaaagccaactggagttataatccgggaagggacatcatcaattgtatttgggaaataactctggcaacagtgcagggagaggtgaaagtggaggccaactggtggcaggcaggccccttagaaggcattctagtactcagtcaaaatattacgcagaacttggcttcagaaaagatccaatttccagaataaaaaccacacgtgtaaaatgttttcctagctttagttatttataatatgcaaaatttgtgaacaacgtaaatgtccaacaatagaagaacggtttggtaaattataagcagctattataaattgctctttcaaagcatgttgataatacaaagcttgtatttaaatttttttaaagtagggtataaagtatacaagtaaaacacgattttgagtatattaaatgtaaatgaaaacagaaagaaatgatgccataatattaatggtggtttgctttatgtggtgggattgtgggaagatttttttcaactttaagtataatttatgtgcaataaaatccagcaactttaagtgaacaattcaacaaattaggtcaaatatatatagtcatggaagcatcaccataatgatgatatataagagaactttttttcttttttttgagacggagtctcgctctgtcccccaggctggagtgcagtggcacaatctcggctcattgcaagctccgcctcccggcttcacgccattctcctgcgtcagcctctcgagtagctgggattacaggcgcccgccaccacgcccagctaatttttttgtatttttagtagagacggggtttcactgtgttagccagaatggtctggatcttctgaccttgtgatccgcccgccttggcctcccaaagtgtgggagccaccgtgcccggcctaagagaacatttttatcctctcaaaagtttcctcatgcctctgcagtcagtcccttggcaacctgaaacctgctttttaccactgtagtttcagctgttctagaatttcatgcagattaaattattcaatatatagcattttgtgtctggctactttcacttcagttaatgctgttgagattcatttatgctgttgcctgtgtcagtagctggtttctttttagtacagagtagtattccagagcctggctatgtcataatttgttcgtctacttaccagttaatgaatatttgggttcagtatggtttttaactactataaataaacctagaaactattggctcttctagttttttgtttttgtaaattttcataaaagcctttgtagccattcatcttggatgaataattaaaagtggcattgctggatcatgtgataagtgaatgcctaacttagtaagaaattgtttcccaaagtggccatatcgttttgtagtcaatatcagcatgatatgagaattccaggtgttccacattctcacaagcacttggaattgtcagtctttataattttagtcattttagtgggtatatggtattatcccattgcagttttaatttgcatttccctaatgagtagcgatgttgaacatcttttcatgagcttatttgcaatctgcacatcttacttggtgaagtgtttgctcagatcatttgtccatttgttattgggttgtctgtcttatttttaagttaaaagagtacttttatatattctaggtagaaatgcttcatcttacaggtgtttgcaaatttttttccctgtctgagtcttgcatttttattttttaatggtgccttttgaaaaccaagagttttttctttttatatagtctaatttaaattttcttctgcactcattttttgttttatttatgaaatctttgccaaactcaaagtttctaagattttcgtctatattgtcttctaaaaagcttatcgttttagctcatatgtttaggtttatgacttatttcaagttggtttttgtatatggcataacgtaaggggcagatttatttctttccatgtagatatccagttttcctagtaccatttgtcaaaaacgccgttcttttcctttttgaattttcttggtacattttggttgaaatcaatgggccatatatgtatgggtctgttttcagaatttttattatgtttgatgtgtatgtgtacacatggcaataatccactgtcttgattattatggcataataactgttaaaatcatatttttcttttcaaaaattgttttgctgttttaggttctttgcatttccaaaaaaattgtagaatcagcacttaaatttcttcaaaaaaagtgttgatattttgattgggattaagttgaatcaatgtcagtttggaaagattgagtgtcatttagctttttgtttatttacatattctgtaatttctctaagcaatgtcttattattttcaatgtacaaggcttccagatattttgttaaatttatgcctatatattggattttttgagttttttacaaatagtatttttctgtaatttcaattgccagttattcattgctactacatagaaatacaattaacttttgtatattgaccatatatcttgtgacttactaaactcagttattagtgcttctagcttttttatagattccttaatattttcaacatagatgattaagaaatttataaaataaataagttttctttctttctaatctatatgagttttatttctttttcttgccttatactggttaggacctccagaataatgctggatacaagttatgtactagacatccttgccttatgcccagtcttaggggaatgtgtttagtctttcaacattaagtatgatagaaaccacaggttttcatatatgtctgttatcaagttgaaggacattccttctattattaggaactgagggttttaaaaatcatgaatgggtatagaattttgccaaaagcttttcctgtattaactaagacaatcctgtttctttctttcttttatttttttatacttcaagttctgggatacatgtgtggaacgtgcaggtttcttacataggtatacatgtgccatcgtggtttgctgcacccttcaaatcgtcatctacattaggtatttctcctaatgctttccctccccgatccccctatcccccaacaggccccagtgtgtgatggtccctgccctgtgtccatgtgttctcattgttcaactcccacttaggagtgagaacatgcagtgtttggttttctcttcctatgttagtttgctgagaatgatggtttccagcttcatccatgtccctgaaaaggacatgaactcattcttttttatggctgcatagtattccatgttgtgtatgtgccacattttctttattcagtctatcattgatgggcatttgggttggttcgaagtctttgctattgtgaatagtgccacaataaatatacgtgtgcatgtgtctttatagtagaatgatttataatcctttgggtgtatactcagtaatgggattgctgggtcaaatggtatttctggttctagatccttgaggagtcaccacattggtttccacaatgattgaactaatttacactcccaccaaaagtgtaattagtgtaaaagcgttcctatttctccacatcctctccagcatctgttgtttcctgactttttagtgattgccattctaactggcatgagatggtatctcattgtggttttgatttgcatttctctaatgaccagtgatgatgagctttttttcatatgtttgttgcctgtgtaaatgtcttcttttgagaagtttctgttcatatcctttgcccactttttatggggttgtttgtattttcctgtaaagttgtttaagttgcttgtagattctggatattagctctttgtcagatggatagattgcaaaaattttctcccattctataggttgcctgttcactctgatgatagtttccattgctgtgcagaagctctttagtttaattagatcccatttgtctattttggcttttgttgtaattggttttggtgttgtagtcatgaagtctttgcccatgcctatgtcctgaatggtattgcctaggttttcctctaggatttttatggttttaggttttacatttaattttttaaccgatcttgaattaatttttgaataaagtgtaaggaaggggtccaatttcaattttctgcatatggctagccagttttcccaacaccatttattaaatagggaatcctttccccattgctgtttttgtcaggtttatcaaagattagatggttgtagaaatgtggcgttatttctgaggcctctgttctgttccattggtctatatgtctgttttggtaccagtaccatgctgttttggttactgtagccttgtagtatagtttgaagtcaggtagcgtgatgcctccagctttgttctttttgcttaggattgtcttggctatatgggctcttttttggttccatatgaaatttaaagtagtgttttctaattctgtgaagaaagtcagtggtagcttgatgtggatagcattgaatctataaattacttggggaagtatggccattttcacaatattgattcttcctatccataagcatggaatatttttccatttgtttgtgtcctctctcatttccttgagcagtggtttgtaattctccttgaagaggcccttcacatcccttgtaagttgtattcctaggtattttattctctttgtagcaattgtgaatgggagttcattcatgatttggctctctgtttatctgttcttggtgtataagaatgcttgtgatttttgcacattgattttgtatcctgagattttgctaaagttgcttaccagcttaaggagatttggggctgagacgatggggttttataaatatacagtcatgtcatctgcaaatagagacaattcgacttcctcttttcctatttgaataccctttatttctttctcttgcctgattgccctgaccagaactttcaatactgtgttgaataggagtggtgagagagggcattcttattttgtgctggtttttgaagggaatgcttccagcttttgccccttcatatgatattggctgtgggtttgtcataaatagctcttattatattgagatacattccatcaatacctagtttactgagagtttttagcatgaagcggtgttgaattttatcgaaggccttttctgtatctattgagataatcatgtggcttttgtcattggttctgtttttgtgatggattatgtttattaatttgcatatgttgaaccagccttgcatcccagggatgaagccaacttgattgtggtggataagctttttgatgtgctgctggattcagttttccagtatttcattgaggattttcgcatagatgttcatcagtgatattggcctgaaattttctttttttgttgtgtctctgctaggttttggtatcaggatgatctggcctcataaaatgagttagggagaagtccctcattttctattgtttggaatagtttcagaaggaatggtaccatctcctctttttacctgtggtagaattcagctgtgaatccttctggtcctggcctttgtttggttggtaggctattaattactgcctcaatttcagaacttgttattgggctattcaggggttcgacatcttccttcttctttttcttcttcctggtttagccttgggagggtgtatgtgtccaggaatttatccatttcttctagattttctagtttctttgtgtagaggtgtttatagtattctctgatggtagattgtatttctgtgggatcagtggttatatcccctttatcattttttattgtgcctatttgattcttctctcttgtcttctttattagtctggctagtggtctatgtattttttaatcttttttaaaaaacaattcttggattatttgatattttgaagggtttttcatgtctgtctccttcagttctgctctgatcttagtcagccttcttgtcttctgctagcttttgaatgtgttttctcttgcttctctagttcttttaattgtgatgttaggatgtcaattatagatctttcccgctttctcctgtgggcatttagtgctataaatttccctgcaaacactgcttccgcagtttcccagagattctggtacgttgtgcctttgttcccattagtttcaaataacttatttatttctgccttaatttcgttatttacccagtagtcattcaggagcaggttgttcagtttccatgtagttgtgcagctctgagtgagtttcttaatcctgagttctaatttgattgcactgtggtctgaaagactgtttgttatgatttccgttcttttgcatttgctgaggagtgttttacttccaattatgtggtcaattttagaataagtgcaatgtagtgctgagaagaatgtatattctgttgatttgcagtggggagttctgtagatgtctattaggttcgcttggtccagagcagagttcaagttctgaatatctttgttaattttgtgtctcattgatctgtccaatattgacagtggggtattaaatctcccattattattgtgtgggagtctaagtctttttgtaggtctctaagaacttgctttatgaatctgggtgctcctgtattgggtgcatatatatttaggacagttagctcttcttgttgcattgatccctttaccattatgtaatgcgcttctctgtcttttttgacctttgttggtttaggtctgttttatcagagactatgattgcaatccttgctttttttttctttccatttgcttggtaaatattctccatccctttattttgagcgcatgtatgtctttgcatggagatggatctcctgaatacagcacacagatgggtggtcttgactctttatccagtttgccaacctgtgtcttttaattgaggcatttagcccatttacatttaaggataatattgttatgtgtgaatttgatcctatcgttaggatgctagctggttgttttgcctgttagttgaggtagtttcttcatagcgtcaatagtcttgacaatttggtatgtttttgcagtggctggtcccagtttttcctttccatatttagtgcttccttcaggagctcttgtaaggccagcctggtggtgacaaaatctctcagcatttgcttgtctgtaaaggattttatttctcctacgcttacgaagcttagtttggctggatatgaaattcagcgttgaaaattcttttttttaagaatgttgaatattggcccccactctcttctggcttgtagggtttctgcagagagatctgctgttagtctgatgggcttccctttgtgggtaacccaaccctttctctctggctgcccttaacactttttttttttcattttaaccttggtgaatctgacagttatgtgtcttggggttctcttctcaggagtatctttgtagtgttctctgtatttcctgaatttgaatgttggcctgtctttgtaggctggggaagttctcctggataatatcctgaagagtgttttccaacttggttccattctccccatcactttcaggtacaccaatcaaatgtaggtttggttttttcacatagtcccatatttcttgaaggctttgtttgttccttttcattcttttttctctaatcttgtcttcacactttatttcattaagttgatcttcagtctctgatatcctttcttctgcttgatcgactcgactattgatacttgtatatgcttcacaaagttctcatgctgtgtttttcagctccatcaggtcatttatgtcctctaaactggttattctagttagcaattcctctaaccttttttcaaggttcttagcttccttgcattgggttagaacatgctcctttagcttggaggagtttgttattacccaccttctgaagcctacttctgtcaattcgtcaaactcattctccatccagttttgttcccttgctggcaaggagttatgatcctttggaggagaagaggcattctggtttttggaattttcagcctttttgtgctgttttttcctcatcttcgtggatttatctacctttggtctttgatgttggtgatcttcacctggggtttttgagtggacatcctttttgttgatgttgatgctgttcctttctgtttgttcgttttccttctagcagccagacccctctgctgcaggtctgctggagtttgctggaggtctactccagaccctgtttgcctgggtatcagcagtggaggctgcagaacagcaaagattgctgcctattttttcctctggaagcttgagcccagaggggcaccccccaaatgccagctggagctctcctgtatgaggtgtctgtcgacccctgctgggaggtgtctcccagtcaggaggcatgggcatcagggacccacttgaggaggtagtctgtcccttagcagagctcgagcactgtgctgggagatctgctgctctcttcagagctggcaggcaggaacatttacgtctgctgaagctgccccgacagccactgcttcccccaggtgctctgtcccagagaggtgggagttttatctataagcccctgactggggctgctgcctttctttcagggatgccctgcccagggaggaggaatctagagaggcagtctggctatagtggctttgccaagctgcagtgggctccacccagttctaacttcctggcggctttgtttacactgtgaggggaaaattacctactcaagcctcagcaatggcggacacccctccccccaccaagcttgagcatcccaggtcaacttcagactgctatgctggcagcaagaatttcaagcctgtggctcttagcttgctgggctccgtaggggtgggatccgctgagctagactgcttggctccctggcttcagccccctttccaggggagtgaacagctctgtcttgctggcattccaggcaccactggggtatgaaaaataattcctacaactagcttggtgtctgcccaaaaggctgcccagctttgtgcttgaaacccagggccctggtggcacaggcacctgagggaatctcctggtctgcaggttatgaagactatgggaaaagatactaatctgggccagagtgcaccattcctcacagcacagtccctcagggcttctcttggctaggggagggagttccccgaccccttgtgcttcctgggtgagacagtgccctagcctgctttggcttgccctccgtgggctgtacccactgtctaaccagtcccaatgagatgagctgggtacttcatttggaaatgcagaaatcacccaccttttgcactgatcccacagactgaagctgttcctattcagccatcttctgttctcaatcctgtttcttaaaagctggacaatatattaattaaattgattcattatgaaataataggatgatcttgcattccaaggatcccacttcatcataatatattaccttttatgagtgttgcaatatttgatttgctaaaatactttcaggatttttccatctatcttcatgagggttattggcctgtaactttttacttctagtgtctttttgttattgaggtgatgttggcctcataaagtgagttaggaaacgtactttcttctagaaagtagaaatggtgttatttccatcttgaatgtttggtaaattgtaccagtgatgccacctgggcctggagttttctttgcaggaaggcttttaatgcaatcttagtcatttaatggatggaaggttgtccaggttatctttttttttttttttttttttttttttttttttgcctttgaaagagtcaatttgtgaatttattggcataaatttgtttataatattctcttatcttctttctaattcctataggatgtgttatgatatcatattggtcattcctgaaattggtaattaatgtcttctcttttcctgttcattctgtctaaaagtttatcagttctattgatcttttaaagaaccagcttttggttttaatgatgtttttctattgtttttatgtttcatttttcattgatttttgctgttatctttcattttgttcctcatgcttgctttgcatttaattgctcctttttctaatttcttaaggtaaatgcctaattatttatgtgaggtctttctcattttcaaatatgagtttaatgctataaatttcctctaagcactgcttagctatatcccccaaattgtgtttttatttttaatcagtccaaaatattttctaatttcctttgtgagttcttctgtgatctgtgagttactatgtagaagcgtattgtttaattaccaaatgcttgggagattttctaaatttccacttgctgttagtttctaacttcattcaaaggacatagtttgtgtggtttcagttcttttaaatttactgagaaatgttttatgacccacagtatgatatcttggaaaatgttccaagtacatttgaaaagactagtagttccccacatggacacgcggaggggaacatcacacaccagagactgttgatgggtgggaggctagggaagggatagcattaggagaaatgcctaatgtacatgatgggttattgggtgcaacaaaccaccatggcacatgtatacctgtgtaacaaacctgcacattctgcacatgtatcccagaacttaaagtattataataataataataataataataataataataaaagattagtagttcccctttttccacagttttgctttccacagtttcagtgacccactatcaacaacggtccaaaaatattaaatggaaaattccagaaataaacaattcataagttttaaattgtgcacaaatctgagtagcatgatgaaatctcacattgtcctgctccctcccacatgagatgtgaatcattccttgtttggcatatctacaccgttcacactacctgcccattagtcatttcgtagccgtcttggttatcagatactgccactgtatcacagtacttgtattcaagtaacccttattttacttaattatgtcatcgaagtgcaagagtattgatgctggcaatttgggtatgccaaagagaagctgtaaagtgctttgtttaagtgaaaaggtgaaagttctcaacttaataagtaaagaagaaaagaaaaaatcttacactgaagttgctaagatatacaactgtaagatatattcttacagttggtaagaatcttctatgcatgaaattgtgaagaaggaaacagaaatttgtgcaatatatatataaggttcagtagtatctgtggcatcttctgagggtcttggaatgtattacctgtggataaaaggggactagtgtatattctgctgttgttaattatagtgttatctaaatttcattgattattaagagagaagacccaaataaataaaatcagatatgaaaaaggagacattacaactgataccacagaaattcaaataattattagaggatactatgagcaactatatgccaataaattggaaaatctagaagaaatgcacaaattcttagactcatacaacttaccaagattgaaccatgaggaattccaaaatctgaacagaccaataatgagtaacaagatagaagccatactgaaaagtctctcagtaaagaaaagcccaggacccaattgcttcactgctgaattctaccaaacatttaaagaagatctaatagcaatcctacttgaactgttctaaaaaatggaagaggagggaatatttccaaactcattctatgagtccagtattaccctgataccaaaaccagacaaagacacatcaaaaaaagaaaactacaggccaatatctttgattaatattgaatcaaaaatcctcaacaaaatattggcaatcaaaattcaacaatacatgaaaaagatcattcattataaccaggtgggatttattccagagatgcaaggatggttcaacatatgcaagtcaaccagtgtgatacatcatatcaacagaatgaaggatgaaaaccatatgatcatttcaattgatgacaaagaaagaatttgataaagttcaacatttattcatgataaaaaccctcaaaaaactgggtgtagaaggagaatacttcaacataataaaagccacatatgacagaccaacagctagtatcatactgagtggggaaaagtgaaaacacttcctctaaaatctggagcataataaggatgtccgctttcaccactgttattcaacatagtactggaagtcctagctaaagcaatcaaatatgagaaagaaataaatggcacccaaattggaaaggaagacatcaaattatccttgtttacagatgatatgattttatatttggaaaaaacctaaagactccaccaaaaatctattagagctgatacattcagtgaagttgcaggatacaaagtcaacatacaaaaatcagtagcatttctatatgccagcagtgaacaatctgaaaaagaagtcaagaaagtaatcccatttacaatagctacaaatacaatcaaagaactaggaattaaccaaagaagcaaaagatctccacaatgaaaactatagaacactgacgaaagaaatggaagaggctttttctagagatgccctgctgggagagtatccatggctttgcgtccccatcatggccctgcggtcggcggcctcctcctggagcacagcaaggtcaggtggcacctgcttgagtcctgcgttgccatggccacagttcctgagttgctgcagcagcaggaggaggaccacaggaagctgagatctgtatctgtggacctgaatgttgatccctcacttcagattgacatacctgatgcgctcagtgagagagataaggtcaaatttacagtgcacacaaagaccacactgcccacatttcagaatccagagttttctgttacaaggcaacatgaggactttgtgtgactacatgacactcttcatgtaccctagaacttaaagtataacaaaaaaaaaaaaaaaaaaaagaaagaacagaccatgctgggcttattgtgagtgttttagaaaatcaaataagctagttctttctgccttgctattcatttagtttaaagagacttatatccactttttataatggattgtgaaaattttgatttcatctacctactagagtatttgctaactattgggtaagtggaaaatatgtgaaggaatagtgttacagctttgaggtaatgcatacaggcttacattatttatgttgtaaagtggtataaacagtgtaatgactttagtcttatttacctttaggtttggtttttctctggtatgttctttccaatgtcagtagaattgatttctaggaaacattagtattggtaatagtatgtgataagatttctcaaaagtgctgaaggaggccatgcctgtaatcctaacactttgggaagctgaggtggatggattactgagctcaagatttcaagacctgcctaggcaacatcatgagaccttgtctctactaaaaatataagaaattagctgagcatggtggcacatacctgtagtcccagctactggggaggctgaggcatgagaatcacttgaacctgggaggtagaagttgcagtgagccgaggttgcaccacttcactccagcctgggtgacagagtgagactctgtctcccaaaaacaaaaaagtgctcaaggaggcagttttcagcccttgattgttaattcttggctgcaggaacagaggcttagctgattttaaaggagatttccatgcattttgtcctgccatgcagactgaagaatctgtccaaatgacaatttcttaataattgaacaaaattagtactgaagcttatatttagatatgttctgttcattcaaaatcaaagtccttgattatcctttgggattaggaaaaaaatcctttggaatactggagacttcataatcttgatggctaatcattggtgtttagcatttgttgtactagttttaggccaacattgaagcagtatagacactgttgtgctctgaacgattgtctgtaatggataaactgggcaaatgattgccatcaaagtgaatacaggaagatacctccttttaaatggccagaagaaataaggaaggttaagaaaaaacaggagttgacttttaaatagccccataggagtggagtggttgtctcctgtggaccagcaagagtagaacgaggcaccagctagaaaacatcgcttctgggacaagagactcatgagttcctgcctctgctgcagattccgcctgctcctacgaaggctgacttcaatggtccttgagagaagatgcagaaactgggagaaggtaaagggtctttgaccaaagaagaatttgccaagatgaaataagaactggaagctgagtatctcgctgtttttaagaagactgtgtcctcccatgaagcctttctttagtggctttcttctcaccctgttctcagtaaagatcgcaactttcatattttcctggaatatgatcaggatctaagtgttaggtggaaaaatactaaagagatgtttggtggcttcttcaaaagtgtggtgaaagtgctgatgcagtcctttttactggagttaaggaggtagatgacttctttgagcaagagaatgacttccttattaactattagagtaggatcaaagattcttgtgtgaaagctgacaaaatgaccagatctcataaaaatgttgccgatgactatattcacactgcagcctgcttacatagcctggctttagaagagcccacagtcatcaaaaagtatctattgaaggttgctgagctatttgaaaaacttaggaaagtagagggttgaatctcatcagatgaagatttaaagctaacagagctcctccgatactacatgctcaacatcgaagctgctaaggatctcttacacagatgcaccaaagccctcattgactatgaaaaatcaaacaaagctctggataaggcccagtttaaagagcaaagatgtcaagttggctaaggtacactaggaggagtgctgccagaaatttgaatagctttccaaatctgcaaaggaagaactgataaatttcaaacggaagaaagtggcagcatttagaaagaatctaattgaaatgtctgaactggaaataaaacatgcgaggaacagtgtctcccttttgcagagctgtattgacttgttcaagaataactgatatgccttcactctgaagaaaagaaatgaatgtgaaagaaagccaaacatcacttgcacttaaatcattaccagcggaagatttattgtcttcaactttagtttaaaattatgtgaataaatattttgatttctacaaatcttaacatttaaccatgttggtttaaaaatattgttgcttgctatttggacataactaatttttccttgtgcatttaatacctctgggcagaatctaaatactgagttctcctgtagtatgtctttagttactaagagaggatgtaggagacatatgccttctggaaacaagtagaagcaatcatctggcccatgtcctacaaacccatgaatgtcagggaggtgccagttacagcaggtgattcagcaacttgaggcaggtaacagaccttccattcctcactgaaggtggggtttgtgtttttgttttgccccctgttactcccctggtagtcatctggtgtttgtactataacaacagcaagaaaatctcatttgtctttatgtactcttggcacctcctttttttaaatcgagatataaatatttgaggggagaaaagtatctacgggtatatatggaaactgataatgtggtctactttataagatggccagatctacattaggaaaagtatgagctccttccatagtgtctgtgggaggtgatggggggagaggggacagtgtatgtctttggcgtttgtttttttataaagtatataataaaataatcatgctactaaaaaaaagaaattgaagaggacacaaaaaatggaaaaatagtccatgttcatagattggaagaagcaatattgttaagatgcccacactacccaaagcaatctacagattcaatgcaatccctataaaaataccaattatgtgcttcacagaaatagaaaaaataatcctaaaatttatgtggaatcacaaaagactcagaatagccaaagttatactgagcaaaaacaacaaaactggaggaatcacattacctgacctcaaattatactgtagatctatagtaaccaaaaaggccaagtactagcataaaaaaacagacatatagaccaatgggatagaatagagagccccaaaacaaatccacacacttacagtgaactcatttttgacaaagttgccaagaatatacattggggaaaagtcttttcaataaatggtgctaggaaagctggatatccatatgcagaataaagaaactagacccttatctttccgcatatacaaaaattcaaatcaaaatggattaaagacttgaatataaaacctcgaactatgaaactactaaaaaaaagcattggggaactctccaagacatgagactgggcagagatttcttgattaataccctacaagaacagtcaatcaaagcaaaaatggacaaatgggatcacgtcaagttaaaaatcttctacacagcaaaggaaacaacatgaagagacaacccacagaacccacagaaatgggagaaaatatttgtaaactatccgtctgataagggattaataaccagaatatataagcagctcaaactactttgtaggaaaaagacctaataatactgtttaaaaatagccaaaaatttgaatagacatttctcaaaagaagacctacaagtggccaacaggcatatgaaaaggtgctaatatcattgctcatcataggaatacaactcaaaactacaatgagatatcatctctccacagttaaaatggtttttatccaaaagtctggcaacaacaaattctggcagggatgtggagaagagggaacatttctacactgttggtggggatataaattagtacaaccactatgaagaaaagtttcgaggttcctcacagacaaaaatagtgctactgtatgatccagcaatctcattatcaggtatatattcaaaagaaaggaaatcaatatattgaagagatatctgcactcctatgcttgctctagcactgttcacaatagccaagatttggaggcaacctaagtgtccatcagcagatgtataaataaagaaaacgtggcacttatacacaatgaagtactagtcagccattaaaaaaaaaaaaaagagaatgacatcctgtcatttacaacaacatggagggaactggaagtcattatgttaagcgacataagccaggcacagaaagacaaacttcacatgttgttctcacttatttgtgagatccaaaagtgaaaacaattgaactcatggaggtagagaatagaaagatggttaccagaggctgggaaagatagtgtggttgggggtggagggctgaagaggaggggggatggttaatgagtacaaaaagaaatagaatgaataagacgtagtacttgacagcacaacatggggactatagtcaataataatttaattgtactttttaaaataactaaaataatataactggattgtttgtaacacaaaggataaatgcttgaggggatagatactcgattttccatgatgtgattataatgcattgcatgcctgtagcagaatatctcatgtaccccataaatatatacacctactaagtacccacaaaaattaaaaataaaaaaattaaattaaaaaaggtacagcattttaacccttccttggaacctaagctatgcatctgaaaggggagtttttaactgtataagtctgtctaaatgccttagtaacgtgatgaattatagtaactcagtgttttttcctccctatttgcagaatgttaaccattgctatgttttccagaaaaaccctatattagttaggatgagtaaagttagctgctataatacacaaacatcacaacctggtgtttgatagagcccagtcagatgttcctggttggcagatggttttccttatgatctttcatatgggtggatgagttccttccatcttgtggctgcatccccttctggatcttcagcattctctctcttcattcagctaaagtataaagagagcacagggaagatatacctacttcttaactctttgtccaaaaatgacatatatcacttcttactttctattagcctaaacttggtttgtggacacatctgagataaaggctgcaaaaatataatcaaactatgcctaggaggataagaaatcattttggtaaatgcacagcagcctgccacaaatttatttgaaattgataataattgttctatttaagaaaataccataaaaaccctagaagaaaacctaggcaacatcattcaggtcataggcatgggcaaagacttcatgactaaaacaccaaaagcaatggcaacaaaagccaaaattgacaaatgggatctaattaaacaaaagagcttctgcacagcaaaagaaagtaacatcagagtgaacaggcaacctacagaatgggagaaaatttttgcaatctacccatctgacaaagggctaatatccagaatctacaaagaatttaaacaaacttacaagggaaaaaaaaacatcaaaaagtgggcaaaggatatgaatagacactctcaaaagaagacatttatgcagccaacagacacatgaagaaatgctcatcatcactggccatcagaggaatgcaaatcaaaaccacaatgagatatcatcttgcaccagttagaatggtgatcattaaaaagtcaggaaacaacagatgctggagaggatgtggagaaataggaacgcttttacactgttcatgggagtgtaaaccatttcaaccattgtagaagacagtgtggcaattcctcaaggatctagaactggaaataccatttgacccagcaatcccattactgggtatgtacccaaaggattataaatcatgctactgtaaagacacatgcacacatgtttattgcggcactattcacaatagcaaagacttggaaccaacccaaatgatagactggattaagaaaatgtggcacatatacaccatggcatactatgcagccataaaaaaggatgagttcatgtcctttacaaggacatggatgaagctggaaaccatcattctcagcaaactgtcacaaggacagaaaaccaaacaccgcatgttctcactcgtaagtgggtattgaacagtgagaacacttggacacagagcagggaacatcacaccccaaggcatgtcgtggggtggggggcagggagagggatagcgttaggagaaatacctaatgtaaatgacgagttaatgggtgcagcaaaccaacatggcacatgtatacatatgtaacaaatctgcacgttgtgcacatataccctagaacttaaagtataataataataataataataataataataaaagaaaataatagggtgtggcctgaagaacattcagccctgtcccttttgtgtctgtgatgggccttatgagacacccttctcaacggtctgtgattctgaaccaagagtgtcctggtatctgaacactaacctgcctgaacactacccctgatcctacctttacttagagagtggaatcctcagattttcctaatatgtcgactaacgttgtgagaagattgctatttgggattggcattattaacacctcagatgaactttatttgtgggtatgtttttatttttatttttatttgtgggtagattttatttgtggataggtaggtacatggtggaggtgaaggtagaaaatggagcagaaaaagcatgcaaaactctgtcttgtaaatacaattaatcgagtgtcagatgttgtggcttgagagtgtccttttctaagatctgtgagggaaatggtagacaggttgtttcatcttcatgccttcaatgcaatgtcttagtgaccaggtgacttcatctccattaaggtaaaatgcctatgttcattaagataaggttagatcgctgtagcacaaaggcagtggctttgaaaaacacagaaattaatttctatcacatgtataagtatgaagtgagcattccaggctggcagacagctccactccacatggtcactcagggactcatgttcctacaaaagagctgtttcccataaccccagagcctgtcatcactttcacggtctcactgggtcacctgggttctacccgtccagaaggggaaagtggatacggaaaaagcaccccgcaatgttttaagaagtcaacaggcaagtactacacatcatatcacctgtgctcatatttcactgctgagaactatcctttggtcacatctaatgcaagggtatctggaaaatacaatatatgtaggcaaccatattctcagcaacaatcattttattgtggaggaaagcaagaaagaatcttagaggacagtcagtagtctctgccacagggtccatacaaccaaataatgagagtgatagttagaacagaatcacacttttattgcaagacaaaagagaagcataataagcttcaaacgttgatactattattaagttatttaataggccctggtgtgtaaagcattcagaaagtgtagctgcatattcttcaaattcatatcttaatttcttataagcatatgaaaatatttagaaaattaagaatagttttccacatttgctttcattctcaggacagcatttcatttatgcatttatggagcctctctgcgtgccagttgctgtgctagactctgaaggtataaagacaactaagatacagctctgctctcaagaagtccacaaactagtcatagatatgatctgggtttgggtttttattggttttgtttttacagtgctgaatggtgtgattagcgctgacctagagttgtgtgcacaactcagcatgggtgcacagggatgattcagggggcgtagttacagaacacacggggctaaacctgaaagtgagggtaggagttgaccagatggacccaaatagggaaaaacattactcgctaaggaaatggtgtgggcaaactgagaaagtataaaacagctcatgtgtgaaagtgttagtgagttagcctggagtctgaagtgcaagtcagggcagagcgagttgggcttatgagctttgcatcgtgagctgctaacagattttattctataggtgatgtggctccactgattcccaagacacctggttggatctggatttagagaaatcattagcaatgtaaaatgatagattggaatctaaggagttcaaaatgccagcagtaaggctaaacatgctgatgctttagctgagaaaattcttgtggaaagagttccatgtgccaaaagaaaaaaaaaaaaaacacttgacaaaactcttaggaatttcgtcttttgagaacaaagtcataaaagaaatacactttttaatcaaacttatcatagtgccaggtagtataagagaaatatatatatatacacacacacacatacacatatatctttatataaaacataaagatacatatatctttatataaaacaaatatatatatctttatatatatatatataacaaaaatatgtatagcataaaccacctttgaaggagacaagaaagtgtgagctcatgacataagacagtgtataactaggcacactgaaagtgcaggggctcccaaggctgtgagtattcagaggagggagtttaaaccatggcataatgagggattggaactttgccttgaaaagagacaacctgtcttggtttgactacgtttcataggtacaaatagaggcagattcttcttcctcaaatgaatgggcatttcacccaaacataccgacaagggaatggcagttgcacaagcagctaatttcttcttctcttcctattgagtactataatggaagaaaggagaggattattagccaaaaaagggaatattatagtgtgaatatttatgttcccccaaattcatatgttgaaatcctattctttaaggtgaaggtattagtaaggggggcctctggaaagtgattagggcatgagagcaaagccatcatggttggattattgtacttataaaagagaccccagagagctaactacctctcccaccatgtaagggcacagctggcaggtgccatctaagaaccagaaagcaaccctcaccagacaccaaatctgctggtgccttgatcttatatttcccagtctccagaccagtaagaaataaatttctattgtttagaagctacccagtttatggtattttgttacagcagcctgaacagactaacacagggaattaatggttagaatctctgtttcctccaggcaggattcagcaggaatactgaagaagggtgatggaataattgtgacagccactggctcatcttagaagtcagttccctcagatgagaaccatagagggttggtagggcgtagtgagagcagcagctgccagtaagacagactggatgtgaatcctatggcctgaggctgtcccagaatggtcccccatcaagtgtctttatgctcatggaggtacctttgtgatttttatggaaaatagccacatattcaggggctgggccacttgtctcttcaagaacagggagaccctagagaccaaggagggaaagtctttataaagtggcatttgcttgaggggctagaggacctgataaaggaaatatcccagggactctgtgcaaagacagtttggtgaggcagagggcaagcgtgcagcaaagagttaacacagcaggcctgctttagaaaggcctgcttgcaagggtggcccttggctggtgtctgggaacttggctttcaagacagtttccaccaccctgactgctaagggtaactcgtgatgcataaactacatgtgccaacaatacaatttatgctttctccctgaaactctggaattttagtacatgctaagcagctggtgcctatgtgaccagcccccaataaaaaccctgggcactgagtttctaacgagcttgcctgtcaaacagcatttcacatgtgttgtcacagctcattggggaggaattaagtacatcctgtgtgacttcactgggagacgacttggaagcttgtcctgtttcctccctactttgctccatgcaccttttccctttgcagattttgctttatagtgtttcactgtaataaatcttagccatcagtacaactgtattctgtgtcctgtgaatcttcctagtaaatcaaacctggggatggtcttggggattcctgagacagcaagactcactggaaggactccagtagaaaacagctgctcagcattgacacagataagcacatatatttgttttaatttctatcttccagaataagacatttgattattttaggtgtatcttccttaacaactgtaactactcagaatctttcagattttaggaaggcactgaatataccatatattattaaatgccccaggaggcctggggaatacatactaatgtactcaaatacattagtatggctgcttttaatacatgaaaagtctcactaagaagaataaatagaggttatatgtagcctcacatcagtccaggtcagggctcaccaccagatgagtttctgccaaacttaggggaaaaacacttaaaatttttagagcattttgaattttcgcattgcagataagggattgtggacctgtattaccctccttcttttgcttatccggaaattaaggcttagaaaagttaattgatttgccaacagtagcacagcttgtatctgatctggatttcaaatttaggactgtctaggctacatgcccgagaactcttatctatcactctagactgtctttctagctacttattttaagaatatgtcttcagtgtctgcatactactaaggaggaagtaatgtgtgaacaagggagaatagaaaagaagaaagtaattatatttttttgacatggccatttacataatttactttccttcatgaaatggattcctaatatatatttattgttaccttctgtaagtctaactgcatgacaaggcccaaaagagaaatatccacccattctctctcctagggtatgtctgttatatccttatagtcattctcagagtgtgagtgagagagtgtgtgtgtgtctgtatgcatgtgtgtgtgtgtgtgtgtgcccctgtatttgcattttgccttccaaggcagcaggagtgtgtcttattttctctctgtttctcttttattgcataatgctcaataattcatttaagttgatatgctttcattaaattgagtagaaaattaccttggctgaatgaagataactcccagatttctctgcatggggaggccagccacctcgcacttactggagaaagttcttaatagacttacccacttttaccctcattgtggcaacaaagaaatggtttggagaaaagagaaacaacaggactccttccagtaaaacaggaaaatatattttacataggtatttgctgtgaggaggatttgaagggacaggaaatcactatcaaatacatgtgaactgccaagtttcattttgacttttctgctcctacctgcctctcactttaaaaaataagtgcttgcttacccatgtttaggcaatagaaaaaataaaataaaaaaaaataaatgctgtatcaattagatagatgtcggtaacccagttttctgaatcctgacatcccagaatgtaagaatttgtcattctaataagtctgttctgcctcaacttgtaaatcagcttaattcaattctaagtgaaatctctcgtttttcattatgtctgacacaagcttagtaattctcagaaaatagtccttgtgaaatgaagctcagctggaaattctgatattcgatgatgcttacactaacaactgtcattcttggcaatggcttcattattcagtgacacagttaagagccttgttttacttttattcaaaaatgtctttgtctttctctgcttgttccagcaacagttttcctggagttttggaaaagacggcgagcagtaattgcttatgactgggatttgatagactgggaagaagaggaggtttgtatcatttacctcagaatgttgtaaaaagcaaatcacccagaaccacacgacccccccccaaaattgtcactctctgttctgtgacggaagtcaggtgtactcataaagcattttcaattgccttttcagaaaatttcaagcagtataaaaatggactgacaatttttgtaaatttttgattccttagtggaatcaaatcccttgattaagtggagaattccacttgtaggtagaggcaccagaagaattggtggtgtagctttttttttccattttcttaaaaatcatccttttttctctaacttcagcagaaaaagagcattcatttgacatctccaggtacatggaagcaatccttccaagagaattacccaaaggcagtgtgtctgtgagcagcacccaggaccgtgcccaggtgtgcacaggctctgaagtatgacatcaagtgttccgtgctggggacaatccactctgaagcggccaccttgggagacgtggttaaatggagggccagctctagacaaaactgccaaggagggccagactcagcccaccactgtcccttagcgtcttctaggccagtccgttgttctcctcctgacctgtcttgttctaatagtctcttcttgcccctattcctgtcggaagtctgaagtacccacactaggcgtggtcaccacggtcccctcttggaccctgcttcccttgacagttggtccaggcctcagccccactctcctccctctcgttcattatctcttacccctcctgagtctcatttcctcagagccttgctgtgccagtaaatcagataaaccactcatatgtgtaatagttttttgatcatggctattaatatgtgttttccttgaagggaacacatgtatatattttcatgtataaaaaagaatctttcagaaatatgaacgatgtgaattttagccctgtggtaggcttggtgggggaagtaattctgagaggtatttttgttgttgttgtttgtttccttcacactatgcctcctcaatggctgcctgttccccttctcccatgaacatgtttgggtagttttttggtttggtttggtttggttttgaatgtacttcaggtgtacaacaggaggttttgatacatgacactgagattttcagcaatccttgttctcctgataaggctttctttcatgtttttataaatattctccaggccaggtgcggttgctcacacctgtaatcccagcactttgggaggccaaggaaggggtaccacttcaggccaggaggaggatttgaggatagcttatagatggccatcttctccctgtgtcttcaggccaggagttcgagaccagcctggccaatatggtgaaaccccatcactactaaaaacacaaaaattagctgggtgtggtggcatgcagctgtgatcccagctacttgggaggctgaggcacaagaattgcttgaacccagaaggtggaggttgcagtgagccaagattgcaccactgcactccagcctgagtgacagagtgagaccctgtctcaaataaataatgtgtatatatattttttctaggttctagatatatatatatatatattatatatatatatatatacatacacatatacatatatataaatagattttcttcaagtggccaattttcaaacatatatatatatgtgtatatatatctagaacctagaaaaaaaatatacatatatatatgtatgtgagtgtgtgtatgtgtgtgtgtgtgtgtatacatatatattctaggtttgaagaagcttcccaggctgactatgacatctattggtagcagccggactgcattcagaaattcctcttgtgtggtgccattctgctgtttctggttatatgtgttcatgggaacagttcccagtgggatggaaaatattctttcctgggaatcaccttgggcaatttacttcacctttggactttaaaaatctctaatgaaaagaagtgggactaaattttccccttctatctgtaaagtgtggccctatttgagtaactttgactaaaccagtctacaatcattgttggcgtttgtggtgggcccctgatgtgggcacccttctggggaacgtatgtatcccttataagtgtggagccttctgtcttcccagcccctgataaaaagcgtggagtgctgaattgtcctctcactctgcatacctttgtacaggagcctacatacgtagccattcccagcttgggattccttgtggaaatgcctcacttctagcccatgatttctaccttattgtgcagaaaaacccagactcgctgcagaccttctggggcaacctcgcacattagtttgtcagggctgccataacaaagtaccacagactgggtggcttcaacaatagaaacttacatgctcacagttctggaggctagaagtccaagccaaggtgtcagcagggttggttctttctgagaaccatcagggaaggatctgttctaggcatcttttcttggcttatagatggccatcttctccctgtgtcttcacatcgtcttccccctgggtgtctctgtgtccaaatttcctcttcttataaagacaccagtcatattggagtagggtccaccctaatgacctcatttgaacttaattaccactataaaaaaaacctgtttccacatatggtcacattcagtactgcgggttaggacttcagcagatgaatttgggggaagcaagacacaatttggcctataacacccagcgatatggtttggctgtgtccccacccaaatctcatctttagttgtagctcccataatccccatgtgttgggggttggacctggtgggaggtaattgaatcatgggggtgggtttttcctgtgctgttctcatgatagtgaataagtctcttgagatctgatggttttataaaggggacatcccctgcacatggtctctcttgcctgccaccatgtaagatgtgtctttgctcctccttcaccttccaccatgactgtgaggcctccccagccatgtggaactgtccattaaccctctttttctttataacttacccattcttgggtatttcttcatagcagtatgaaaatggacagatacatccaggaacacagacctgtctccatgattggccttagttctcggatgactagctcaagggctcttgatgacacttatggcccaataaattgaaagtttcccaaagaagcagaagattctaggtctgctatgtttatctcctcaagtataactgcctaaaataaatgaaagacagagcctgctcctaatgtatctcctgctgatcttacccatgacctacccctgagggaagtccagccttgggctaattcagtggcaggagccaggctgagccatgtgaaggccatccttcatgctacatgggcaggctgctgccaaactgggctctctctccatgacctctcttctgtcagctcgttccttgctttctgccagtaccttcatccgaatcttgaccatttctgcctggattaactcaatctccatttcagcagagtttctgctcatttgccatcctctcccaacactctcaaacataatgcatgcttaattaacgggaaccacatcaggttcccttgctgattgccttttcctaatctcataattggtttttagtcagaagcttttcacattcaggaggctcagctaaatgaaataaaatctcagtttgatttagaattggaggaaccttgattttaactggttttgaaaggtgcttaccttgttttcaattaagaattaagaatatacctaaagtctattggttaaagatgaatgactcctataggaacttattaaaaagtagattcaccatgtttttagtgaactaaacctaaaaatgcaaaaaaaaattgctggagaaaactaagaattatattgtcattataacttacaaaatggattttgaacattttcctgtagagaagccttctttgtcctggtgtttcttatcactctctggtaataaaagtaaaagcttattagttgttccaaaccattaggacaggacagcttgtcccttttaaaataccattctcagggtggttttttcttcaaggttagttttataagataacagataaatgtaactgttagtccaaatttctttgcttttgatgatagtaaatcttgatcttcactctttagattttcttcaagtggccaattttcaaacatttaagcctgggcacccaaacccacttcattggttgactaattagtgtggcagctgttgactctgttttatggtggggtaaaatgatatttctttttttattgtgtgagcacctctttagtgcattaaaatgtgtctgcttgtcctttaggaagaaatacgaccccagtttgaagccaagtattccaagaaagagcggatgaatccaatttctggaaagccagaaccttatcaagcatttacagataaatgcagcagacttatcgtttctgcatctggaatattttttatggtttgaaacttttaaaaaaatatttgtttcataaaatacaaacctatagcataataacagtaatcatattgggcatttgcattgttctacaaaatatttttgcactttgttatttattcctcacagtaacttcgtctggtggtcagggatggtattgctatccccatattacagatagaacaactgagactccaacaggttatggggcttgcccgaggtcagccagtaggtagctaagagctgagaccctctaatctgatattctttcctcttgccatattctactgtgtgatgctgaaaggagtcaaaaatgtgagacaggatgtacagtagtgtttttcaaacttttcaccatgcccatacagtaagaaatatattctctgtcataaccccgaatatgccaagcaagtagatgtataaaacagtgtaagtaaaacagtgctcacctttataatatgcataagctctgattttgttttattatagtatatttttaatgacagattagcctcctaaaattaatttcctgactcactaatgatcatgtcagtttgaaaaacagacctcagtttttagcttttcctaaaaagcagtcttagtaattaactttaacactgttaattactgaacaaaacatatgcagatgtttctgaaatgtcattttagaacagtaaaggatgattaggatcctcctttccttttttcaaatgatgagtatataaatatatgcctagaccattagagtaggaaggacaagactatagcaaattcagacaggctactccctttttccagtgaagaaactggggagatgaagggctgggcagcttacccagactccttggctcagaccaagattcaaatccatgcctgtctacagatactgcttttaagcaactgtgtcatgctttgccttctatgtacatattcatatttattgtattgtttcttacaaagacccatagacatagattaagcttttcctgttctatggatggggaacttggaacacaggaggctggagctatggaaaggacaagcttgcccaaggtcacactgctgggtgatagctgagctagggctctaatctctcttctgactttgaatccagccagctgtccatcctacctcattgccatccttgtctgaatttcagcatagattttacctgtctcctgatcaacagcactacaattaagatctggacaggtttttgtttattttattgttattttggccagtctgagctaggacttgtacttgagcttttagaacatatctcccttaaaagtaagcagaaaataaattatgtgcaaaacaggaatacttttgtgaagaaaggaatctctaaatcagcagaggccttcctgaggcctggcttcaaggtctagcctttgataattaagtgggttaaggtctctaagacatgttaatattaggtaatcatctaatgaaagtcacaaaactttttggagtctcagatttgcattaaagtcagccctatgtgtctgtgggttctgcatttatgaattcaaccagccacagatggaaattttttttaaaaaaaggttagttgtagctgtactgaacatgtacagctacatgtcattatttcctaaacaatacagtataactatttacataacatttacattgtatcaggtattataagtaatctagagatgatttaaagtatataggaggttgtgtacaggttatatgcaaatactacactattttatagaatggacttgagcatctgtggattttggtatcatggtgttggggggtggttctgggccaatccgtcatgaggatactgagggacaactgcatttcatagagaaagaagatatgctgtattgttctcaaatgccatgaaatcttcagggaaacatgcttcagtctgtgtgaatatcagattaacaagatatgtacctatcacgtagttggttcactcaacagcaaataactgagcacttactatgcatctgtaattatgctaaggtgctgtagaaaccatgtgagcaaaaaagactccttccctgtccttatggagcttactttctagtaggggagcctgagaatagtcaaacagattgttagaaattataagtagtgtcctgaaaaagatgtaaccatatggtatggctaccacatgacaacacgaaaaacaaatagtctgggagtcatgaagaacttttattatgaagtggtgtttgagctgagaagtgaggaaggatgagtaggtgttaactaggctgtgtgtgtgtgtgtgtgtgtgtgtgtgtgtgtgtgtgtgtgtgttcggcaagagattgggtgggtaggtattacaggcaaaggaaatagtcttggcaattaagggtgcttagcccgtttgatgtaatgagagaagctgtggggaccccagagggaaggaagaatggtgcccaaaggggctagagagagggtcttgcaggctgcgtaagggttttgcttttatcctagaataataggaaactaataaacaattttaaaccgaagagtgacatgataggatttccatatgaatatttgtccatctgctcaatgtatattctgcattaaaaagtgttgtcccatagcttacacagattctcaactttcaagcgtgtagttcttttattttaattaaaaaaaatagaaaaaggcaagagaaagtattaaccacaatgaaaagtatgcatttgattgtgatctcttgagcagtactgccatggtgttacttccttttcccatcagaggatgttccaggaatgtgaatcctcttcctgtaacattccaccaagaggttcaccgggtgtcttgtcttcctgccagatctgcgtggtgattgctgccgtgttcgggatcgtcatttaccgggtggtgactgtcagcactttcgctgcctttaagtgggcgttaatcaggaataactctcaggttgcaaccacagggactgctgtgtgcatcaacttctgtatcattatgttgctgaatgtggtaagtgagctgcagtggctagccaaacggatcaaaatgtgtgggctgcaagtgacagttttcttctgttgctaaggggatctggcctcagagaggtgggccattcacatagcactgatgtcctggcagcgaagtgcctggcatgaagatgcacttgggtctgagtgcttaaaagtcttgattcaaatctagactccgggcttttctgcagtataagattgggcaaagcacataacctctctgaacattagttcccttatttatccaataagattatattgtgaaccccttaagtaaatttagagaaagaatttagaacactcagaacctgtgacacagcattgcaatgttggttcctgtttctttttgattatcaatgataggaagatagacagtatccaaagcattcctggctaggtacaggggctcatgcctataataccagcattttgggatgctgaggccagaggatcgcttgagcccaggagttcaagaccagcctaggtaacatagtgggaccttgtctctacaaaaaaaaaaaaaattaattagctggtcatggtggtgtgcccctgtagtcccagctgctttgtggggctgaggtgggaaggtcacttggttcaggaaagtgaaggcttcagtgagcagtgacagggccactgcactcagcctgggtgacagagggagaccctgtctcaaaaaaacacaaaaacaaacaaaaaccaaagcattccttgatataaccctgcaaggaaaccgccaagctggtacatattgcttttgttgatttccaggctttttcagatagcatatttcagcccagatttctttcctgaatccccaaactcacacgttaaactgcctgcttgaccatctccacctaacactttcaaacccaactcctcatcttccctccagaatcagctcctcccacagccttcctaattgtacttgcccagactaaaagtcgtggcattctactggactcctctatttctctggctgtctaaatgtatccagaatttgatcactttctgcacatcccgaagtcccaccctggtccaagtctgcagtgtctcttgccgagattattgcagcagcttcctaactggtctcccagctttcacattgctcccttcaatctaggctcaacatggaagccagagagagcttcttacatgtaagtcagttcacatggctcctgtgttcacaaggtgtagtggctttcctctctctcacagtaaaagcctgcgaggccacatctacacagtggcctcacgggctttcgctcatctggtctgtgtgacatctctgacctcatcttttcttttactcactgtgattcacctgctccagccgcacttgtccttttgatgctctcaccccaggactttttttatttgctgttctctctgcctggagccttttcctcccacagggtctgcatcgcttagtccctcacctccttccagtctttgttcaaatgtcacttctctagtaaatgcttccctggtcactctgttttaaattgcagcccactcctgctatctgacaatttcccatctgcttgcctgtgttttttctatagcatttatcaccatctaatatgctatatattttacttatttattttgtttatctgccatttcttttggaatgtaggcccataagggcagaagcttttctttattttgtttgtttgtttatttttttttcactgttgttattccctagtgtctggaacagggcctggcacatagtagatgctgtgtaaattgttgttgctattttttgtagaacaaaagtagtgcctgacatggtcggctgctgaggtcaacctatacataaaaatatggccaggcactgtggctcatgcctgtaatcccagcaccccatctctacaaacaaaatttttttttaattagccaggtggcacacctgtagtctcagctacttgggaggctgagatagggggatcacttgagcctaggagttcacgactgcagtgagtcatgattgcaccactgaaccctagcctgggtaacagagcaaggacctgtaaaaaattaaaaaaattttaaaagctgaccttaaaggtttgtagtgtaaataagtaaaacaatgtacatagagtgccaaggacagttgttaggcatggagtagatgttcaattaattatagttcccctatccttatttatactgcgtcttaaatctgggccataatgctgaaatgcttacatctttgaaaaaagattttccaaaggccaactaatttaatactattatccatacaggtttatctatgtagcttatcatttctagttctttaaacaatcctgagttccataaccaataaaacttgagtgattcctaagagaattcaacctacccaataacaaagaacttaatttatgatcactaggttaactagtaatcaatgagctaattaaatgcaggtagctcattattagtattaaaatacataaaacatctttattattttaggaaaaaagtttcaagactcagaagtaataaaaaaaaaagggcagttgctgatcattttgacgtgatgtttgtgcgacagcttagcaagtggagattgaaagtagatggttagcacttcctgtacctcccccttttgaccccccaccaggactcggtctgtgttaactgtggaatacacattgtaggtagagagtgattcctagtgaaattaaccaaacagccataggtgaaatgttttgcatcccattaggatgcaatgaattaatgcctactatattgttatcatctatttcctccaatgtcttaaaatttaatttatacatcttcttaacaaataaatgcctgtgtggcatgggcaaaggcttcatgactaaaacaccaaaagcaatggcaacaaaagccaaaattgacaaatgggatctaattaaactgaagagcttctgcacagcaaaagaaactatcatcagagtgaacaggcaacctacagaatgggagaaaatttttacaatctacccatctgacaaggggctaatatccagaatctacaaagaacttaaataaatttacaagaaaaaaacaaacaaccccatcaaaaagtgagcaaaggatatgaacagacacttctcaaaagaagacatttatgcagccaacagacacatgaaaaaatgctcaccatcactggccatcagagaaatgcaaatcaaaaccacaatgagataccatctcacaccagttagaatggtgatccttaaaaagtcaggaaacaacaggtgctggagaggaggtggagaaataggaaagcttttacactgttgatgggactgtaaactagttcaaccattgtggaagacagtgtggcgattcctcaaggatctagaactagaaataccatttggcccagccatcccattactgggcatatacccaaaggattataaatcatgctgctataaagacacatgcacacatatgtttattgcagcactattcacaatagcaaagacttggaaccaacccaaatctccatcaatggtagactgcattaagaaaatgtggcacatatacaccaaggaatactatgcagccataaaaaaggatgagttcatgtcctttatagggacatggatgaagctggaaaccatcattctgagcaaactatcgcaaggacagaaaaccaaacaccgcatgttctcactcataggtgggaattgaacaataagaacacatggacacagggtggggaacatcacacaccagggcctgccgggggtgtgggtgaggcgggagggatagcattaggagatatacctaatgtaaatgacgagttaacgggtgcagcacaccaacatggcacatgtatatatatgtagcaaacctgcacattgtgcacatgtaccctagaacttaaattaaaaaaaaagaaagaaagaaatgcctatgtacaggaagtgaatctgtaaatacacacttgcccatatgtttcgagcaggtgccagtgttgtcagagtaaaacacttcatttaactggaaatcattgatccagcaatatctatttcaagacacagcctagataagaggaagtaaacaaattcaaaatgaagacgggagcatagggagtggcaaaagtacgtagttgctgatgttacaaagcacctgctatatgctgggagctaggctgctaggcattttacatcttttgtctcccagagtgttttagactagccaacatggatgaggtagagttcacactcgaaagctaacacatattattcttagggatgcccttgtggtttttcatttattttagatataacatgaacatctttggtactctgattttcagccaacatcaaactagaataacataaggttgctaacgcaagaatactgatgagaacagggaatgacaagccatagcaaagagagggaaagaaaagaaaaaatgtacataagaactctaaaagcagcatcaaccaggacctctttgtgcaggggccagttatcttaccctcctcagctatctgtgatgatgtctcatccccgcacacacatttacactcctgtcccctgaggttttgtgggtaccattatgagggcaaccaaatgtgtaatatagttggaatggtttcatcagaacatcttaaaaaaattttaagtcgtttctatcagcataagggatgacagactaaaggttgtaatatagctttgaccagttcagaagtaaactctccagtggcttctgaaattactcaatgtgagatattatcgtgacccaatatagattttttacagctgtctattgttttcaactacttaacatattgaccatacttttcttccaaaggtaatcattatttagacattaattattaataatttttatcaactaaatataaaaaccttgagagctagattaaagactctgattttttaataattattataaatcacatatcccatttctgactttttgctagatttgtccagtgctaactaaaataactaaaatatttttatatagtatttactttaaaatttatattatttttacaaaagccctctaggtcctaatgaaatattatgcctcttaatggctggttaaggggcacttagtagttcacattttattccgtgtcttgaaaaataaatatttcaaagatagagtgaatagaagtgaataggatggaatttcttgttcccgatcatattgtctcaattctgttctgcttcactagtgaccgaaaaacatcccaatatggtggttgcaagccaaataggccaacaaaggctatatcccaggaatagactaaaaagttattatcatcctttttatccagccatgccaatctgaatcagatatttaattatactataaacacatctcatcttccaaaaaaaaaaaagtaaaagtacaccagataatatagcttgcatcagagcaagtccacatttattgatcagcctggcaagataaaagtagaagtacacacagcttccttttggacatatctgtaagatcagaaagctttctgccggttacagatattcacaatgagaatttgcagcatccagtttggaaacttagattttccactgctcttagcagaacaaacttcccgtggtttatctctcaaccgtctaatgagaaatcagacatttttccagaaaccactcatgtggagatctctgagcggctgtgagtccctctgtgtgtgtgcccttccctcctgcatcctgtccaatgtctcacagtccatatccttatatgtatatccttcagcatatatatgaagtagtcacagatgccatggatccctactgtgtccctgtatgctttaccttatttttcacaaggttaatattactcatatgttgactcttatgttgttcctttttttaaaattacaatgttttcagtgttcacacccatgtaacaaaggcatatcctcagctccgagggccttttagacaagtgtgcaaagtgaggtactgtgacctacacatcattgtgaaagacataaaagataaaccagttaatcaagaattgtatttttgagaaaggttgtctcatcagtcaaattaattttccctgataattacataattaaataattgtaatgttataatgccttcgtaatacattgtaatattaaaatatatttgattagaacatctgttcttatctgttgtttactaggattttgtttttatgatcaaatgggtatgactaacctatgtcacaaggtttcttatggaaaatgacaccaatctccattaccactggactccaagagtctgagatttctagacataagatttgttcctatgccatattaatatatcctaatatagcaaaccataattgttgctgaaagtttggagtcatacatacagattatgttgtttatttctgtaattagcagaaatctcagataagagaattcaaaaattaagcaggacaggaaggtcagtaagttcaatacccatcctgcccacatataaagaaaaggatggtctgaagaagagataaggaacttgccaaagtcctgtagcttgctggatggtcaagctgtaattccagcctgggcaattttaaccagtgtgtttttactactttcatctaaatgtgttcttaatcttcatattgttccagtctattaaactacttttccttttcattttcacttaccgtcttttgttttagaaacagcacttgatgtttcaattatacccactctggggaatttcctagagctggatttaccctagactatactctctgctccttggtacacacacgcacacacaaacacacatacacacatgcatacatgtaccccaccctcagaaccatctattgaccagatggctgggtgagttaaggatgcgtgagttaaggaggcatcgggtccaccaatggaaaagtggagtaccataagctctgggaatttccagtaatgtttaatcacttcagtgcttttgaatgctgtaatctagagtttacagcagtccataaagaataggattgcaggatcttaccatcagaagcgggcttagagattttacgttcaagatgcagaggttcagcaatattatgactacccagcactgcctagaaagctggtaatgaatagcagctagccttgttgccataaaattattcgccccaaaataagaagtgagattttataaatagttagataggaccttgtacatttctttcttgccctgaaaattacgctaatctccattaccaatggactccaagagtctgagatttctatacacaatgttttcattggttgagcaatggatgcttaatgaaattattttgactcgtgatttgactccctatttcctttgtgattatagattttataatacgtgcagttcatttattaaatgcatgaaatttattttacagctctatgaaaaagttgccctgcttctgacgaatttaggtgagtggaatcctttctatttcatagaactgtactgtgggctagagagtatggttcaaagattcctttctctaatactgctggaaagaaatagtccctttattttaaaattcatacaacaagttttttctttgccttcaacagaataatttaaatatgtctagtaatttttctatataaatctttaaaatctgtcacaaacattatctgtcatgagctaatgtaatttaaggtagattttctcttcatgcacaaaaaatagcattacaaaagtacatttgtataaagtatccagtataatttaggaaagtgttcatttgctattgcctataatttttgtttaattaaaaatgtatcaagtttttatggtatataaactcacagcaaagttagtttctttgaagactggaaggccaggcatggtggctcacatctgtaatcccagcactttgggaagctttggcaggaggattccttgagtccaggagttcaagaccagcctggataaaataacaagaccctgtctctacaaaaaaattaaaaaattagccaggcatggtggcatgtacctgtagtctcagctactccagaggctgaggcaggaggattgcctgagcccaggaggtcaaggctgcagtgagtcatgatcatgccactgcactccagaacaatctggtaaccagtaataacttgtacatttatcacattttcaaaataaagaaattgtcccaattttattaacaaggtattggtcattgtgctccatgcagtttgagaaaattacatgctcccgtccacaacttgctttaatgcattccataagaagcttgtccagaggagaaaaaactcacaaaagtgttcctatttttattcatcattctgacaacagatagcatttactgaaactttctatgagctggatacagagctaggcactttaccttatctcttttaatgtcattgaaatcttccatcaccaccagttcttgcccaaaaagatagaagaggtttatgtccatggaagaggtaactgcccattggtagacaatgtaccctgtggtagcttgatccaggctagcagaaatgccattggaggtacagtcctggtccatccacggtggggacacctgggaacctagctggtgaccaggagacctttccatgtaaccaggagttcagtagcagaagtgaaaccctttaagaaaaccctttaagaatcctgtgtctttttggccctccgcaacagtatggccttgtcctaaaactgacattttaaaccattttaaatcagatttactttcattctcccttcccttctcagacatgctccctaaaagcattttgagttataatttgtggaaatgaattgattaaatgaagtattaaatgagaaatcagacactcagggaatgtggaagcagacaaaatgctactgtattaaatacatttcattagacattgcttgctcatagaatgtagctcctgtgaaaggataaattcattcgacatgagatctctagctggagatttgatcttaagggcaaatggatccatgttttggttcacaccattatgtccagagaacatttgctttatggaagttgaaatatatggagatgagattggcccctgactgaggtcaggaaattataagacacagatggtgatatgaattaaaacctctaaagatgatgccacctccttgatatttgtccatgagaatggaaaatgggggataagggtaaaagcaaatgagtcaaatgctcttagccttctatgataggcatttgactccctcttaagcagtaggttggtataatatgagaactagaagttgagaccaaggaactctttggagctgggaggaactaagcctgcatagattaagaggaaaagaaaaggctactgcagagagccacgactgggaatgaggcctcgacagcctggctgtctatgctgctggctctccaggtatcctgtaagagtggaacagtctaggtattcaattctatcagattcttccatagccacttctcatgagacccttgttgggtctggtctgtgagcttgaggatcctatgagtggtctgttccaccacacgccatccgtgggtaaactggagtctcctgcagcctcctcaggactcctgcgtccccaccctgtgtgtgtggggagggaaagagagggagttgagaggggatgagattcagcctttcaaactctgctcaccttttgtccacagaacagcctcgcacagagtctgagtgggagaacagcttcaccctgaaaatgtttctttttcagtttgtcaatctgaacagctccacattttacatcgcattcttcctcggaaggtaagaacctgacccctgcacacctccccaagctgaggacagaacacttagaaggcactgactcgtggggacagagaagccctcccttagggtgatttatacaaagtgtaaaaagggaagagcatcctcctcccttctcttcccaaatctcaaaaccacctggcatcccagggaaatcatctccactcaaaactgtctgtgcaccttttgttgctaagataagcagaggaaaatagtttgtgcatgtgagtgatgcattgaaaacttctggcctctgtctgcacctgaatcaggcccctggctttcccacctatgacggcaggtggtacaacggggagggggctgtagcatgtcctggattcctgacttcacttaaaagggaaggacatcctgacaggaaagggggcaaaaatgggatacagaggatgctgggtaacttttaaatccagcagttatgaggatttgggaaagattccctgggtagtggtaatgtcgcatgaattcccttacatctggaggcatttcagaggagatgggaacctgggaaggaccaggtatagggttttggtgagatcaacacagcagtctctccttcatttctagctattccagcagcacaaaattctaggcaaatagttcaataatttttttaacagcatgactattactcagaaaaatcaaatgtgtttaaatccaggagtaaaacttctgcttacacaggtcagagcaattgatatgcagcagaaaatgttgaaagtccacagcaagcagcaagaactggcttctgctttaggcagcctgacagaaaggccagaagagacatgtgccctggagaattccagaagctatggttatgacagatctggagggtttcctaattcccccagacctactacttatagtagcagtcattcacattggagaatgtgctaaactaaatgtaatattcgctgaaagcttggacctagagcactaatggcttgtttttctctgtgtgttgaagatttacaggacacccaggtgcctacttgaggctgataaacaggtggagactagaagaggtctgtattctcccatcattccttgtttccgacagacttgcattaaacagccttagggcaactttgtgtagattataaaccagacaccctttcttcctctccattgattctggaatttctgtgtttgcttaccttgcagtgccaccctagtggatgccttattgatctgtgtatgcaaatgggtattataatggtgctaaagcagacctggaataatttcatggaacttggctacccgtaagtaccttagtatcaataattgagaggcagcattgctcattattggcttttctaggtgtggcaagtaagataagcaatgcagactcagcagttaagccagtgcgtgcacctggaactaagtgctcacatttagacatccaaaggcagccatgaaaatcataaacattggctcttctgggagatttagcacaattcacatgaacaaacgtgaatattctttaaggagactctttaggcccctaaatattggatacttgcttgtgagccactttaaatacctctgacctttcgggctccagcattgcaagtccttagctatgtatgacacattaactacatctccactctcccatcctcatggtaaggctggtgataagatgttgacaacaatgagcaaaaccttgcatcaacttggtaaggatgaccttgaattctgctgtgtttgctcagttatggtcagttaagttttaatggggacataaatcaacaatgcttctattctgctttaattccacacctattggtttccatgtcagctcaatgtctctgtagagacaaagaaaactcaaggtttcagggaggaccactcagccagaacgattagtgggaacttggttcacttcagaaaatcttttcttagctctctgtcagaaccaaagccagtaattttctgttcttagatttatttttagaaatcttgttccaagtatttgatgttttctataaaacttttaaaaaataaaacattaaacaaaaattatcagtgttgtattctactttaagatataaatcacaattaaaatgtcatagacatcaagagaattatattttatcttctgataataaggacatagagcaaaattgtaaagtaggcagtttgtctttgatgttcattcctttatttgcttcatttcccatgtgttttgttttttggcccttctactcctggatatccttcaactttttccttgtcctgtacagaacacagacctgcctccaatctgtcatttcctcaatgctttctcatattacaaaatgcactcctgaacactgctaagggttcctgtgctaaccttaccaatgccgggtgcattttactgggagtcagagtccctgtggagagctcatgccaaaagcaaacaagtccagttgtagaactgcaggtgtttgtgtgccaagagaggaagcattttgtgggtttgcagatctttaggcccctgatgtcagagtatacagctcagcacccatgtagcaagactgctcaagggtcctaaatcaagccacttaagccagatattcctcaagatatcttggtgttgcctttgtactggggtatccatttatagatattctcagtcctctattcaaccctcataggcaatgcccaacatgagacagtttcatgaatgattaaaacaagttcatcaatcattctgtttacttgcaaatataaatacttgaagtatagactccattgttattttcttcctaacctgaggctttatttctttgatagcctgtcctgaattttttcaaactattgtttctgtattcaaactctcctttttcttattacctaagtcatatgatcagttacattttttgtaagaaattgatctttttgcccaggttaattcagaattggtggactagaagaaaagtacgacaagaacatggacctgaaaggaaaataagtttcccacaatgggaaaaggactataaccttcagccgatgaatgcctatggactcttcgatgaatacttagaaatgagtatggaaatattctactttatcttattaattataaattttagatctccaggtatattcaactaaacatatacccgttatcatcaaggtcctcagtgcgtagggattcctaaggcaaacagagaggaaggcatgtcctgcttaaactgtgctacacttacatttaaggaatcagatttctctggaatcaaaccgaagctatttctcttagcacgtatctaagaccatgggctttggaagtaaattatctgggttcaaatcccagccctatcatttattaacggtgaaactttgggcaattacttaatctctctttgtctcagtttcctcatctctaaagtgggaataataataagaggaaccatttcataaagtctttgtgtggattaaatgagttaatgcatgaacatgacttagagcaatgcctagctcactatgtacttggtacatgttacttatatcattattattctcttattctttttgtcttctggagggaaaggcaaataaaatatcttagataaattaagtatgaatatattttctttcattattaaattgaatatgtatatatttcctttcattttaagctctaacataggagtggaaatgagggaagggctgggcaagaaccatttcttctaaaggtagcagttctttctggtcaaattagaaatttaaaggaatagtagaattgatgcttaatgtttcttaaattgcttatgttctaagtatctacttatgtctttagagtttcaattatagaatggaagaatgatataacctagggaagaaatcaatttggacattaaaaataaaacttaataaagagaattcattaagagaactaaccactttgagatccttaatggattcttctcccataaagaagacaatgaacaataatgttggtatattgagtgcttaaaaagaaccttttatgtggctagaatttggtagtgctccaaatcctgaagtatctttgcaacacaaaacaaatctcagaagtatcacaagcagactgatgagttctaactgctcacttctgttcttttgtttttgctattttcttaataacttccccactttgttatgtactttaaaatgtattcactgaagtataatagtggaaaagtgtatataagtgtagagaccaatgagtttttgcaaatttacacacaaatgtaaccaaatatatgtagatgagaggttggcaaactattgcctgcaggtcagattcagcccactgcctgtttttgtaaataaagttttattggaacacagcaactcccatttatttacatattatttgtggctgctttggcactgcaacagtagagttgggtagttgtgtcagaaagtggctggtctgcaaagccttctttatttctagaaaatgttgctacccagtgagctagatcaagaaatagaatattatcaatatcaaagaagacttctttgtcccctcttccatttataacaccctctctaaccactttcctgacttctaacaccatagattaactttacctttgttattctccatttaaatgtaattgtagagtacataccctttgtagttggcttgtttcattcaacatcatctttctaacattctcccattttgctacaggtagtagaacttcattttattgctgtatagtattcctagaatgtagaccaggagccaaattatgaaacaggagtttgtctttgacacccaccctcatctttccttagtcatgtgggtttttctgtttgtttgttttgttttgtttgcatttccactcccagatgagccccaactttgtcccctgctgccctgacacagcacacagacccctataccaccatcaatccctcaaccctccacatatcatgaaatgtactcctgagcactctaaataataatatgctaggtaactgcattttaacaaaagcaaagcctctgccaagcttgagtcaggaaaaaaaaaaaggcaaattcacttgtagaagtgaagacatcagtgagccaaaagatgagctattttgtgagtttgcagatcttctaggctcctgaataataatgtactgttattgaccaggcgtggtggctcacacctgtaatcctagcactttgggaggccaaggcaggtggatcacctgaggtcacgagttcaagaccagcctggccaatgtggtgaaacgccgtctgtactgaaagatacaaaaattagctgggcgcagtggcaggcgtgtgtaatcccagctacttgggaagctgaggcaggagaattgcctgaacctgggaggcagaggttgcagtgagccaagattgcaccattgcactccagcctgggagagagagcaaaactccgtctcaaaaaaaaaagaatgtactattatttatccatccattctactgctgatagacacttgtgttgtttccaaatttaggctcttataaataatacctttacggcatttttgtacatgtattttgattaacatacgtagatgtttttattaagaatttacataagagtggagttaggaggccatagatatgcatttgtttgtctttaataaacacttgaaaacagtcttcaaaactgggctgtgccagtttatactctggctaatagtagaacagttccagttattccacaaacttactaaaacttgcgttcgtattttagccatttgggttggtatgcagcagtatctcatcatgattttaacttgaaattttatgataactaataatgctgagcaccttttcatatgcttatagttatttggataaacttgtgaatttatattcaagcccatgttttttttgtgggtatctgtcttttccttagggatttgttatttatatattctggatatcaattatttgtcagatatatatgttgaaaattaaatatcacttctcagtggttggcttgacttctcattctaatggtgtgtttaaatgaaaagaaatttcagcttcattcttcttcaaaattgttgccatataagttttagaaccagatttctaatttctataaaaatcttactgaaatattagttgggattaaattgaactcctacatcaatttgaagatatttgatgtttccccagtccatgaaaatggtatacctttgcatttatttatgtctttttacatttttctcagcaatactttttgtagattttagtatataggttttgtaaaatttagattagagttgtttctaggcaccttaggaatctttgtgcaactgcaaatgatgtttttattgttttattttctaatgttttgttactaataatatacagaaatattgttgttttgtatgtttgcttatgcaaacttgctagcatctaatgtcaattagagttgcttatatattttttgagattttctaccatatatacataattgtatcatccacatataatgataactttacattttcctttttagtcattttatatatatatatatatatatatatatatatatatatatatatatatctttttgttcttgcctaaatgcactaagaccttttatataatgctggataaaattgatgatactggacatcattgtttctgacctgagggtgaaagtgttcaatatgttaccattaagtgtggtgctagctgtattgttttgtacatactttttattatttccttaaagaagttttcatatatccctaggttgctgagagttattatcatgactagtattacattatatcatgtcatttttctgaatctattgaaatgattatgtgattttttaaaaaattttactaatgtggtggatttcattgattattttttgttgttaaaaagttgttaaactaacctagcaaacttggaaaaaatgcccacttgggtcaccatgcatttttttaattactaagttcaatttgctgatattttgcttatgatatttatatatacattcatggaagatattatagtgtagtttttctttcttgtaacgtttcatttagatttgggtatcatttttatgatagccctttaaaatgattgggtaattatttttctcttaagcagtttacataagattactattatttctttcttacatacttggaagaatttacaatgaagtagcaggacttgaaattttcttcacaggaagaactttaattatagatttattttacttaatagatataggactatttcatttttttgtttcttctagcatctgttttcataagctgtgttttagtcatgtattttttcaagaaacttgttcatttcatctaaattttcaaacttagcagcgtaaaattgtttatatatctccttattaactttttatgtatctagggtgtatagtgatgccctttctttcacttataatttcatagtttgtgcttttctcccttttttaaaacagtaccttagaggtttattaatcttttcaaaagaaaaactaactttggtctttgttgatttttctctactacacatttgccttttggttcattcatttctgctcttatctttatttccctcctttacttcctttgggcttaatttcactttttttctcagcatctcaagatgctgattttcagattttctttttttctaatataggcattcagagctataatgttctctataaatactgctttggctgtatcccacaagtttttatatattgattttattagcaaaacattttccatttcccttgtaatttattttcgactatgcattttgaaggaatgcattagtatcaaaacatctaaagagttttgatatattgctctgtcattgattctaatttaattacactgttatcagagtatattctctacgttatttcaggcttttgataatatatatatgtgtgtgtgtgtgtgtgtgtgtatgtatgtgtgtatatatatatatatatatatatatatatatatatatatatataaataaaaagatttaccttatgctcctttataccatctatgttgatatatgtttcaagtatgttctgcatttagttgtttggtataatggtctacatttttatgtcaattaggcaagattggttaattgtgtttttcaaatcttctaagtccttgttaaatattgtgcctcttatctactagttacatacttgaaatccccaagtatgattgtggatttgtcttattctatttttagttcagtcaacttttgctttatgtattttgaaactgggttattatgtacatacaagttggattattctgacttactgttgaattggtgtttttatcattatgtaaagtaattattgaataatgcaacactttgaggatatgatgggcaggaggctgaagagctaaccttaaaacctttcaaagggcagaagtgagcctcttattgcctctcagagctaaggagatagggacccagcagtttctcaatcacagcaaaggaacaagaacaaatcaaaggtggagtaagctttacaaacactctatgccagcactagcccagcttaatctgtgaccagctttaagtgatttctcttatctgcctaacatcaccaggaggaattctttctttatggtagaaaagaacatcactgaaagcggagtatcacaaatttgttcctaaagaactagatagtaaataattttggctttttgagccaatggcaaaatcaaggctattttgtagacacttttacagccatttaaaatatagccatttaaaatgtaaaaactattcttagctcacagatggttaaaaaagaaaatcagatggttggtcaaatttggccacaggccatagtttgctgacccttgatctagagcctctacatgtgtggcatacaataaaaagattactaggtatgcaaaaaggcaagaaaatgtgactaataatcaagaggaaaaaggagacccaaagatgattcagaaattgggtttagcacacagagactttcaaatagctatgatttacgtataaaaatagaagaaaatactgacaaaaatgattgaaaaattaagacttttgaaagagaattaaaatctataaaataactctagaattgcaaaatataaatctggaattaagaactcatttgatatgtttaatagcagattgaggctgggtacggtggcccacgcctgtcatcccagcactttgggaggccaaggttggtggatcacctgaggtcaggagttcgagaccaacatggcgaaatcctgtctgtactaaaaatacaaaaattagcttggtggtgcgtgcctgtaatcctagctgctctggaggctgatgcagagaatcagttgaactgaggaagtggaggttgcagtgagctgagatcatgccactgcactccagcctgggcgacaagagcgaaactctgtctcaaaaaaaagaaaaagaaaaatgagcagattgacttagcgtaagacagtaaattagtgaacttgaagacaagtcaataaaaagaaaatccaaacaagcccagagaaaagaacagaaaaacagagcagaaaacataagaaacatgcaaaacagccaaaaaggctgaaatatttgtaagagaagtcctagaaagaattaaagaatgagaaaaagtgatatttgaagatgtaatgtctgagaaagggtaaattaaaaggaggtaaacttatatattagaatataaaacagttaaaagttgaactaggtctatatagatcaagataatatctcaaaattatcatgtgatatgaacagggcaaaaaaattgtaaataatgatattatgtaaagtttaggcacaaaaattatttacatgatatatgcactatgtataatttattgatatatggatattcatgtgtgtgtgtgtgtatatatatatatatatatataaatgaactggaaggatgcatgcaaaactcatgtcagcaattgtctctatgaagggagaggaaaccactcaagagcaaaaatagaggagaattcagttttatctatatagtatttattttatttataaaaagatattaagcaggtatgacaaaatgttaccaagagttaatactaactcttccatgggtatatggaagtttgttatatcattctttatgctttccaatatttaaaagttttttcccaaagaatttttaaaaattaatctacctctatgctacaagtctcttcccttgaaaaaaaaaagcagcagttaatgggcattaatcacttcaagaccaatatcatgtgggtcacctttgtgctatgtaaaaatgattggttggtttggttttaggccataatatttaactagataatgaaactcattaggtgtcagataaacaaaaactaccaatgaattaaacacattttctttttaaacttgcagttattttcattataaatataacctgaaagaactaaactctagttgctttttctgtccataacatccattactgttagtgattgtaagaattatctctgtcagttttatttctacctgataggttttctttgtgttctggccttcgttgtaattacatgtcagtcattgaaccagcattatttggtacctgacaagtccttcccatacacaaaacccctgtagtgagtatgtaggaaaaagaaacataaagaagttgctgtttctactttcatgaagctcactgcaaaaggggaaaaaggcaaaacgccgtaaaatcaagacaaagtaagttttatggtggtgagcagagttgtggcagctacagaggaggtagtagttaattacaattatgaaagactcaagagggtatatttgagtactcttgaaggtagaatgactacttcatcaaagtagtcatagcaacactgcatatatgctgtatccccataaaatcagaagactagtgtggccagagtagaggattgtttgggaaacctgttttctgtgtggggtgtatttggacatgaggcttggaagtttgcttggagtcaatttattgagatccttgaatggcatggtgaagtttcggatttattctgcagccagtgagaacctactgaaacattttgtgtagggagatgagtgatggggttgaaccaacattttaggcacactgacagcagaatgatagggaagggagctgaaagtttggaggcaaaaaagtcagttagaaaatcagagtctgaactcaagtggggacagtggagaggagggagaaatgagagacatttttgaagagtaattgtcaggactaggaggctaatggttctgaaggctaagctagcagagacctggtttttatgcaagttgattcagaagggaggaaacgagaagggacataaaaggataaatacgttcaaggatgaggttcagagattggtttggggagtgctgtttctgtagcattacagacaactggaaattccctgaaaagagtcagggttagcgatagagaattgagaacccttatcagagagataataatgaagtcataggagtagatggacttaccaaggaaagagagaaggcaggagaaaaataaaaccaaggttgaaacagaagggaacgcccacatctatttgtgggtaaagagccacctagcacaagcactaagtgtgaatgtgaccaaagacaggggacacctggaggtggcagtgtaaccaagatgaggtagatggactctgcagaactctggagctacaacgctgggattagagtcctttcttacttaacttgttttgggcaagttacctgacctctttgtgcgtcggtttccttacctgtaaaatgaggataatagtagtacccaccacctaaggttgtcatgaaaattaaatgagttagtgtatatgaagtaattagaacaatgcctgtttttacatagaaaatgctatatatgtgtagtcattgttttgttgttgttactttctaaaataaagtttgtaaatatattttttactatttttacagtcatatatgtatatatacatagtcattcaaacagccaaatactttttgtccatgatgcccagtaaattttatttttttattttccattatgatgactggttgttttgcatcagaaaccacctccttttgaaaaaatttttattttgcaagttgcaaaaagagtagtttctataccttacttttgctaatgttaacatcttacatatttattaaaacaagaaaagttaagaatacaatgctattgtctaatccacagaccttatttgaattttgcattttcccagtaataacttttttcttgttcacaatacttccaagatccagcattgcatttagatatgttgtctccttagtttcttttaatcaatgacaattcctcagtctgtctttgtttttcatgatcttgacatatttgcagagtatttgtcagtagttttggaaaagctccttcaattcaggtttgtctcgtgcgtttgcacaattgggttggggttattcatttttggcaagaataccacttaagtgatgttataccctcctcagtgcatcatatcggggtgtgtaacatcattatgtcttgttactggtgatatttactttgatcacttggttaaaattatgttttcggctgggcacggtgactcacacttgtaatcccagcattttgggaggccaaggcaggcggatcacaaggtcaggagtttgataccagcctggtcaacacagtgaaactctgtctctactaaaaatacaaacattagctggttgtgatggcgggcgcctgtaatcccagctactcaggaggctgaggcaggagaatcacttgaacccaggaggcggaggttgcagtgagccgagatcgtgctgctacactccagcctgggggacagagctagactctgtctcaaaaaaaaacaaaaaacaaaacaaacaaaaaagatgttttccaggttcctctgctaaaaagtttctgttttgtaattagtaaaagttatgtgaggagatactctgagaatctacaaatatcctagtttcttcaatacacttccccctactaattttagcattctttgatatttcttgcctacaaaaattattactgtgatgtttgactaatggtgattttttaattttcatagttcctcctatgttgattaattagaattctaccataaggaagagccaccccttatctcccatttatttatttaatcacttatttacgtaagtatatatttacatcagtctggacttagatacttagtctttgggtcataatcccatgctttcattattaatattctttcatacaaattgttccagatttggccgttaggggtgccttcaagtttgttctgtgtcctattggcatgtccccatcatttgttgagcatttccttcctttctggcatcacaagatgtcccaggcttctcttgtattgtccctaccgtagctctggaatcaaaccatcctccaaggaacactgattcctttggttagagaatgatatttaggaaacaagatctggatcctaggtgtgctcatagctcccaggattccgttgcttccaggcccaggaagtgcctctttttccagtctcctggccatctttctggaagagatatcccctgtgcgtctgtattgggaaaaatgggacttaagacaataacatattcagattatgatccctttgaaaatagtaatggaaaaccaatactctctgctctttttccttttttcttttctagttcttcagtttggattcacaactatctttgtggcagcttttcccctagcaccacttctggccttactgaataacataattgaaattcgacttgatgcttacaaatttgtcacacagtggaggagacctttagcttcaagggccaaagacataggtaagttggatttgggtatgtttttaaaaaacatattaaacatctggtggataaaattttaaaagccacaaactttagatttttaattatgttttccatttaatataattcacctaatttttgcaaagaataattatattagttttaaataatattagacaagaagtaaagctacctatttggaagtttataatttccagtgctagagaatttgtgcttaaatagagtctcaatttgattatttctatcttaagattctagaatctaaaatttagatttattatcacttatatcctttttaaaatagatcttccatttgcttaaccttgatttgttctttcctaaatgtttgcctgatttacatgaagtataatccagtttttctaacggcagagatgaactttggtctttgactagagatgctaagttgaatcagatgcagctcgcatgagagctgcctgagatcaaagactgtcttttattcatttctgcattcagtgcttagcacagagcaggcagtcacccagccaatatgtgtggaagagaattgcatgtggatgttattgttaatgacgtcttttaacctccacatgaaacaagcacacattctgtgagcacctaccctgggtcagtgtgttattggcagggcccacaaagatgaacagaagggaccaaatccatacccttaaggagctcccagtctggtggggcttgacattatgtgtgctgatcctatcagatggtattttggtgccttatcattaaccagaattctctgcctcatgtctgatcctgactattaagtcacaagcatatagacactcccatagaaactccctcaatgccaagttgtttgcacaaatctttcctcctggttgcaactgtcagtatttggaaagatgaagaaaggacccatgaaaaggacttttaaaaattaattccattttttcataattatcacctctgttttgtgtatggaactaacacaacacttctatttgaataggaatttggtatggaattcttgaaggcattggaattctctctgttatcacaaatgcatttgtcatagcgataacatctgactttatccctcgcttggtgtatgcttataagtatggaccttgtgcaggccaaggagaagctgggcaaaagtaagtttgctataaaaccactatacagtttctatttcctagccattttttgaggttggacactcagacagaagactgcactggagaatatggaatacatgcccagaaggagaggcctgtgataggggaggtggaattatgatttattataaataataataataacactgtcagccaaagaaaacatgtcctcatctaccaaagagttggaggacatacaagtcagacaggttttagatggaatccaatgtaagagtggcaattaatcattttccccacccctgacctctgcccactatgaatttagaaatgtgtgatatgctaatgtgtataccaaaacagtagcatatgatgtatatatagttatatcattttatgagtttgcaaaaggacagttacaatctgatttacattgtgtcattatgtgtaaactctgcagatcttacataggaaatacggaactaggtactgagtacccagtaggtcctcaataagtattcgtggaataagtaagtgaatgactttttcatgggtattgacctgaccaatgcctatattaccccaagcaagctgagtggactaaactccttgggaggatcaattctatggcattgcctcaatggtttgcaaagccagggcacgctatatatggtcagataaagataagtcaaaattataacatcccctagtttcattcctgtaccttggagaaagggcaagaagtcttaacatgctttaaaaatccctgtttggttaaagccaaaatagttaaactcttattatgggattttgatgtctataggtcagagtgaggtgtgtttggggatcacagggtcttcttaataacccagaaatcaccctacatgggctgctgtctacttatacaagcagccctggtttactagcctgagccagattgattcatcctctacagccattgtagctgatcgaccccaaggagttaagtgccaccaaagcaaatcaactgaactcatgcaaacctggcctgggtccaattcattatgaatcctacataaatgggctaaggtgtggatgattgaggaatgtcataaagctcacaatccagttatttgaaaaggcttctgtaaagttcttgactactataagcatgtggccatgacacactaattatctagcaacttttagtgagcataccatcccattttaagagaaatgtaaagacatgttattttgcccaggcatttctttctaattgcaactatcgttgacattctctgcttggcttagcctgaaaaagcttactttcactcaaaccactttcacatgtgtttttagttgattctcaaaacagccctgggagtgggatgtgcattataatcttcactttgaggagcaggaagagattaaaagaggttaagtccagaatcacaaggcatagtaactctgggagcccatgtgaaggtggagcctcgactcactctccatcccgcacctcacagcccttgaggctgtcccttaacagtaaaccccctggattttccgtcgtaatggtgtttcagttctttcccaaattcaaatatggtgaaatctatcttgttttagggggaaccaaaaacaaaatgggaacctttatgcacaattgatagtgaatcaaagatttagaattttaacaacctggtagatttaagacaatgtccacagtgattaaagtgtatctcatagcctccttgtatcaattttactgggctctttggagcttttcttttctttctttcttttttaacctttctctttgacttaggagccttctgccactttcaatttatggatctgccttttgttttctaatccattagtcatttttcatgttttcaagtagttaaatttatgtatgtttcttcatgaatcttattttctgcctcactggccactctattacttttcagattttttttatttttccaatttagaaatgctttagaaattattgaactcataagagtagcagaattgtcaaggtatagaaagtcataagcctttagggtagtacagtgattgctggctcatccctttcttatgtattaaaggattgaaaattataagtggtgagtggctttcacggtagaattctcacatttaaatgagtgtgtggtcttctcagaagttacatggaagagatatgcatcctaatccaaatggcactaccctgtagaagacattttctagatctttcttggaagtgcctacagaggccatctaccattcctttaagaaaactgactttatattcacaggaaacccttcgtctgttacttttttcttggtacttctcaattctccctgatcatcagtgtagcctcatctccctctgtctcattgagagctggtggtgggtcacagtgagggtatatagcattcctgccagtaaacccagtgatagacatgggctctctactacctgtgaccttcctgctataacaatgggtcagtgagttgacacttgcatgccactagctgaattttatacagcaaaatgtgataaatctcacttgcctgaattgatgacaactttcactatttgatattgacaatagctaacagtctacaaaaggtgaaaggaattagtgaaacgtctagctgtccgtgcatcttttcccccattatggaaatgatatggaaggaagatgtacacagctgataactgtgtgttcctgtactaggtacacatttaatgctttgcactcaggagtaaccaccctctaaagacacattttcaacttggatttatgactgtcattcatgcattaggtccatgaaacaggtgttttatttaaatttaaattttcttaatggagtttttgagcagaacaaccaatggacagtagcgttagtcttgataaagcctcggggctggtctgtgagataagagtgcaggaggggttatgaatattccatttcagtgctgggcctttttttttcaccagttcccagaacacctttcccttcccacagctcagatctctagaaagactctgctaaaacttactccctctctgtgacagctaatcatcctcaaggcactaatttattttcatgtccaggtctagacagttcctaggtaagggagacatcattccaaattaccctttcagtaggggagtcctgctgccagttggattaaggcatgttacacactccctgaccatttgttttcacccacgagtgacttgacaaatgggtccttcagcttggttcattttttttaaggccatgataaagccagtgatttgtcttgagcacgataacatgcagaacccatgtgttctcagaactgtgttcatgtcatcattttggtttagtgttcagcagcttggaataatcatgccagacttgttaatgaagagaatctgaagatcatgatttattcattcaatcagtaattacttattgaccccctgctagatgcaagaaataaataaaatgaataatcaccactcatgtttatcttacttataggctaagatcttatcacatgctatacattcattgtttaatataatcccctcaaggaccctatgaggtgggaacttctgtcactttaagaagttacgtaaatcgggtgtggtgacacatgcctgtagtcccagctattcaggagtctgaggtgggaggatcgtttgagcctgggaggtcaaagctgcagtgagccatgatcataccactgcactccagcaatgagcaacagagcaaggccctgtctcagaaaaaaaaagaagaagtaagaagttatataacgtgccaatattacatgactagaaaccagcagaactaagatttgaccccaaaacccaagcttttgtatgtaaaacactatttaaagaaaaatgtatacaggatgtatctaagtgctaatttcacccaaagtttcaaacattgttatttcagtaagtgcatgtgttaaccacaatgttcaatatgtaaaactgtttagagacttggagaaaagatgtttctaagagtgctacttgctatgatacttttaaaatgggctttttcttgaatggaattattgacagaatgattaaatcttgattttatctacccattcaatctagaatgatcaatagaatctcatactttagtttcctccaatcagatcgattcaatatttatgggattcctacactgcacaagactgtcctaagtcataggatacacaaatacctaagatacctgctctgctcccaaaaaattgcagtccaaaggagagggcatacatatatgctgccaactctagtacaagcgatctggtaatggtgaactaagtaagtatggtggcactacagagagagggaaaggagtgagatgttgtgactggagtgattaggttgtcttcctagtaggagtggtgtttcagttggccgctgaaggataaatactatttccacttgtaaaggaagaggtagggaattctaacagaaaagataacaagcagaggcatgaaaacatcagaagctttcagggaatatagtctaacaggactgtagcatgggatatgagttggggggatcatatgcacaccaatcatatttggaacattttgagaatatctataaatatatatgaaaccattaatgaggaactgtgtttatgtgtatcatcaacaaaagaagctgtggcttacatacaatttatgcccatcatgtaatgctgctttttacctatttcactgaaacattaattggggtagagatgttctatatgatgattctgcagaaaaaggatgagaaccaaaacaagcaacttgttcctgattcaacatgcccagggctttccagcgtatcccaacctgagtcctggttgacaaggaagggccagttaaaggcatttacaattgcagtgacgtctgggaagcagggtcttcagggaactggatacagagaaggtgatgagtgttctaatggtagaatgtgcctcctcttataggtgcatggttggctatgtgaatgccagcttgtctgtatttcgaatttctgactttgagaaccgatctgagcctgaatctgatggcagtgagttctcggggactcctcttaagtactgcaggtgagtgtggcacccagcgtggctctgcctgagctgggctggctccaccgtggggaggttttactctgaaggccccttctggctgagtgtgtttaaagcagtgactgtcaatctcaacagtgcattaaaagcacatgaagaattttcaagccttctcttgcccgggatacaacccaaaccaattaaaacagaatgtcagggagtggaactcagaaaccaggtgcagtcagaattgagaactgctagcttaaagggaaaaactaaaaatatagtagtgaaggttataccgctgctccagggactcagggacagacaatccccaggcgggttgagcgacagctgttgagggcacttgtctttgttctgcttctctctcttgcccagagtatatcacatcacatttctaaatgttaaacaactcagaagcctgtggaaagaggcccagttcatttcaggttccaccacagtagcctctgcaacatgtgctcattctctctttctttctctccctctaaaaggaaatgaattaaactgtgcctcttgatgtgtatctatacaaacgtacatgaaggagaatttgttgagcacctactctgtgccagaaactgttactccatttaatcgtcacatcagccttctaagttaggcaatattatctcatctgacaaatgataaaaccattcactaaaagctcaatgagattacttgtgcacagttcttgaagagtccagatggcacctttttctcttaatactttgacgttataagaattttgtgggctcacacctgtaatcccagcacttgaggaggccaagttgggaggatcacttaagtccaggcagtcaaggctgcagtgagctatgatagcaccactgcattcaaactatggagcaagaccttgtctcaaaaacaaaacaaagaattttggagattccctatcatgacattctatgttctccctgtaatcaaagccacaaggaagaacagccatggagtcctagatgctttgacatagggacttttgtaatgatccacttcagtccctcatcttacagaaggtgaaggtgagagaagccaggggctccccatttctgtgcagtgacagcataccctccacccctttaaacactcatgccaagttcccaggtctcattggctgtcacatctcatcagatggcttatttcctttcccacatggagtaacaagtaagatggggagaaagactggctggaatataatctagtgccgctctctgttggggtctagtggagaagcaagcaattaagcaacaattgatactttcttcagtagatttcccacttgcttgtccagaccatttcgtacatgaaattatttagcaagcattgttagacatatacaggatcctaagtatgaaatgcttcaaaataaaatgccaactattatttggagttaaaaactttgtaatcatttgaaaataagataaaaatacagagtctttctcctcttctgcttcctggctcataattcttcctgcctgtctcacatagtatcataaaagtatattccagaaattattaatgtgaatggaggtattaatgctggcaccattaagttaaattatgattgttttgtttagcatttttcttaaaagtcccccaaagaaaacattttaaaatttctaattaaaatcatgtaaaataatattttcaggtttgttttcagtcatatagcaggtgaggcacccagatcagcttgcgggctgaaaatatctaaacatgtagagaaaaatttaaaaacaccttctcaaatacattaatgacctgggaagaatatttggtattctaaggcagaaagaagtggtacacagagcattgcagccaacttttacccaaagggaatttgctgaagtgagtggactggagctttctttttatttatttatttatctttttatactttaagttctagagtacatgtgcacagcatgcaggtttgttacatatgtatacatgtgccatgttggtgtgctgcacccattaactcatcatttacattaggtatatctcctaatgctatccctcccccctccccccaccccacgacaggccccggtgtgtgatgttccccttcctgtgtccaagtgttctcattgttcagttcccacctatgaatgagaacatgcggtgtttggttttttgtccttgagatagtttgctgagaatgatggtttccagcttcatccatgtccctacaaaggacatgaactcatccttttttatggctgcatagtattccatggtgtatctgtgccacattttcttaatccagtctatcattgatggagctttctttttcaaagctttccatggttagggaaagtgaaagaaaatatagaggccaggtgcagtggctcaccctgtaatcccagcactttgggaggctgaggtgagtagatagcttaaggtcaagagtttgagaccagcctgggcaacatggtaaaaccctgtctctaccaaaaatacaaaaaaattagccaggcatttttgtgcacacctgtagtcccagctacttgggaggtaggagtatcacttgagtctgggaggcagagattgcagtgagccaagatcgcaccactgcactccagcctgggtgacagagcgagattctgtctcaacataaaagaaaagaaaatataggaatgaccagcctgtaagtgtatacttatatgctatataaaacaaccataatatagtcacactagagtctattatacagcaataaaaataaaccacatgcaataatgtgaatgaatcttagtgacataatagtaaaaaaagcaagccccagcaaactacatatagtatagtaccctttctataaagttcaaaaacaaactaaatagtacaatattcagacaaatgcatatacatataagttaaaaataaaaatgaaattcagggtaagggaagcaattgatgtaagttcctggtaatgttttagttcttgggcttcatagtggatttatgagagcttgttgtattattaaagtattactttaatggagtcacatggattaaagttctctgaatagtgcctggtccccaacaggtattcggcaaacatttgtggcattttatgccgactcaaaagtgatagctggaggatacattaggaaggactcttctagtggcaagtggcagaaatccagggtaaactgacttaaacaacaaaaaattgttcagttagctgggagagtcaaggggtgatatgagcttcagtaatggccggatcccaggcctcaagcagtgtcagcaggatgctgcctctctgctgtctctgctttgttttcttgacttccttctcaagcaggctctctctctccatacaaggccaccaggagtcccaggcttttgccttctgtgggcttagtgatcattcactaagtgatagttctggcagacatcttgatgatgtcactgatcaggtctggctcatcttttgagctgagatcaggcaggtggagggggaagtcctagtcaacccacacagatgattccccagagaagagatattattttatcagaagaaaaatgctggacaagcaaaacaacagatatctagtatagagaaacttcaaatttccctcctattgaatgaggactatataatgagaatggaagagatttgagaatcagaaaaatcatagtttgaatgcaacatttttctgtgtctttatagataccgggactaccgtgacccgcctcattcactggtgccctatggctacacactgcagttttggcatgtcctagctgctcgattagcttttatcattgtctttgaggtaagtttcctcagccaaattctttatttcctttgacataatgaagtcagtaggagtaatgaataaaaataagtgatggggattttgaatgtgattatctatatttccagaagtagtagtgtcatattatgtaacctctttttgatcttttttcttaattgaagtatttgatttttccaagacatatttgaaagtccatagttggtttttaatggacaaatctgaactcgttgctcctaaatgtaattttctggggccatagttcttaaactttagcaaaaatgcagtttttccatcctcactcccagatattctgacataccatgtctgtggcttgtttttcatgagctcgttgtaatgattctgactataggcattctgggaccataatttggaaacatttggaaaacatcagcccagtaagattcattctttttttctttttctttttcaacttttattttagatacagtgggtacatgtgcaagtttgttacaaagttacattgcatgatgttgaggtttggggtgcgactgaacccaccacccaggtagcgagcatagtattcaataggtagttattcagcccttgtcccctccccctctcccctctatagtagtccccagtgtctgttgttctcatctttatgtccatgtgtacccagtgtttagcttccactctaagtacgtacaataagaacttgcagtgtttagttttcagtttctacattatttcacttaagataatggcctccagctacatccatgttgctgcaaaggacatggtttcattcttttttatggccacatagtattccatggtgtatacataccacattttctctatctggtccaccattgatgggcacccaggttgattccatgtctttgctattgtgaatagtcctgtgattgacatatgagtacatgtgtctttttggtagaatgctttattttcttttgagtatatacccagaaatgggattgctgggttgaatggtagttaagccctttgttctttgagaaatctccagactacacagtagttggactaatttacctttccaccaacagtgtgcaggtgtccccttttctctgaagcctcgccagcatctgttaatttgtttactttttttttttttttttttttttttttaagactgattctctctctgtcgcccaggctggagtgcaatggcacaatctcggctcactgcaacctctgcctcccaggttcaagtaattctctgcctcagcctcctgagtaggtgggattacaggcacccgctaccacacctggctaatttttgtatttttagtggagacggggtttcactgtcttggccaggctggtcttaacctgacctcatgatccatccgccttggcctcccaaagtgctgggattacaggcgtgagccactgcacttggcctgactttctaataaaagccgtactgactggtgtgagatggtgtctcattgtggttttgatttgcatttctctaatttccttagagattctgagcattttttcatattattgttgtctgcttctatatcttcttttgagaagtatctgtttgtgtcctttgaccactttttaatggggttatttgttttttacatgttgatttgtttaagttccttacagattctgggtattagacctttattgggtgcatagtttgcaaatattttctcccattctgtacggtgtctgtttacttctttgacagtttctcttgctgtgcagaagctctttaattagatttgacttagcaatttttgtttttgttgcaattgcttttcaggacttcaccataaattctttgcccaggccagtattgagaagggtatttcctaggttttcttctagcatttttatagttgaggtcttacatgtaagtctttaattcatcttgagttaaattttgtttatgatgataggtagaagtccagtttcattcttctgcatatggatagccagttatctcagcaccatttattgaacaaggaatccttcccccactgcttgtttttgtcaagttggagattcactctttctaaatgtctccaattattgccatcatcattaccacacatattgaaatatactgattcatatagttaatttatgattttcaaatagttatcaggatttcccaacatgatcataagcattttccaataggactgggtattacaagtggtatttctggttgtgtatcatcacggaattatttatattcaagcatccaagtaagtatttattagctaagactcaaaatggaattataaagtaaaatctgtctagcaattgtctatattatatgtcaataaaaatatattatctattttctttcagggtttaagaaaattgctgtaaaaatagtttgcatttctatgactctagtcataagtggaaatttcatctcttgtcacatatattaaagccagattaataaaagccaaggttgcctctcggcttggatctaaagtttcctagacctcttcaagactattctatcactgctttttccttcagtccagggaaccaaaagaagaaaatattaagctgctcttccctggaaattatcttaccaatggcacactctctctttaaagaagatatttttaacccatcactgtcttaaaatttttcagacaaaacttcttgttgtttgtttgggatttttttattttaagttccagggtacatgtgcaggacatacaggtttgttacacaggtaaatgtgtgccacggtcatctgctgcacagatcaacccgtcacccaggtattaagctcagcatcccttagctattctttctgatgctctcccttcccccacccccacccccaacaggcccctttgtgtgttgtttcccaccatgtgtccatgtgttctcatcattcagctcccacttataagtgagaacatgtggtatttggttttctgttcctttgtcagtttgctgaggataacagcttccagttctgtccatgtccctgcaaaggacattatctcatccctttttatggttgcatagtatttcatggtgtatatgtaccacatttttttatccagcctatcattgatgggcatttgggttgattctatgcctttgctattgtgaatagtgctgcaatgaacatatgcatgcatgtatgtttataatagaatgatttatattcctttctaataagcgccatactgactggtatgagataatatttcattgtggttttgatttgcatttctctaatctccttagagattctgagcatcttttcatattatttttggctgcttgtatatcttcttttgagaggtatctgtttgtgtcctttgccatacaagttatagaattgctgggtaaaatggtatttctgcttgtaaatcactgaggaattgccacactgtcttccacaatggttgaactaatttatactcccaccaacagtgtaaaagtgttcctttttctctgaaaccttgccagcatctgttgtttctggacttttaaataatcaacattctgactggtgtaagatggtatctcattgtgatttttatttgcagttctttaattatcaataatgttgagctttttttcatatgtttgttggctgcatgaatgtcttcttttgaagaatgtctgtttatgtcttttgcccactttttaatggggttgcttggtattttttttgtagatgtgtttaagttccttgtagactctggatatcagacctttgttagatggatagattacaaaaatgttctcccattctataggttactgtttgctctgatgatagtttttttgtgctgtgcagaagtactttcatttaattagatcccatttgtcaattttttcttttgttgcaattgcttttggtgttttcatcatgaaatttttgcccatgcctacatcctgaatggcattgcctagattttcttctaggatttttatagtttggggctttacatttaagtctttaatccatcttgagttaatttttatataaggtgtaaggaaggggttcagtttcgattttctgcatatggctagccagttctcccaaaaccatttattaagtagggaatcctttcccccattgcttgtttttgtcaggtttttcaaagatcagatggttgtagatgtgtggtcttatatctgagatctctaatctgttccattggtctatgtgtctgtttttgtactagtaccatgctgttttggttactgtagccttttagtataatttgaagttgggtagtgtgatgcttccagctttgttctttttgcttagtcttgtcttggctatttggactcttttttggttccacatgaattttaaaagagtttcttctaattctgtgaagagtgtcaatggtagtttaatgggaatagcattgaatctataaattactttgggcagatggccgttttcacaatattgattctttctatccatgagcatggaacatttttccatctgcttgtgtcctttctgatttccttgagcagtggtctgtagttcttgaagaagtcattcacttttcttgttagctgtattcctaggtattttattcttttgcagcagttgtgaatgggagttcatccatgatttggctttctgcttgcctgttgttagtggttaggaatactaatgatttttgcacattgattttgtatcctgagactctgctgaagttgcttatcagcttaagaagcttttgggccaagatgatgggattttctagacacgggatcaggtcatctgcaaaaaaaagataatttgacttcctctcttcctatttgaataccctttatttatttctcttgcctgactgcctgggccagaacttccaatactgcgttgaaaaggagtggtaagagagggcatccttgtcttgtgccggtttttaaggggaatgcttattgagaatttttaacatgaagggatgttggattgttatcaaagaccttttctgcagctattgagataatcatgtggtttttgtctttagttctgcttatgtgatgaattacttatgcttatgtgatgtttactgatttgcatatgttgaaccaactttttatcccagggatgaagccaacttgatcatggtagataagctttttgatgtgctgctggatttggtttgccagtattgtattgaggctttttgcatcaatgttcatcggggatattggcctgaagtttttttgttgtctctctgccaggttttggtatcaggatgacactggcctcataaatgagttaaggaggagtccctcctttttaattttttggaatagtttccatagaaatggtatcagctcttcattgtacctctggtagaattctgctgtaaatctgtcagacaaaactttttaaaaggctgccttatttggcttttcaaatagaattttccattttcttttaatattttgttattaactatttgaaaatatgagaactatgcagaaaagcttcttaattttgtgccatccatgcatcaccaaatttatcaagttttaaataaaacgaagaatacttagcagtatcatttgaacatgatttagtctctatttaatactttagaattgtaatagcccttaaattgtcatctagtacttccttggtcaccattatatagatgagcagaagtgacagtgactctagaattccagctattagtatttcaagtaaagaatttgtgactgtttaccaaaaagaaaaaagcttcttcctgaaatgatcatttccctaggcccactgataattcttataaccaagatttgtaaagcacttgacagtctacaaggcatttttaaacattttctcataattctcacaatactcactttatagatgaggggaatgaggctcagataaattaaataattcatcctcaggtagacagacagcccttaagcagtgaaagctaccagcttcaacctgggttttctgactccacagaatacattcttctggctctcctttgaattaattatctgaccattcttttcccaccttccttccagactcctctttctattccttaggtggtgccatcagaccagttcaggcctcacctgtcctatcatcttgcattacacacgcctcccctggtcactttgcactctccacataccccagagggtccacatccttcttcagccaactctctaacctcattcaggatgcacagtagacctgacgctgttacattctcctctgttttagcacctcgtgttttgtataaagcacctcatttcatatctgatcccagacctcccaaaagacctaagggatcgaatgagaagagagaagtacttgattcaggagatgatgtatgaagcagaactggaacgtctccagaaggaacgaaaggagaggaagaagaatggaaaagcacaccacaacgagtggccgtgaccatgtaggtgagaggtgtgctcagcgtctgaggccattccgaggttgaatgggtgctttaaactccctgaagcaaagcttaccattgttgcagtaacagggatcaaaataaactccttagaagcttcccaatccaaaagaagcttgttttttactttaatcgttgcaaattttgcttgatcttcccctcccacataccttctgcaacacttctctgccttcttgccagactctggcctatcagtcaaggtcttcatgaattggcctaggagttccctgaaacaaagcgtcctctctcttttcctccagccgggctgttttctttaatatccccagggaaacatgccccttctttctaggtgggtgggaggcagacattagcaaagagaattcttcctgaaagcctcagcggccagagaccaaggtgcaacagggctgtcctgggctgcaggaccagtaactgatgaagaatttcttctggccccaccactactggctgctttcttcccaaaaaggccatttctaatttttgcttgaaagcatagtatctgcctgcctgtttctatttccccaatagttggcaggatgtgatgttgctttagactgcccttctgactcagtctgttcacccataaagcaagcataaaaatgtttataccatccctgactccatttggggttacaaattctttgaatgcctttggtgcatggtaagtacaaactattgcacctcatgttttaaagcaattgtgtatgcataagatctttatgccttcttttctctttccagaaaatagtccctttccaggccaaggacctgaattctgtttacttcttctggctgtgcaaaagcacactcaagtgaatgactaaaaatgcaaccacagtgcatgttgcagataccggcggccgcaggaggggcagcatccagtagaggactggcgttggagtcacactgctgtgaaatcacgttgcagtccagcgcacaattgctatctatccatagaccattcttgaccaagcaagcatgcacattatgggcagttacattctcaagtttttaaaatcaaggggaacttgtatactgggcctgtttttcagcctgtttgctaccttttttgcattctatcccatgtgaattttacagacactgggctaaaaagggtattcagacacatggacacacattcctagaatgtcatcatatggtcctaattccatgtcaccaacaacacagacaagaccctgtttacaactttttctttccttttttttaattttagacctttctgagaagattattatatatgacatatctatagctatgtgtatggccatagatgtatttctgtgtgtacatatgtatagtcatgtattcctgcatatgtacatacaaatacagagatatataaagtacatagaaattccttacttgtaaatagccaaaaagtactgacatgagtgaattttcacatttaaatagtcatcaatatgaagccatgattaatgcttgtataatgtgatgcaataaaatttaaaataaatttctgcacatggaa

SEQ ID NO: 15409 - DNA, 333835 bp, Homo sapiens
ctgttccagacttctcagggtttttacagcacaaacaactgcatacggcccgaggggaggctgaaaaggacttgtgtgtggtggttttattgcctgtcatcactttgctggcctcctcccgactggagcctggaggttcacagtggatttctttctgccgaagacaccaaggcactgaggaaggatcccttctccttctgttgactctttctatttttatggtaagtgcttacgttgaatgagctgctctgttgctgcagtgaactgaaccgttcgttccccctcttcccagctaagcttagtgaccttccttctgcatttcctctgttttcatggatcttgtctgggatgatccagcttcaaaaatgccaggggtcatttgcctggagtgtttgtctttttatcttttttccataaacgtgagctcttctgctgtgatacgaatataagtgctctgtctttgtccttgaagcagcagccggggaaatgtgttcacgatggtaaactgcagcagcgtgcagggaatctgtggaggatgactgacaaatttgggcaggatgaatcctcagtgtgccaggggcactcactcaggatcagaagggccgggggtgacctgcccacatagcaaactcttccatctttgtggataaagatgagcacacacgtgtgagttatgttgagtctgctgtgggcagctgtgttttctgcacctgcccgtgtgggtctgggatgaccctatatcttgtggggtttacaacttgggcaggaacattctcagcaggaggaatcctgagctggcagacggagtagactgcatgacctcattgcttctttcccttctgagtctcagggtacccagttctgcaaaccatattttacaggctcttcagagagtggtagggcagtgatgacaggaacatttttgagttgacaacatagttttgtcctcctgctaggagataaaatactttgaggttattagaatggttagacttttctaggagaacataagcaggtttctgacgaagactatggatgtggcagattgtttattccagggacattactcttacaatagtgctctaatttttcacctggtctcctgaggtttgctgcaaagagcatcacaacttcaagtctattactggcagcttcttgacgcccaaaggaaaccaagaacattttattagtttcactcctgtgcgttgcaggagtctctcttaacagggattttttttttttttttttggtagcaggtgtgtcgaactattttggtcaaagcatcattccaaagaatagcttcgcagttgtaattctatttagttattttcaagtcttggaccggaggtgggttatcttatttgtgtaggtttttccattctggtccatttcactctagagagggttcttgccaaatgtaattcagtctctgattcataaggtactgaactaatacaatgtgattttttgtgataagtgaggggagagaatgtggggtgaaatttccagtctctcctcctgctctttgggagtttggaatgtaaagttccctaactgcttgctcattttcactacttttatgtcccctgttcatgtggatttttcttgaaatagtggtgatgacatcagacatatgcctttaccttcttctctgggtccaaagtagatgcgtttgttgttgttctgtttttgtttgttttttatttcagtgaagggttccttgcatttgtaaaagcatacgtttaaataaaaaacaagaatttgtagatgtttacatgttagccctgttcaagagtaaaaccagcacagaggttaacagcaaaaaaaaaaaaaattcaaaacaatttttaaaatattatcagcattgcttggcttagctgttctaatatccactcttccctacactcgattgtggttcgcggcaatactgtattgtaatttgactgtcagactgctctgcttcctctttaattctttaatgtttagctgtttactttcatccttaatggtgtgttcttactttgcttaatctttttttctctttttctaattgaaaggatgttatatagtgcctggtaactcaactgaggatactcattaagatggaaagtgttagaatcagcttgggtgtcatggaaatagactcagtatttctcactgcaggcaatttcagaatcatttagaacatatttcattttaattagtagcaactttagccttgagaaaaaacattatttaggtttcctttattttgctaaacagattgtgtacctatgcaatcagaattgtatatatatgtgcaattgtttatatatatgtgtgtgtatatatatatatatacacacatatacaagcgtgtacacaaatgtactgttgtttgtactgtgtcaattgtatatacttaaaaaattgttgtagcatgcccatttggagaacagaaggaaaattcctcagatattgctttaactggcttttttttttttttggtaaggatttccccacttcctagaccccacttccagataatgcctttaagaatttctttgaattgggagagtgcatttttcagcatttccttgtctcacagcatggtgtcatgttaattcctttgcagggtctctgaaagcagcatagaaaactactgcaggaaaaattgataaaagctgtgctgagcggagcctgtagcctcttggtgtgatgaagtcactgcaacattttgtgtgtatttattttgctgctatgccttgcaactgattttgcttgcagacttagcaaattgaagttatttaaaatgggtctggaaacacctagattggtgtagatgcagttgatgcagttattctttttttttttacactctttaattacaactatcatcaaaactgtgctttcactgtttcttttggtggtggtttaatttgaaacttgcagcttaaattataaaccaagtctcccttttaaagtcctcttgccttctgctttctctcttcttcacttttgccattttatatatgtgaacatgcctacatgtacacagacaaactcagacagtgaaaaatgtacaacaattaatgaagagatgattacagcttttcttttagtaaccaaactccaaatgttgaaaccataatcatgtaactgagggaagaaattgtttctgttagtataaatataacctcatacttctgcaggcattcttatcattgaaactgttttccatagttgattaccaggaccagaaatagaattgattttgcattttaattaatgacattctggatctgtctaggttggactgccctcaaaccttgatatgtttactgtctaaaaggtctttgtgttaagagggggagtttatgggtgttataaagtaaaatcatttgattatgtgatacagcttttctttggtaactgaatgaaccatatcattagaatgttggctgaatttttatgttgcttttcccaatattatttagccaatataatcccttttaccatctctttgagccccttttacagagtacaaagagttatgtgcgactcccacatgaggcttcttagagggaagactgttcttcagcagagattcagaactacttctagcaccagctctggtaatctacttggaaaggaacttgcaattcaattggcaactcaggcagattgtataaaataggagaaatgcttcatgagctgtgttgaatactgtatttttgatctgtgcctccctactaaattcatttaggactgtctttactagatcagttttgcagggaaaaaaacatgtcctcagtagcataataatctatccagactgtcataaatgtttatattgcaagttatacttcttaggagttggagggagatggcagaattttggaggagaaccaaatcacagccccaaaataatgcaagacgaaaggggaacattcttcctatgtttagcatttaattctccagtcaggctgtttgctcttaagtctgaagagcgaagaaatgtaaaaacacataatgacaggttttgtgggctttttctctaatagaaatctttaacccttaattaggcatctgctgactgaccttttggtgtgtgtgagccagcagccattcttatagaaagcagacataatgtaatacagtaggaattcagttacttacatctttcctgttggtcccccacaggggacctcctctgagtgtcagagagggagtgagtgtctggagaccatcagagaccacagccagtcacagagagatatcttcaagccccttggattccagttcagcccccaccactaactggctgtgtgactcaaattctgtatctgctacatgaagcttggaccagataatcccagaggactgtaacccagccattaaaaattgtgaagtattaattcacttctatttgctactagatgaacgattatttctaagacaattgacccatattagacattcctggagggagtaggctgtaacttcctttgaccctgcaaagcccccagaactgtgacagtgacgtgagcatcagtgttactcagaaaagtgtgatcatggtacccttcatgaacagggcgaatatgtatatgatgactatctgcttatcctggcacattttggaaagtctcttgtgattatcaaaaaggaccttggccaggggcggtggcccatgcctgtaaatcccagcactttggtaggccgaggtgggcagatcatgaggtcaagagatcgagaccatcctggccaacatggtgaaactccatcttacgaaaaatacaaaaattagctgggcatggtggggcgcgcctgtaatcccagctactcaggaggctgaggtaagagaatcacttgaacccaggaggcggaggttgcagtgagccgagattgcgccattgcactccagcctggcaacagagcaagactccgtctcaaaaaaaaccaaaaggaaccttaaagagcaatttacctaatcctctcattccacagaagttaaggaagtgatatgacttccccaaggctggagactcacatagcacctgggccggatgactttagtgtaaggtgcattcatttactcagaaccctgctccattcccagtgtggggccccttccatgatacacagctgacactgtgccattcattgttcacaaatctgctttgtggcatctgtctcactggtgtccattatttctgggttcatttcatgcagattacgtggctgtaccagtcagagtgagtcatatcaagcaaatgtttatggtaatttgtttatgcttgtgtggaaatgcatttttatgttgaaattctgcttttcctataaacatttaaagaattttacaaaaactatgcatagtttttcccctttgcttaaactatttaaatgatcattgatttctatgtagagggggtgatgtttgtgaattaattccttcaccattcactcatttacctgttacttactgagcacctattgtgtccaccctactgccaagcagcagagatctagtggtgagacagccagacacatccactcctcttgaggagttcagagtctacttatacttcatggagttggttgtcttttcattgtcagccagtgttctatttactgattcacaatttctcaaagaatctggttgaaaaatagtttgcttgggcagatttttttccctgtggttattccattgagaaattcttttcgtagaagggcacctttgctgtcgtggtgacatatatcttccaattttcgaagatattatttttagcttctgattttgtgacctgactgaacagaagagacaaattagctaaacttatttgcactattgttgtgattcatgaaatgacaattcgtgtctttgataaaacttacctgtttcctagaatcttaaactgacagcctggatagcacagtgtccatggaacaaatcacagattaaataccacactcctttgccttgcatatcaggcccataacagtgtacagcccttgcttccttgttctatgtctggttccgaagttccatggaatgctctaggagtaccaaaaccatttgcaatactcagaaatttacagtgctctcacttgcctcagtgcctttgcacatgctatttcctcttctctcttcagactaaactttcaaagcaaatttgatgtcatctcccttggaagtgttttgacacttgccatccttattgacttcttttgcccagagctgagctaggtatactatctctgttgttctgtatccctcaggaccttacagactgtttgtctacttgtctctctctctctctctctctctctctctctcaaacagactttttgtttcttgagggcagggactatatgttctgtacctcaaatcttggtttagtgactgctgtagagcagataaccaataatccttgaacaaacagatgggaatcaccatctaaaacctatggtgctgtcattggcagcttctgctctatgtggagagtttaatttttcaaaccaatgtgactatgaattatactgagaaggataaagagattggcagacatcctgatgtagttcattagaaattctattcaaaaccccaggaaatgtttctgctttcaaatgagtttcagcaaagtaaacaatgaaaatttattaagtgccttctataagcaaagcattgcattaagtaccaaggaatgaaagatttttttttttttttaaaagcacaattcctatcctccagaaagccacaaactagtgagggtttgtcccatgtgtcaatgactggtaatgaggctgactgctataaacagagactgtagtcagctgtatacttgcagataaggcagggggtagaaagggcattctagacagaggggctggcttgagaaggaacttaaagttatgatggtcgtgccagcaatcaggtgactttgatggagcaggggctggggggtggggtggagggaaggtggaaaatgcaaggaaagatgaggaacgttgtgtggggagatgggaatggtatcaggaactctaaatgctgtttattatttttgaaagttggaggatagttaatagggtctggaaaatgccaaatagaaatttgtttggaatctcttctcaggtttaattaaatcaaaagtctgtattctgcagggaaggagagcagttgcgcagtacataactgcataacacgtttttttctcacccatcccttttgcccttgagggtacactttgccattcaaagtcatcacaaggaagtgaagccgggaagtctaacttaaatcaatcagtttagacctgaagggagtttagcattgagatcactgaggtgcctgttaacaaactgtccagggtgtggaaaaccccctgggtctttggtgctgtatttctactgtaaaaatttagttatttttttatttgacaattaactttgtgctatttacaaggaatacagttgttttatgaaccagtgagatatgcatgtgtaagtttgtttcatgtaggtgaaaaagtggcttggaaaattctgtctgtgatagattcaattcatcatcaaaatatgatttctgcttgccttgtccctcctttctttttcctaaaagaatgagtgaacatattcttagggaatggtaagttggtaggttttctgcatctcataattagatctgaccagatgactctccaccttgaaattagtctaaaaagattgaagaatttggaggaagatctctagatatcttgaccagagcatgaaagcaaataaatattgcttgtggagtgagagatgatgtggtagaaaagaagctgcattcattcattcatttattcattcatttgctcactccacaagtacttaatcgagcacgtactatgtttcagcttcctgccttcatggagctaacattctggtcagagtgggagggggagacagaaaaacacattagcaaatacgaagcaagtcagatggtgatcagtgctatggagggaaaaaaaatgaagaatgctttggctgctattatcttcacatttggttctctttaaagttatttaacttatgcattatggttaggttattttcttctctccactcattgtttttagctgcctatttttatattcactttctgacaattctatgataaaccaccatcttgagggtttttttcctcctagataaaagcagcttttgaaataattggagtactgtgaacaaaagttataatgaagcatttacttctggaattgatttaaagaaaagtactacggacatcaaagcccattagtatttttctcaagactaaagttgtcagaatttagaggaacatgggatggaaatggatctgtccctcacttaactctgagaggagcagtttggggtgttctgagaggatgggagcttggagtatagggaactccaaccccgggagcagagaaatggtgggatcacccatgagcagagctcattcagagaagagacgggagtgaattagaaagtgaacatgcaaaaattgagcaaggaatttctctttgggaggaagggaggtagggaggataaaaccagtgagataaatgtcagtgaataaacaacatttacaagaacaaattctgcccaatatagaacatctgagtgagctggttagtggaaatggtgcctcgagataaaaaacaatatttagggatttcccaatattcccatcctatattttgtgggatctttaattcagcatcaatgttccattttactgcaagcaagcctttagtcaatactttctaccttgcttctaaaataattaggatttaaaggaaaatgtctcctagcggtggagtgcctgggctctggggcagacattgtacccatccttactctgccacttactcacctttggaccttgggcaagtgagctggtctccttgtgcatcattgtcctcaattataaaaatgagattaactaattacccctacctcagagttgttatgagtgataaatgaaatagtccatggagagcccttagcacagtgcctgcaagatgattgcattatctaacaattgttaacctgttattaccatgacttgtctctctggtgttagtggtttagagaagttctcacatgtatatatgtattttcccccttagcagagctttttttttttcttcttcaacttttaagttctgcggtaatgtgcaggatgtgcaggtttgttacataggtaaacgtgtgccagggtggtttgctgcccagatcaacccaccacctgggtattaagcccagcatccattagctattcttcctgatactttccctgcccacactgacaggccccagtgtgtgttgttccccacagtgtgtccatgttttctcatcattgagctcccacttataagtgagaacacatggtgtttggttttctgttcctgtgttagtttgctgaggataatggcttccagctccattcatgtccttgagaaggacatgatcttgttcctttttatggctgcatagcattccatggtatatatatacgacatttcctttagccagtctatctttgatgggcatttaggttggttccatgtctttgctattgtgaacagtgctgcagtgaacaaatgcatgcatgtatctttataataaaatgatttatatttctttgggtatatacccggtaatgggattggtgggtcaaatggtatttctggttctaggtctctgaggaattgctacagtgtcttctgcaatggctgaagtaatttacactcccaccaacaatgtaaaagcagtccattttctccacaactttgacagcatctgtcgtttcttgactttttagtaatcacccttctgactggcgtgagatggtatttcattgtggttttgatttgcatttatctaatgatcagcgatgctgagtttttttcatgtttattggccgcatgtatgtcttcttttgagaagtatctgttcatgtcctttgcccactttttaatggagtggtttgtttctttttcttgtaaatttgtttaagttccttgtagactctggagatcagacctttgtcagatggatagattgaaaaaattttctcccattctgtaggttgtctgtttgctctgatgatagtttattttgctcctcagaagttatttagtttaattagatcccatttgtccgtttttgctttcattacaattgctgttggcattttcatgtgaagtctttgcccatgcctgtgtcctgaatggtattgcctaggttttcttctagggtttttatagttgggttttgcatttaagtctttaacctatcttgagttaatttttgtataagatgtaaagaaggagtccattttctattttatgcatatggctagccagttctcccagcaccatttattaaataggacattctttccccattgctagtgtttgtcaggttttttcaaagatcaggtggttgtaggggtgtggtcttatttctgagttctctattctgttccattggtctgtgtgtctgtttttgtaccagtaccatgctgttttggttactgtagccttgtagtatagtttgaagtccggtagtgtgatgtctccagctttattctttttgcttaggattgtcttggctatttgggttcttttttggttccatatgaatttaaaaaatagttttttctaattttgtgaagaatgtcaatggtagtttaatggtaatagtattgaatccgtaaattactttgggcagtattgccattttcatgatactggttcttcctatccatgagcatgagcattgattatacctatccatttgtttgtgtcctctcttatttccttgagcagtggcttgtagttctccttgaagtggtccttcacttcccttgctagctctattcctaggtattttattctctttgtagcaatcactttcttcttcctgtttgtgattaatgattttagggtaaatctttttggagggatctcactttttttttattcagtctcttagatagttattataatttggaatttacttagattttaagtctgtatcatagaacctaaacagtggaattggaggaccatgtggccacaaggtccctgggaggaggacccactagtcacagtaagtgatgttgtggcaggaaaagagaagagtagagtggatgagaaaaggagcaacctaacagcaaatatgatcaatgttctttttctctgttgccattcgggaggatttagggatgaaggctccttaggtggtgtgtagtgtagacaggctacagcttgcagtttcctggagggaatagccaggagagtgtgatttgtataaacaggggcaggtggctaaggaagtatagttaggtgccagtaagtttgtaggaaagaattctaaaagtggaatgcctggttcacagggtatgtgagtttaaaaattctgatggctcttactgaatcaccattaacagaagtgcgccagtttatactcccatcagcaatgaatgagaatgcctgtttcctcacacctatgcccactagcaagcattttgatctttgctaatctgctgggtgaaaagtagcatcttatagtttaatttgagcatcttttcatgtgtttactttgtattttcttcttctatgagctaactctttgttcatgccctttgcaggcccactttcaactattgagttttgattttgatttttaggaggttttttttttgtttcgttttttttttttttttttttttttttttttttttttgtgagacagagtctcgctctgtcacccaggctggagtgccgtggcgtgatctcggctcactgcaacctccgcctcctgggttcaagcaattctcctgcctcagcctcctgagtagctgagattacaggtgcccaccaccatgcccagctaatttttgtatttttagtagagacggggtttcaccatgttggtcaggctggtctcgaactgctgacctcttatctgcctgccttggcctcccaaagtgctgggattacaggtgtaagccactgcgctgtccaggagctctttatatactagaaaaattcacatttccttatgattttttttaccaagtgtttctgcttattttgttatttgtctttgatattgtttatggtatttgaggcataataaatttttatataaagttgtcacatgtttcttttgtactttctgggttttgtgtaataatcagaaaagcctaacccactctgaaaagtcatgcttctacaatttccttttgtatttttatgtaaataaaatcatacttatttgattcataattattttggattagtaatgaaatagaaattccattttattttcccccaacaactacctagttctctccaaacatttcaggcacgatgtgtcttttccttgctggctaggtggtgattcttgagaaagatgatttttacttgggccaaggcaggggtgacatggaagggtatcatcatctatgaaatccccttatgtagttagaactatttttggagagtctgctccattttcttgacttccagtttgttgcagttccacactgtgttaatcactctagttttatgaattttaatatatgatatggctagcctcacccctattacccttttgttccaggattttttttgatcttcctacatgtttatttttctgaataaactttagaaattgtctcattctaaaaaacaatcatgttttggagaaagggttaaattaaatttatagcttaatctagggagagtgttttttaacttttaagctcaggggtacaagtgtgggtttgttgcataggtaaacgtgtgccagggtggtttgtgacacagatcaacctatcacctgggtattaagcccagcatttattagctattcttcctgatgctttccctccgcccctgacaggccccagtgtgtgttgttcctcatagtgtgtccatgagttctcatcattcagctcccacttataagtgagaacacatgatgtttggttttctgttcctgcattagtttgctgaggataatggcttccagctccatccatgtccatccatgtccctgcaaaggacatgatcttgttcctttttatggctgcataatattccacggtatatatgtaccacatcttctttagccagtctgtcattgataagcatttaggttgatttcatatctttactattgtgaatagtgatgcagtgaacattcacatgcatgtatctttatggtagaatgatttatattcctctgggtatatacccagtaataggattgctgggttgaatggtatttctgtctttaggtctttgaggaatcgccacactgacttccataatgtctgaactaattgacactcccatcaacagtgtataagcgttcctttttctccacaacctcaccagtatcctttattttttgacttcttaataatagccattctgactggtgtgagatggtgtctcatttgatttgcatttatctaatgatcaatgatgtcaagctttttttcatattatcgttgccacatgtatatcttttgaaaagtgtctgttcatgccctttgcccactttttaatgggggtgttttacttgtaatttgtttaagtttcttacagaagctagatatagacccttgccagatgtatagtttgcaaaaatttgggagaattttttatgatactgacccaacctgtcgtcacacagggtatatgttcccatttattcagatcttcttttatgaatctccttagttaatgttttaagatattcttcctatatattttggcacgtattttttaaaacattatttgacatggtttataagtatttgtttagtcttcacatatttgcagaggtattgaggagtgaaaaaggaatggaagtgtttctttgacaccgtaaaatagattacctggggaaaaatattgaaactttgcataagtaaatgtaattgattcattttttcttttatctcttctgaccctatatttcgaattgttgatctaactataaaaacgtatttgttttaaatttgcaattgaatttagtaagtgtttttcacacccacaaattcaaagcaccaattgctgagattcttttgcaaagtgttccatatcattgtcttatattaattcattgactattaattaattagcttagtaagcacttaatgaacacttactatagaccaaatgttagaaatatgaagactaataagacatgatccctttcattgaaagatttgctgtttactcagagatggaatgaaatgatgaaaacaaagaattataataatataaggtaatgtgctttacactctgggaggccaaggtgggtggatctggatcacttgagaccaggagttccagacccacctggccaacatggcaaaaccccatctctactaaagatacaagaattagccagatgtggtggcatgcacctgtaatcccagctgctctggaggctgagggaggagaattgcttgaacccaggaggctgagattgcagtcagcagagatcgccccactgcactccaacctgggcgacagagcaagattctgtctcaaaaaaaaaaaaaagggtaatgtgctttcatgaaaatatgtgcaaggcagagttggaacatggagtgggagagcctcaagctgtcctggggcaatcaaagaaggctttactgagcaaccagcatctgaactgagaccattcggatgagttgctgccaggtgggcagatcaggggaggcttctccagacagagaaactagcaagtgcaaaggcactggggcatgaatcagttacaagttattcagtctatggggcttaggagattaggcttagccagtaggcagctgccagatctcaaaggctttatatgacatgcgcaagaggttgtgctatattctgtaggcactggagcaaattgtgagcaagaaaaggtcagattgtagactacataactctggtagccatatggagagcaaagtagaagggtatgggtataaaatcaggaatacaagtatggagattataacagtgggcccagttagagactgttttctcttaaactaggacagtgacattaggaatgacagagagcccctatggaagatttattcattcaacaatcatttattagaatcacctgtatgctaggctctgtgctggatgctaggcatgcagcagtgtgccagacagatatgctccccactcccaaagccatcccattcaaatgggaagagcctgataaggtgatatgtaagttgatatgttaagcagtggtatatgatgaagcagaatgcagcaggatgaaagggaaagggaacatggttaggagtatgctgatcaggatagtcctctgggcaaggtgatgtttgatcaggacatgagctggggagggagggagggtatgagccagggaaatggtgtccaagcacagggaaatggtatccaaaagagaaatggtgtccaagcagagggaacagccagtgcagaggccctgagaaggaactgtgcttggcatggttaaggaataatgaggaggccaaaagggctagagcagagtggtggaggaggtggcttaagtatttagattttatccagaatgagatggggagccagggcattatttttcatacggcagtagcatgatttgactggcagcctttaagaggatctcacctgctgctgtgtggagaatagagggagtcagggtgtaagtaggtcagttacaaggctggtgcagaggtccagaaagggaggtgatgatggaccaggatagtgattctggaggtggtgagaggtggtagaactatggatctgtcttgaacttggtactagaaggatacaggaaagtgtgcataggaagtaaaatgggcaagtgtagattagataactgctaagtgtagattagataactgctaagtgtagacatacaatattttaaagggagatgagggaagtatagccagggagggtcactttagcaagagcagtccatatggtcaataggtcaatatgatgagtacactatcatgaactcttgcaggctaaacttttattatttgtatacttatgagccacactggattgtgtgacatgactaaatagagaattcctgaaattgcctctgggaggatgtattaaatagggtcaatcagaagtacgtaaatggtgtctactcttgagcaataaaatttatagaagccacatctaaatttagctttaagcaatttcggagcctgagaattttcaggaaatagtaatcaaagccctgataatacaagaaattgacatcctttttggactgacatgggagaggaataatttgggcggtcacagaaacggactcatagatcatagatcttgggaatgtggggtcaatgaattaaatatggctgaaaattataaattacctcacatatccaattgcttttagctaaaatcaagagaaagggctttctaaagccgagatactttttttccattagcaaagggttataagatgttctggagacttgagtcaggctagttcccttatctttggaagatattcttgagtgatgcagtgctatcagtttcaaataagtatatttttgtaaatcaggtgatgttatataatgaaactgacatttgtaaaagttttttatggctcccagccaggtgccccttttgtcagaccctgacttttgaaggattttgggctgcttataaggattcagagttcccctgcaaaattgatgttggaaaccatacccacagtctgcgccagtcactgtggactggatacatttccacagtgtgagatgaaatcagaactgaatgagagtggccactgttctcttggccatacctgaccaaaggttctagtttgatgcagattattattctttagttaactgtacagtaaaccatgcacagtcctcattgtaattaggtgggttcattctttcttaattttacctgctgttgtcgtcatgagtcacaaagttgaataactcttcagttattattgtagccagagtgatggataagatagactcccctaaaccatggtagtcgatataaagcttttcttctcttgcccccatagttagcactaactggcccctgttttgtataaccttatacagacttatgtcatagtgctaatgatataccacatgtgtgtacacatatgcacatacctactcacatatacacatgcacacacatatatgtgtacacacacacacacgcgtaattcctcttctctccccccacagactgtagtaggcactttgaatcatgaatcgttcttattttccttttaactattaacacttagctcagcatctggcataaagtaggagctcaaaacatggttgtcgattgaaatctagaactgggttttgcattttcttgttattgctttgttgttgttctgttgattaagtaattctatacctagtttaggtttgaattgctttagagaccctgatgatggtgccttgtgttcttggccacttgattttatgtgacagtcttcagcatattcataactccaagctttacaaaacaggcaatattttatagggaagtagctctgttgcctttctggatgtagaggcagcatgagattataggataaaactccaatatgtttgtatttatgtatatatatattaccttattcatacataataatgtgtatacatacataataatatgaagtaaaagtaggtcagaagtaaagaagaggtgggaacaaaatgaaagcaggaatacaattaaattgcatgtcagaatgacttacatgtaagatacagaggccacctttaaaggctttaagctttcaatcagccagagggaaaagaacaggcttatgggggtaaagataaaccatttgctcaggttgattttaaccatactcttagcaccaacatcagataagaatttctcccaggagtccctatgaagagtacattgtgtttcgttatgaaaatcatcaagctttgcaaggctgattctcataagacaattttgtgttaatagcattgcctcaaggcaaaattttgtaaaagcagtcggcaaggttctgtttaggaatcagttctctgctggtcagtttgactcagggatatgaaaagtgggtggactacttgtctttaagcaatctttcctgtgtattgtttatctcaaataaagctttgaaaattgttttttaacattgaacttgaagtggcactattctccagcaagtaagggcctacagtgtagctactattctgtgtagctagttaaggagagacctggcgtcctagcagtgtcaaatgaaagctggtattagcatccatatgaggaagctgacttgcctagcaaagacatttacctgaatagcaggttgccctccttatttccaggggaagcatgggagaaccaagcagctcagccaggattatgcatagaaaattgtttggacccacgttattgctcagacaaatgggtgatcctctccaagggctttaaataggtccttttggggcagggaacccaaacacttagcaaagtacagaaggtttgaagggaatgaattcccagagtctggattggatgctcagtctcatttctcaccttcccgtttacaatccctctttttccattttagcaaagcaaggcatccttcttatccatctcagatcttactatagtgcattgtgcaggggtgtaaaaacagcctgggcaccaaacagagcagcaattggaaatatttctttgcagagaagtatggtagtgtgaacaataaaagactttccaatataaacatatgctacattgggataaaactctgtggggaagtgggctggatatgagttaaaggagaaaaactagcgatgtaaattttccaactgataaaaaggagcttgagcttggtcagatatcttaaaaatggttgaatgtgggatatgacagttgtgttttaaaacctcaatgtttatgtatgccataaattatattctttgtaatcctataagcttatgatgaagtcaacttaaaacttcactgagttggggcagatcttcagaaggggatacatagctttttgttttgttttgttttgaatctttgggccatgcgtgagcaaacatgtttgaagaccactcatctactgcatgtaatatggctctcaatcagtcctctagctcttgcatcgacctcaagtgttaggtcagcctctagctgtaactcccctccctgttcttaccactactttatatttactttaatataagtctaacagattgcatccatgattcctctaccaaataggaagatctttaattctcgaaaacggtatactatatactctgtagtttccaggaatttttttgtggtgccttatgtaaaggcaaactttaaaaaaattattgagatataatttacatatcatataattcacccatttcaagtatagaattcaataagttatagtaagtttaccaagttgtgaagtcatcatcataaatcagttttagaacatttttgtcaccccaatacgatttatcatgcccatttacgtgaatgttcctatgtttttctaatatttaaggggctacaagttcatatgacaacatgcgtagagagcagtaaggatggaggaaaacaagaggggcagggccagaattttatcatttatggaagcatgagtgctagcatcttctatttttatttttaaaaaaccactctgatgttcttctagtccttatatgtttttattgatacaaatataaccacatgttaaggcaggactctgtctatctcagttttggctaagatcccaatggccaagaatactagattaggttcccccatatcagttacctatttagaacatacaaaacattgtatgggagttagttattgtctgctccataatatgtatgaggttgatgttggggccctggtgaatgtgagggtgggagaagggtactccatcttcacttcaaaccaagtgagaggaatccttattgaacttgacattatctcctgatgggagtttggggacatgaggttcacctgaacctgtggaaggctgtgatgagagctgccgctaagaacaaagtgggagagggggctgcagggagatggccgcaagttggtgggacgaagatgtgtgagattttatcatggatcaggtggatgctctgggatcattttaactttggaatgcactcaagagggatgcctggagggaatgggggagaaacagagagagagagagggcatgagcaagtgcataagtgatggtggggggaatggttatcagttacctaactattctggatacgtaagaatgtagtgcttagagattagacagaaaaatgaaccatttgccatttgaccatctgggagacattattgtatggtctttaaatctgataaacctgaatttaaatctctccctgaccctcagcaagttactgtatttttctgagctttcagagttgtcatggccagtatttgtcgtaatgatataatcattgactttgacaagtcctggaacttgcctttcaaagtatttttgatatttgacactgattgatgagtagataaatatgaatattctgtatagacaacatctatgatctagctagagatctaaaagtcattgttaggtaccataagcgtgtaacatataacattcaatattttgcaaaatccatggtatttcatttactatactgccatttactttcttatttggattacgtaggtgataaatttgtacaagcctgttttcatatactttgaaagtgtgtgaaaataattgtatataaatggtaattctgattttctctagaatacaattcagatttaccagccttcaaataatattattttagatactattgttaataaataatattttttatttagcaaataactttacatatatatgtgtgtgtgtgtgtgtttgtgtgtgtgaatttatgcatatgtatttttccagccaacatgaaagtcttttgaggacaaaattgagtatttgccatcacaaaactataaataacttaaaaatttggcatatttaaatattgcagtaagcaataatacttttatccatttatgcaacttttgtacagaaacagatcttgtagattatcaggtaggatctatggagtgaagtttgataaacttttaaagacaatgaagttaatttttaaaacctcttaaactcaactcttaattattcttaattgtgttctttaatttcttaaattgtgttcccaaagcatttaaaatatataactatcgtagtactgaatgcatggcatagtattatttcattaattcattaatttatttaaaatgactgtagtgaactcgtatggtacaatctctgtccttatggagtctagagttcagtgggatagacgcatgaaacagacacatgagtaatatataattacaaattatgatcactgttatgagttacaggcaaatggcatgagagaataactgtggaagcataatttaattggagggaatgattctctgatgaaagatctgaaagatgagtggtccattatcagttgagaatgggtcaaagaatatttcagatagtgggaacagcatattacaaaggccctgtggtaggaaggagtatgaaatatttaaggaagaggcaaggagtggatatagatgcctcatttaggaggcaatgggaataattcattctggaaatgaggtaaactagacactagattagactagaataagttagtggcagtacagttagaagtgaatggattttaagaaatagtagaaattagagtcaataggacttcaactgtttataaaggagaaaggagaaggtgttgataaataaggctatttgtaaaggtggatggtttggattctagcacattgtactgtgattgttataccataatttatcttctgtgaacattgcaaggaagtttctgcacttattttcaagttttgatgtgtatatttttacaatactgttcacttttctaaacttttcaattgtaagtttcttataattgagaattgttttctctttctttggtatatgtccagagttcttagccctctaaattcagttgttgttgagtaaattttatttttttaaaaaatagagattagaacatctgatttcagatatttaaaaaaacttagatatttatcttgtggggaatgacttaggaacagttttcttgaatgtagagatttgaaataccaatttgcctttgggtcattattttgtaggaatgtgggaagatataaaattcaatgagcaatatgattaggcatttatataattccttaagtatatgctatgtagatctttcaacatatatattaaaagattaaaaaatgcttgattatctggctctggggtatacttgtaaaacttgcctatttgctaaggtcaaaacaggcatgcatgtattttatattctagctttatctatggtatattaataatataactggtttccagcagacacaacctagagtaatccctgcctaggcttagcctagttagagcctagttaggtcttcttgggtttggacatgatttgagatattgaaaagaaaataattgaggagattcaaagcagtattctaatgaagctatatgcaggtttactaaacagccaacttagccatttatctaaaaaaataatatatgtaaaatgtgggttttactgtaatataattaccgagtctccttaccaaaggatgggaaaactttatagccacgagtgacagaaagaaactattgttcagttgttggattccatgtttatgtctgctaaactggtcattgattttcatactgtgaactttcttaacattgccaggtatacagttagaagacctcttatcctaaatgcttaggactaatttcgttggtcagtggaaaaagatggttaaatgagggaatagttaaaacaatatgatacatgcatttcttgaacaatttattttaacctaaaacaaaaattaatttgctaatattttggtgggggctaagggttttacttcaagtaataattcattaatttttttgttttacagtttcttttttgcataatcatgcctggaattcattacctataaggacatagacacttgtgaagacaatcctagtgcagaattcatctaactttaatgaatcatttcattaaagatttcatgatttcccttattattattattacttattattgaatgtatgactcagccttataaagtgtttcctaaacttttagcttattttaaaaatagaaacaccaactttctttttacatttacatttcatttgtttacatggtacttaattaaaattatatagttataataataagtatgaatgacataaaaagttttggaaatgagcacaagtaattcttgttaaacactatagttttaaaaaagtgaagggaaatggaccattgttctaaagattagacaacttaagctatgaggcttggtgagctgtgggtatcagtctttatgtttaataaagggaatggagattgttggctaagttgaggtcaagtaacagagccccctttttgtgctggtttcagcccattacccttcaactttattcactaaatcagatagttacagtgctgcttagaatagctcctgatattaaatagtgtcaataataatactttagcagtcatctctgagcttcatcattataaactagataaataattaaaacaaataataatagaatgtttaatgggagaaataggcactgttgagagaacagtctaagattcagatcatttagctctatgcccagggatgccttactctaggtttgtgacattgaataaattgctaaacctttctggattcagcttccaaatctacaggctggtagttctcaacaaatcgtgattttgcctcccagagaacatttgacaatatctggagatatttttgattgtcataatctggggaatgttcctgatatttagtggctagaggccagcactactgctaagatcctgcaatacacaggacaggtcctaacaagaaagaattatcagttcaaaatttttgtagtgctaaaactgaggatccttgggctagctaatttatgatggtttcttcctcttccctatgtatctatcattctcaaacttaggctgatcatatatatatgtgtatatatatatgtatgtgtgtatatatatatgtgtatatatatatgtatgtgtgtatatatatatttctattttaaataacctgagtaatgacattagatgaattttttttgtctagtaggtgtttaaatgatgcaatagtaattttcaatgtcttatataacataaacagagaagaataaatatagccaaaatttactactctgtactttttctaattcagcattcccaaatgtaagttaaatataactgtagaaaacccacagtagattaaaatatttattctttcagtaaagggacagtttaccaatgctgtcaggtagataggtaccagcaatatagataggaaaggggaaaagctatgtaatgttggagagtttaaatactgtaattcagttgaaaactatatttcagctaatagcaactttgggatttatatatgtatatccctatgatttaaagtaagattcatcagtggtataaaaatgatattttagtgtgctcaattttatgacttgagaccagttcaaaacaagcatcactgctagtataattctaaattattttggaggaaatgtatattttaaaattcttggtggtaattagtgatgataggttcgctgctctatacttttttatgaaataaagtttgacttaaagaacctgagaacaggtttcaaaagtaacagcatagataccaatcacattttttctgagtttttaatttgttgacaaaattttttttaaaaaactgtgatgaaagcatgcgagacttgagatggctgtagaaggagaaactgagtaagttcctcttcttgtcttgtttcctctccctatttctccttctctgttttgcttactccaactccatgcacacttgaatcaccatgaatggtgcccaagttgaagcccaaatcaagttccttagttgttggggccgtgtcttatttgtcttttgatccctggtatctggcatgtagagtctctaagtaaactctctgcccttgacctttctgcatattataggctctgtctttgggttcctccctccctctatttcccttttttctgcttctctctcccttccttccagtttagtttggcatttatagttttcgtggttgtgtggctcttttcatctaacatttctagatgtttagagcagaagggggggccctcccacctgacctcagcctaccacattgttggaatccattcattcttcaacctattaaaatcttactccattttattaccaagtaaactctttcaaacagttaatttatgattctcctggttttattcttaccccattcaccccagcaagaaagtcggtttctcaaaaaaaaaaaaaaaatgcccttctttccctacctgattattatgtagcatgagaattgacagagcacaagcagggaatgattacacaacatttttaaaaactctgtgttgaaatgtatttgtggcattactgtctcaaggaaagccaaatgcatgcctcagaattgagaaaaatgtaagtcggcaagcttatctctaactccccatgataaaataaattgagtgttttagagctgtcagtagtacttgcgcagttctatctctactgctatgtcagttaatatttcctccctcaaaacaaaacgagtgcataggcaaaatgtaagccagcagttgagattctgaactacctccaccagtgggtttcaccccaaagtgtctcctgaaggcctattcatcctgggtttgcaatgctgggttgcaatgttaatcattttttcatgtgctgatgaggaaaatgataaagtgatggatgctgctcttccttctgctttgtcatcctgaccctgattgtgctgggtggactttctcattaacgatgcaaagtccggtgatttgcactgtgctcagctgggcatcatttcttgtatcttatttttgttggtcagcattatagctagttgttggaactgatttcccttgcactctctgtttgactatgccatggccagcacacttttgaatgaaaccgctgatggttgtcgaaactaaagggacattcctatattttggattggctcacgaattcacctgttgatgccctggaggtaattttcactggctttatttatagaaatggcttacacagtgtagttgtgtctagtcagttgccatatggtaccctaatatgccaccaaatggtaatcaaaacttagtagtaaattttcaggaactaataaaacaactgtgatggaggagcttcatttgggatggtagatatcagtggctggagcaatgaggaaggccttgcctttctcttagtgctatttgttagacagaagtttttaaacaggtatgtccagaatagtacttaatttcttaaactataaaagcaatatatggttattattaaaaatcgatttggaatggaagaataaaaataaaatgactcagttcatttttctgctatcccaataccagccttggagaatatgctttcaggtaatcatagagtcagagaaagaatagagatgaagacagagtcacatatgtgaagttaaaaaaatgtaaatttatcacaatatatatgattttccaacttactgttctcaatgagtttgtcttgaagagtgttacgtgtcaggatatataggtccacctcattcttcatagcagcagtgtggtactccagaccacagatgcaaaacgccataatttaggtaagccttccattatcgataaacataaggttattgccaatgttttacagttataaacagcaagttaatgaacatttttgtacatatatcttacagtatgtaggctgacattgccgtagtattaacacttagaaatggaactgatcattccatagttaggcatattttaaattttgatggatattctcaaattgcccctccccaaagacactatatgaaagtgctcatttcctccacatccccatcaatgcccagtcctttgcttgatggaaaaacagttttgggcatctttagtgttctggtccacagctcccatcctgaccacactcaccaaatagaatcttactttactcttggacagaacagaacaaattaaaacaaaataaaaataacaagaaacagctcaagagatgtggatcttttgagcagcttaaccaaaacctaaacaaggcaaataaagtgaccctttgttatcagcaaaggcctgtgcttcctctgtgctgctgagccacagtcagctaggctggatcatgtggagaactactcaacaaagctggatttccttgaccagtcagcaggtagaaggtttttcttcacttctttccccaaagtcccaactcgagtctaactacgattcgaagaaaatcaagagctccagtgtacaagtgacagagaccatttgttttaagacttagcagtcaccctgttcaggtcttcttaagggagacggcagctcctggacctggccacagagtgtgagaaagatggtggaagagagaaagctgtacatacacacgcacatacacacacgcacagggcgagacagaaaggcaggaggcaaattttttccaaagaaatccaaaacaataggtaaagaggatggaaaaaagagaatggtaactgggcattaccttaaccactgggaggagaacaaaagtaagtcttaaatctgatcagccatggcttattacttgataaggtgaggtgaggaggggaagatggtagaagaaacttgatcttccagtaggaatcaataaaaattgtattagatgttccccttatctttggggctcttgtcttactcgtacttcctttgtggtaactttaggattctcatgtttctcttccttgacgttgcaaaatttgatatatttccatttgttttgttatttcttttcagatctcaccgtttgctgtattttgctttgcgtaatattttcttttccttctctttctgcattatttgctttaaaacaacatatacactaaagaaatgtaacctcaaccttttcattcaagtgtgtatttctgaaaaaaaatcagatatttacagataatgaataacaccacaaaagttgttttatgctgcaactgtacttaggttcaatgtcatctttgccaccttctccctgtgttatgtaaatattccatttattgcaggcataaaaataccacctttcactgtactttatgaggaaatggaagccaaatgactttttttttatagtttaaaattcatttacttatatatgtggcaaattctaaggcaagccagctcaaatctgtgccaaattcaggaagaaaaggattatcacaagaaataataagtggattatcacaagaaagaaaaggattggtaaaatatctgttatttcacttacaggtggaaggccacccctttttgtcatttaaatgctaaattttcttctcctttttcatacctttcattttccctcttgctttgtttttgcatacaagcgagttgggacatatattgcttctatctatcacttttacataaaagatagaaatccgggaaattgcaaaaggtttacagtctttccatagactaaaatcacgagccagatgttttaaaacaattttatattaaacaattttaaaactagtatttgtataagccagtaaatctatttttttcataaatgtcctatcatgtttttccccccattgggcacttggattggaactacaaaccacaatcttcaaataattattaaatctgaaaaacctatgtcttgtagtttgtggtgactctgtaggtagccactgcaataaaatctatttggagaaggagctattatctatgcacaatgtgtatttgatgaaatgggtaggcaattacagttcacaaaaacacatactgtattagaatagttcacatatagcaaagataattagatttttcatacagtaaccagtcagccaataggagtaaaaatgctacaaatcttatttataaaaagtgccattaaaagataatcccttctaatgttgcttgagcatttttctggatatgagtgggcagatgagtaatagaaaaataacactgacataaaaattaagcctgggagattcctgagtttgttttgtgcaacttggagttttgaggctctgtcaggagaccgctggagacaagagtactggattagaagcaggaagatctggtgcttgacctgactgtactgtcagtcagtcatgtgactcatcccccaagtctcacacttctcattttcaaagagaagaaccctgtactgcagagtaagagatcaataaatgtttgttgaatgagtaaaagaatgaacaaagattttaaagattcctttccaagattctgaaattccactaggaacttgaacaagcaataaaaagacagcattgcaaattaagaacaaacaaacaaacaaaaaaaaactttagccaaacattctatttagtttaaatttgtagatatacagattttctaaatatcagttttcctcaaatggacttaagatgacttccagactcagggtacagtgtcacattagctggtttagcgagagtgttgtattctacagaaatgtgactctgaataatgccagtttgtcacagatggggatgaaatcagattttctccaaaacacccaaatgtgtgatgcataaagcaacattggcagccagtggggaagatcttatcaatgaagtacacaaagctctgaatgtttacttcgcagaggaaatggcttcacagaccggaaaatttaagttgtcatagaaacccccatgccatatattttgttttaatttgagtattggcagattaagaggactcagtgacaaaggagctatattaaaaatgttgaaattgagtgtgctggttttattttttaacttaattgatatctgttttcaaaaggacttttaatatctagaagggcaaaagtatttcatgcaaattgtgcatagatttctgttgaaaaacaatatggcattggaactttttgttataaaatggtgtgttttctcctgtttatttcttatcataaattatctttttaccgtggtatcatcaaaataacttcactggtatcaattagtaacataggaagctatatatcccaactgtctacatttttattccaactcttttacttaaggaatctgatagtagctgctattggtttaggaaggaaaattaataattagtttgacaatctacttgaagtcaaacatttaggaaaacaaacaaatactgaatcccttaactatctggagagctaatatttattgagggactgctctgggcctcgctgtgctagattctctatgtacatgatttcatttggtccttcaactactctgaaatataaattatttcatttcttgatatgtaaggtgagactaagaaacattacgtgatgctcagtaaaaaggaaaatctggaatttaaactttttcaacatccaaaatggcaccacactgcctcatgtcatataattaactagacacaaatgtctaaggagcagaacagacattttgtgatagataagacataactgattctgtagtaagaagaactaggaagatgtccaggcctcacatatgacggccccttctggaccaagttagaccttgagttagtcttcagtaactagcatcccagcttggtgtgaaaatttggaacacttaattatggacattaacatatttacacataattaacactaataccattttgataaatgattaaaaatattcctgcatatatcttcagcttttacaaagggaattatgtgattttgggttttcaattatgtgcaacctattgactggacattttctgatgtttccatggaggatttaagtgttattatgtataatatgttagctattaatttttaaataacaagtttaaattgcacaaaattactttattatagaagctgttgccaaaatcaactggcttgggaatgcacatcactgaggaatttgaaccaatcaaatcattagccagagaaatgtaattatttataactcagccaagctcttattatgggcaagttagttgcacttttctccgctcttttgtggttgatgtggtattttataatgaacgtagattagtgggaaaggagcaatatttataagcaaaagacagtgtaacagagtgaaaaattgaaatatgaaaaattatgaaagacggaaacattcagaaagcagattttctgaaattgtgtttaaagacagataaataaatatgtttgaagatggaattgagaaaaaaagatggaaaatggtcattgctcacagaaaaagattcactaagcttattcttttgatgtgatataatagtgatttgatggatgcagctaacaaaatgtctacaaaaagcccagtggtatccattaatattgatgcattgagtttcactaaccgtattcatggatgtattatttctagcaccttctgtgtttttctttttgtatttggtccataccagcgtgttgggtgctgtccatggtactggaccagcgttgcttgctagggcctgctgtttgggagattctagggatggtttcctcctcccaaccgcaatggccctgttcctttatcttacactgtgcttgaattgtaaatacaacttgtgaatttattagtaacatttctagttattgtagtttctaagtatgagatctcagtggagatctccaaacttaacctggctaaaactgagcttttatttttctccaaaccagttcctcctgcagtctcttccatctccgtcaatggcaactacatcctttgttactgaggctgaaatcttcttataatccttgactccactctttttttcacatcccacatctgtcaggtctgcctttaaaatatattcagaatccgaccagttttcaccacctcactgtggccatccttgtgtgagcccccatcatctctccctgtaatggacttctaactggccgtcctacttatgtccttctacttccccaggccaacttttaaagcctgttctctatatagtaaccagagtagtcttgtaaaacatgtcaggtcctattactcccttgctgaaaatcctctgatggctttctgctttagtcagatagtaaaagacaaagtccttataatggctcttacatcatctggccttcttgactcttcctcatgtaccctatttcagccacacaggcccttttgatgatccttgaacacacccaattatgtttttgctttaagacctttgtactcgcgattccctgtgccaatacagatcttccatcattatatgcatagctaatgtccttactttcttcaggtttttatttaaaaatatctttttcattgatatttttcctggtctttctatttaaacttgttaaaaagaaagaaatacccccccataacagcttatattttaaattaaatgtatctttgttgtttttttatccctctaagatgttggctcaatgaaagtaggaattttttctgttttgtctactgctatgcctagaataatgcctgcatagtaggagctcaataaatatctgtcagctgactaaatgaatggaattatgttaacagatgaatgattttagcggaaataaatgtcaatatttgatgatataaatatatatattagattataatcatttatcagattattattttagataataaaagcatttttagcattgcttgatttatggttaggattctgtatttggaggtgctaaaatgggtaagaagtccagccattgcagatgcagaggcctttagctgaagctctagagctgttggggtccccaggaaaaagctcacatgagatctcctgatgctacgcttctggccttcattattcacccccatttctaacatatatatgttggggggaagcttaaggttttcagtggtgtggggctacgacgggtgtcccttcacaccatttcaaatggataggggtaagttatatctagagtcttagttccagaaacaaggttgtgatacatactcctgttaaaaaatttttttttgattaatgtgcaccagccactaggggatgctagacactcatattcagagtagggtccactgtctcattgggcttggcaagaagtctggtctacctaccttcagaccatttcattatttgtattctttttagccttttgtgtaaaactaacatttatttaatatttcctccattcctccttttttcagcacattccccaattggagaggggtattttggatgcatctgggttcttgcttttaggaactgtgtttaatcatggaaacctcattcctattttccaagtggcagtgactcatgcggggagagtcaaggccctgggtctctgctagtgctttccccatcctttagcatttcttcactttgctaaaaagcgtaaaagtcttttcagtgattctgtctgtgggtgttggaaaaagattttaagaaaaatgattttcaaaatgactagtatttacacgtatgagtccctatcttttcaagtttttagtttcatgccactttaggaaaataatagcccatgcggtgccaccttattctttatatcttttacacgtgattgattgtaaaggcgatgaggataccagtatccattgccaggaggtaagcaggaatcagataaaagcaaagggtggaaggtggagatagaaatacatatatgaataacattcttcttctctccaacttcatatagcttatcaaatccttaatttagctttgggaggctggtggatcacttgaggtcaggagtttgagaccagcctggccaacatggtaaaaccccatctctactaaaaatacaaaaaatttagctgggcatggtggcatgtgcctgtaattccagctacttgggaagctgaggcatgagaatcacttaaacccaggaggtggaggttgcagtgagtcgagattgtgccactgcactccagcctgggcaacagagtgagactctgtcttaaaaaaaaaaaaaagcttaatttaaactttgatcttaggatgaaataccctcatagtgtgctctgctgttagagattcatgtgggaaaaacatatatcttggtttctttaaataaattagtagagggaaaagctgaatcgacatatgttatcatataaaggagttaaaatcatgttctttggtgtgaatagaccttggtttgaaactaaactctgctgcttattaggtgggtaacttcagagaaattactttttatctctcaatcctcagttttcttatcattaaatgagtttaataacttctatcccataaagttattgtgaagattcctgggaaatatgtatatacatatttaataaccatcagcacaaagaatggcatgcaatagttgctctatagaagttaattcctttccactttcatgtcaatatttttaacctagctgttagatgatctcagatctcagtcctagtggaggaatttgaactggactttttcctcccttaacatagtacaatgtgtatgtaaatcactagtaggaattctgtcattagaatttttaaagtgtaagttaaagttaatattttgctttatgaataagatatttttgttacttctgggtggatgtcaaggaagaaatcagtacaaggtaatcccttaatatttccttgaaatgtatgtttgtagtattatgcctgattgtaatagcatgggcaaaatcagttaaaatatagtgagctgcacacaaaaccttatatgaaattctttctttggcttgataaatgccaagacctaattctttgtgaagtgggtgccatagctttcagtgacgttaatatcattcatgtaaaatcattgttcctccagcatatttttatgggtctcagaggtcacgtgttcacagtttgtgtaagaaccagcattgtggtggagtggtgacagaattgcattgaaatcgtggctcttctactcaataattgtgtgatcttgaacaagtctgttaatctgtgtgagatacagctcttagacatataaagagtaggactatagtcattatgcctattgcatatcattgtattgatgcttaagtgaaagaatatacatgaaagcagtttatgagctctcaagtgttctccaaatgggagatggtttctcattgccacatttctggctgctgctttcacttgtcaaaccacattcctgaagcaacacagtttgctgttaaagggagaatatttaaggggcccgagatgctgtaggaaagccatctttctcttctttcttttctaaatggcagcagtaagaggtctgtgagatgggaaaataggggattaattagaagatgattctacatttgcctgagaagatgaatgatgtttaatgcgctttgagaattaggcagtgctcgggagtccattttatttttctacttgagtgttccagtgtattcgttgagtaagacctagacagattattttaccttatcccaacatgcctttctctttactttgggtaagcccaaagtgtaggttctgtcatcacagaccatcagccctctgttcttacagcagatgaactgccccgggactgcttcttgggtaataatggacatcacatgggccatccagccactctctgttggttcttatgtcatccttcctgctcagacagggatttcataccagatacttctcctgccatcattgtgatccagctgctgagataacgtttcttacattttatttcattactctagcatatttataagaaatggttaatttgacttgagtttatcagtgactgtactgtgagctcacttttagcttaagtatccactttgagcacaaaagtgtggatttttttaagttatttttttcacttttaatgagtataccataagctcttataaatattatatagaaatctgtctcttatggaaagtaagctagacccattcctcagtgactagcgtaaaaatctatttctgcctcactaagagtttaacatatgtgtaccttttataatgccttgtaacttggctaaatatgccattttgaactgatatttaaaactgtataaagatcctgtggttattgataaaagtacttgatagaaaatgctgtgacatttaaaattgtcaggctgtactggatgacttttccttgaggttgttgcagacactccacagtcgacatttagtttagttgctatttctggtggcacgtgtcttgcatgggcctcatgagtatgttgacacttgcgtattgtgcatttaagaagtacctggagaggactcctcccctgtcaaaaagttttctccatcagttttcctatagacatttgctacaattccaggttaatttcttttgattttctgtttttgaacaggttattttatgagtgaagtcactcaatgagtatttcttgtgttcctattatataacaagtcccgtgtagggtctatagtcaatcacttccacctgtggaaaaataattagcttgtttggatggggatagggagaaagaaaacaatttggggagggcactgggctcctcagtgtggtaacacaaggctgatggagaggaaaagagtgtatgaaactttgactgtaggagatgcttaatatgtatttattacataaaatgtattaaaataaacttgtggttctagcttcattaggttgtgataaggtggaagggccagtgtcctgagtgtcagaaaacatgggttttgcatggctagccctgccacccagccacttagctgtgaccctttgaacaagccatttcacttttctgggctgtgacttctttattagtagagtgatagagtgggactagatgatttctaaaattccagactcttctgatttttttcctgaagcatgccacttgcattttaatgaaaatattgattgttaatatttattgagaagtataaatgtagcgggctggtaccgtctttattcccatattacaaatgattccatttgtaagttaacaatccttaaatctgttctggtgtcagagccagggtttgaactgagatccaccagtttcaggtatgcacatgtttatgcaacacagcctccagaatgaaggctgatgaagacagggacgctcattccccaccccccaatcctctgtgtaagctttgaagatcactctggaagagtctacctgtcatgaaagaacgcagatgactttttaagaatatttatgtagtcttatatttcagggtacctgagaggccctttaaggtcctaaattattttttgttctatacaggaatcctttctgtaaaacccttgactaaaactgtctctgctaaaggatgggtattggcaggtgttggggtgagttgacgaaaaagcaaaacaatagtttctgtgaaaatgcatgttaaagagaattagcagtaaatgaacgtgtgtttccttaaataacccaacaccccaatccacctagaaccgatgacttttgctagtttttacccatcacctcaggagtcattctggtttcttggaaacgtgtaaagtatctgcttagggaaatattattttatgttgctgatgttgggaggtagcatctactttagttgaggaatagtcagctaatagttcttttctttgctgtgcttttgcttatgtatttgttcagacctgctgcttaatgatttcagctggccacctgccatgtcaaaatcactttcctctcaagatctgtggaaccaattttatctgaacacaatggaaaggaactcaccattttgagctacatatggtcttaaagataccatcttaaataaagagaaagtgaagaaaacatggtttcaatcattagtttctttcccagagccactttctccacctctaatatattgtttattttctgctaacactttaaacacttatactcagttaatatttcaactcttgtgtgaggaattggtttttatgctttctagcagacagattgcctgagactgacacttctgaccaagtaaaataagcatatttaaaatgctctgtagcttattttcgcaacgtatttgtgaacactagaacttccatatggaagggactgggggagaggatgcacacagtttgaaaaactattcaggaactggagagggtaatgaaaatgaaaaaatgtaacttatggcctccaatctatcttttcaaaaagtaattaaaaactgaaaagcaaaagaataattacttcttagtttaatacccccattctaacacctgatgtaatcattagggtttgatgcagctcaagataaacattgtataaaaagagtaatatacaaatggaatatattgtcattcacatgcataaatagattagcttactattttagagcactgattcactaatttatattcaaatttgtgtttcttacccaattcatgtttctagcctcacttccattcctgagtcatagtcaggatgaatagtcatagcctgaagatttaaatttagatgttctaccatttactacctcataattaatctcaagttttattcaccacccctccaattaagaggttcttctattagtcatttgatcttctatctcagtcttgcttacactcccttgaaaccacactttgatcttgtctcaaatctaagctccacctttgtcttactagttgtgggttcttgaggaaggtgtctagcagagtgtctggctcatagtaggagattttaaagtattgtttcttttttccttgtctcagagcctcatccttccccacccatccagatgatcctgttcattattcaaagactagatctgatcacttctcttacatggaccccatgggacttgcattcttctctgagccaaataaggaaacgtatttgtcccttaataaatactctgatttattattttctttttcatgttgtatcattggagtttttggatacaagcaatagaaaggatttggctgacatgggtaaagagaggaccttttgggagggctaaggtagctcactcgattcaccagtctagagaaccaagcttgggaatggatgggaagcaaagaggtatcacatgggtgagagacgaggaatctggtgaacagtctcataacaggagcagttgttgagcaagccaccaccaccgaggtgaatgagctctgactgcttcttccactgttgtggcaattgcttagggtgcaaataagaagagactgtgtgatgggttcagcccagctacaccagggcagttagtggaaggatctgccctttcgactgccctagtacgaggccaggcacctgaacttattatcaccaaagacttcacacagcaggagacacagaagtccctgaaaggaagtctggatgctgttaggaaggagaaactgaattgcagtgaccagaccaccaaaacgttccctaccatttttacccttcaaactctggaaattttcatttcctgaagagcatagattgtaattatgctaggttttggagttcctaaagtttgtatattcatgacatatttattaaccctttaatatacatgtaccaacatttatctgaggtgccgtgtatatagcagtgtatacataaacattcctgtcttcctggagcttgtattttggtggcaaggtgaggcagtcaatgagcaagattagaaaaatgcagcttgtattagtgatgtgtgatggaggaaaagatgacatggcagggcaatagaaaatgctatggtatatgacttgaagttttaaaaagtgattggagaaggtctcactaactaaggaggggacatttgaacaaaaactgatggatgtgaggaagctagcaatgcagatatatgagggaagagtgatccaggcaaagggaatggcaagtgcaaacacaggtgcatgtgttcccctggcacgttaaggaccagcctagaggtcattgcagctggagtggaatgaaggagaaggaaagtagtgggagatgagatcagaaatgtaggagggaaccagactaccatagatgcgacacatgaacaagatgtggcctctgcttccaatggccttgtggtctaagaggaggcacagatgtgaaaggacgtacttcagtacattgcagcaagcaccaaaattaggcagagggtgcaggctaactgcacccaggcaggaggatgggcctggttagatctctgcttgtctgtgagctctttgagggagtgatgtatcttattcattttgcatcctgggtggcttgtagagtgcctgacaaataccttttgtatatatttttgaattcattttgagtggttgaattacagatacaatgggcataatgtgtgagaaggagcaggattttccttaatcacagacagaggaggcttagggaaagagattaaggaaaataggaaagccacagacggttgaagagccaagagttgaatctctgcagtcttctctctactcggtactttttctgtccttggcatcattgctttgatgttgtaaagtattgaccacataaactactataaaagttttttgagaggtaagcataatgtctatattagttgcatgatctgcaacatcaaggtagttgattattttactgcaatttaggggtttgatttactggcttatttgtgctgttttttccccatgtggacggttttgtgcttgtctttatactttttctctacagggcactcaaggaacaccaaaatgtaaaatagaaccacaccattgtatagcagctgtagacagatatcagtgaggctgataatttggatttttctattgcaactgctactgccatctagtattatctaatactgagtggcttcttccatgatgacttcttgaattgtgaagtggaaatttggtagccttatgtaaccaagcacttacattatttaattaagcaaggtgctacatgaatcaacaaagcaacacaagctgaatatcaggaaaacacatttcaattagtgacagcaggaccagtgcctgaaggccctattcattgggtagaaaatatgacaatgccagggaaaaatgcaaattcatttcttataatattctgtgtgctgaactgctaaactaatatttattagtaatcttagagtcagtagtctttgcatatacgttttacttcctttcctttatatttcatttatcaataagtttttggagtccccgtgggtgaaaatgttgatctgttagggatttagaaaatctagtaaaagtttgcctgggctcagaagcttattaatctatttgaaaaatatgtgtctgccactgtactaggcattaagcatacaaaaatgaataaaatatgaagtctttttatatatatatttttattatactgtaagttctagggtacatgtgcacaacatgcaggtttgttacatatgtatacatgtgccatgttggtctgctgcacccattaactcgtcatttacattaggtatatctcctaatgctatccctcccccctccccccatcccacaacaggccctggtatgtgatgttccccttcctgtgtctttaagctctttctgaacaggagagaagccacaaactatcatatagtgtgatacgggctgtgatatagaatatctgggagtgctttgagaacctacaggaaagaggaggtcttctaatgaggtcataggcaatgcttccaagggagtttttcttcaaatggaggaaaaggaaaagggattctaggtgaagggaataggatgacccaaggtctaggagtttgaaaatgatggcacttgaagagatgcatacaagaatgctgggctgagggatttgcatttgccccataggtagtgaggagccaggagagatatgtgatattccaggttcctgtggatgaaccatccaggtgaagacatcagaatacagtaagagtcttaactttgactgcaggtctagaactcacaagggaagctggcttgataacatccccaaaggagagaatttacattgaaagaggaaggctgatgacaagacattagagaaaagcaatattttaataggtaggttgaagaaatgatatcagagaagccaggctttgccttgtgtttggaacaggcctgccagtagatgcctttatagtaaaagataaataacaataaatgaaatgcttttattgttaataaaaatgttgatgatgatgacaatgatagtagtagctaatacctattgagcacctactctgtactgggcacagctctaagaatttttcatttaatcctacaacaaccatatgagataaatagtactgttataatatcattttcgtttggcagataaggaaaccaagatgcagaggctttaaagtcagttgtccaaggtcacacggctaataagcaatgggtttaggacttcaacagtcttgcttcagagtttacactccctatctgctatcgtatcttttaaatagtctaacaactgtttgggagatgtcttatcaaaattgctctctcgaccgggtgcagtggttcacacctgtaatcccagcacgttgggaggccgaggcaggaggattgcttgagcccaggaatttgagaccagcctgggcaacatagtgagaccacttctgttaaaacaaattaaataaaaaagtgctctctccctgggagttcaagatttcagtgagctatgattggaccactgcactccagtctgggtggctgagggagaccttgtctctaaaaaaaaaaaaaaaaaaagctcgctcatacccaaagtcagggcaataaaggtttgagtggtcaaataaagggttgagtggtcaaagtcacataaaggtagagcttcaacagattatttttctttagattttcaagtcagcatgaggttgtctgatacaaacatcatagatgccatggttaaatggttctgtttctcagaaagccccctttcttcttataactgccccttcctttttaacagaccagcttagcctgctcagcatgagtgagccttgactattcaatattccacaggcccctatagggcctgttggtggccatggtagggggcatagtggacttgctgatccttgtgattattgagtatgaatttaagatgcacatggctgaggctggtggtggtgaaggtgcgaagatacagcagcatgaatccaggaggtggaggatgcagtgagccgagatcgcttcattacactccagcctggatgacagagtgagactccgtctcaaaaaaaaaaaaaaaaaaaaaagatttgcaagagttaccacctgctgctataagactgtaaagagcatggactaaaactgaatgggggtatggggtgccaccttggcaggagttgactgagcctcaaggtttgtttggtttttgatgattctaagctgacaatcatagggaaaaagaataagagtgcacattcagtttaaaaccaaaatatactcactatcagcatagcaggaatacagaataagaagtccacagggcctggaaaagtcagaaaagactttgtcaagggaaagagattacagctgaataggtggaggagaaggtagcttgatcaaaaatgtgctgttgggaatacatatggtaaaaacaaaagataaagagactggcccaagcatcaggtcagatgtgtggagaggaaggtggaaaataaagtttcataaataaagtgaggtcagattttatggggccttcaaaggagttcgatgttttagccatgggaaaaatggggcaggtgggaatgcttgaactaggaattaatgatgaaagaggtatttgaaggtcattaatcctaatatgttggattgcagagagactgcaggtaggaagggcagttagaaaactgtaattatcaagtgtttgagatgggttaaagcctgaaggaagatgtggatggaggactgagaagcaaggagcaagtccaatgggcagtatagttagatgaaacagaagggagactaaaagcaggttccctatcttgccttgaggattagaagactgaggacatcaccaatgaggtacttaggaagataagcctattttcattattagttagaaaactattttttttttctgaattgattctcctaagaattttatactgtattgttttcaagatggacatcattctgtctttgggatgtgtcttatacttctgctggccaggccgtaattgtgatatcattgcttttgattgtggatttgtaccagaacttgcagaatgggggccagtggctcagaagaaaatctcggagataatatgtgatctctctttgaggagatgctgtagtacctccctcttgatggcagagagaatgattttgtgtggagaagcacagaaactgaaaacaccaagtcacaatttatttagtagattccaactgcaaataaagaaagtttagggataccttaaccagtttatttctttgtaatgtaggtacaagaatatatattacaaaaaacaatctgggcaagtttaaaagcacattttaataaagataaaaaaattttaagtgataaagtattctttcatagtttaattggcctttttttcattcccagtacatatggcaatggggtatcttacaatcagtggcattttcaaataaataaggtaaaatatccaggacccactgcttgtttgaaatttgcttgctggagttaagagaagtgaacattttaaagattttttttttcctttagacagaaccttatttcatttgtgaaggctgactggacttggatgctgcccactagttaatttagtgtggcaaaaaataagaattctgtgtctgggcttcactgtctgcaaaaatgaatgcattattgtaaaatgtgcactaatctaaaaagtgtattgccttcctagaagtctgagtaatgtcttacacacataatcacactgcccgtcttcatatggacatgagtcctatagtgcttgagaaatggaaattatttgactgcatcagctagtgcatcgtacttctggttattttgaatttttgtaatcagatgctgctgaggctgtggccttttccccacctcctctctcatacatatatatgagtggtgtgttcagtgaaattttctgacatgaaaaagaagtccttaaaccaaaaataataataataataataacaataaagggaccactgtcttagaaaacattagttacccgttctctttccttctcaaggaggaatgacttcagtgcaattaacaatccgtgtctttgtgtcccagtttgatcttgcccagtttgaaacagcttgcactactagattggttcttgtaagtgttgaaagttcttaattacaaattaaatcttgatcctgtaacttggtagtaatcctaccatctatatataactttacgattttcagaggactttctttattgaaggcagtatgaagcaggaagggcaggcattgtgccactttacggttggggaaactgagacacagagagagtaaatgacttgtttgggtcatagcagttagtagtaaatgtcagaggagggatggaacctagattgggtgactccttgttcagtgctcttttatttttacttctcctgttcatattgaattgtttcagaggttggaattaggaacaaaataaacctatatcccattttctgagtcacagtccctcagacatgtgaaggcagcaatcatgagttgttgtttgttttccagccaaacatatctcttttccagactgtagtaacatagagaccccctcaaagatccctgatgtgacagaggtaaagacatttactagagtcagaggtcagctttcttacctgtgaattggccaaaggcatctattaggctatggaatgttaattatttcctgcatttgtctttggctagccttctctaaatgcaccataactcacctgaaaaactaccagatcatgttgtttttgagttaggtcaccagccctcatcaggatcttttaggcatgcctggaacgttggttgacaaaatccaatgaaatgaccacctatttttctctagccagtgagtcttaataggaggtgagcaatgggaacacctttaaaaaaaagatgcctgtgcctcatcatatagttactgaaccagaaatgaggggagaagatctcaaagatggatattatgatggtaaatacacttgggaaattctaatgtatccctgagataccactgtcatactactaaagcctaaaatgacatttaaaaaaatgctaccacctatttttattggctcatacaaatcttgtcatcatttgatattgtcatgacatccgccaaaattataactgacccaggtctccctactcatgtacatattcattcattcaacaagtattcattgagtacctggtacggtggataaggtagtgaataagacaaagtctatatcccacagagctcgtattctaatgggtaagaaggcagcaaataaataagcagaaacatctcttaggtagtggtaaatgctacaaagaaagatgaagctgggtgaggagatatagaataatgaatagggggttgcaagctaccaaaacagaatggtcaggaaggctgaggtggtgacatttgacagtcctaaataaagtgagggagcataggaagatccagggtgaacggtagtccaggcagagggaacagcaagtgtcaaagtcctgaggacaaatttggactgctagccttcatattagtttaaaatcattgtttgattttataagacatactagcctttcagaaatataggatataattgatcagggcctgaaggatgaactcattttcttctgttagctccaggtacttcttaacaatacttaatctacttttgctgtttgctctttgtagacaacaatgcagaagttggatgcatcttctatgacatttttggacttgtgttttaagagaggtacattgcctctttggggatctggaatcttcctgatagcgagtcagcaagattggtgggcccaacactggcacatgtctcagccaaattctctgtgtagcttctgacaaatgccaaactactggtaaatatccaccccccccccccccccactgaaagccaaggacaataatattctttattcattttctggctctgagtatcttttctttttgtttttgcagcctaacctttttgtcatctttggcatttttcacaggctccagctcattcctggctttagttgaacttttctgacattcttcatataggtcagtgctactcttatatttcattctttgttatatgattctccttccatcttttatgtggttgttttgaagcctgaacccctcagaaagtttcctctgtgaccacattattttctctggaagcctgctcttttatctcccctccgcagctgtttgcaagtgtgtgtatgtgtatgtgtgtgtgtgtgtgtgcctgtctgaaatgttttttagaggctcattcctttctgaggtaggtaggttcctatttagaacttctgagcctaacatcatgcttagtttacttctaattttaatgaacacttttattaagatcctgtcttagttcatgtgcactgctataacaaaataccttagactgggtaatataaagataatagaaatttgtttctcccagttctcaaggctcagaagttcaagatcaagatatgagcagattcagtgtctggtgagggctgttctctgcttccaaaatggtgccttgttgttttgtccttacatggtagaaggtggaagggtaaaggggcctacctcgatccctttagcccttttataaggcacgaattccatccaaaagagtagagcccccatggcttaaccacctcctaaaggccccacctcttaatactgttgcacggaggattaagtttcaacaagacttttggaggggacacaaactttcaaaccatggtatattctaaatttgtgtcttagttcatcctttctctttcacaaactccaggatgacataatttatttcctccaaaatttctgtcacaccagcatcaccttccagtgacttcttcttcttagaattatgatagaggagctgttaatcttcttttatagcatagcaattgagaccatgggaaaatctgggttcaagtccaacaccaccgcttactctctgggttggctgtaggcaaattgttatgaagactgaaatagtgcacaccaagtgctttaggaatgtgcttggtatatttttagtcctcaataattgctagtggttaccataatcattatcagcatcaatatcatgattctgagataagaaattattgtcaagctaagtcaagaatgaatagattcactaaacaagtatctggactgtcgacattcccctaactataatattgtaactctgtaaaaatatttctaatctatactcagaaaatatccttcacaccttctgttcctgagagcttcaatgtctttttatacagcagtttaactgtcctcaacttctcgccccaaacttacatattcaaacattcatcaagatgttcaacagaataaagggccttaccaatatcaaacaagcaccctttaaaagtgctctgtaaaattatcctgtaatttagaagacaggtagacgacgacatgaccacataaaatcctgttattgttaggaatgattactactccttcaaatacatacaaagtcacttttaagttggttaggcttttgaataaggagagaggaatggctcaaccagtcattttagaataaataattatcccatgctgatagagtggaatggaataatctgagagtgattgtgggagtttggacttcaatttgaaatatacaatgagttgttcatgttgaaaaactgaccaggatgaaagactgttggagttattagataattctcttccgatagaagctgagctaaaaataaacttcctgtttacttcctttcctttcatctaaagtcaagacgatgcatgtcaaagatggctgtgcttcattcattcattcattcattcattcattcagcagttatttattgagtatccactgtatatcaggtactgttctgggcattagaattacagaggtaaatgcaaggtgcctgccttcatggagtgtacactgtacaggaggggattagatttaagcaagagaataagccagaaagataatttcagatagtgttaaggcctgtgaagaaaagagaacaggccaatggaatgggtagtgcaaagagggaggaaatgagatacttagagacaagaatgatgataagtttcagatctggggagcattctctgaggggaaactggattttatattctatccagtgtggattgagaagccatttagaggttgcaagcaggagagtaacatgttctggatttcatctcacagcaattcccctgtgttcttaggataatgtattggaaataaatctgactggatgtgaggatgccagttaagagtctggtccaggagaaaaagggtggtggattggatgagagttggggaagtggggatggagaagagtgactagagtcaagatttattttgggttctgaagtgacaggaactcccaacagacacagctctgtggggtggtaaggtagagggatgtttctgacctgcctgtctggtggagggtggaaccctttgttgaaattagaaaggtagaggagctggctttttggagaggatagatatagagagtgaggaatgaaaaattaaagtcagggctttaaaagcctatgaggcatccacgtggaggtataaaatagtcagccggagggatagtcaaagcaagagggaaattggggaacattagcatgttcataatattaatactatgggaataggggagatcaacaaggaagaacgtagagagagaagaaaagaggacccaggacaaagccctggagaaattaattagtgggtagagaaagaggatgttgaagactgaaaaggaacagcagaggagttgggaaaaccaggcagatattttattgctaaatccaagagaagagctttcagaagttctgaaagttgtccaccatgtgaagttctactgggagattaagaaccggagagcaggaaaggcccatcatagtggccagatggaagtcattgtgctgtaagcaaaagtgttttgagtggggtgtaggtgggtggagaaaagattacagggagtgagagagtgaatgggacgtgaggaagcagatggagatggtgagtgcacatagtttttcaaagaagctgtgaatgggcggaacctggaggggatatgagtcatcacagaaatattagacatttctgagatggcacctgaaagaaaagttgacctgggagaggactggctggcatatagtaattactctggggtttaaagggtaggaatggcttgaggttaaggtctctgacctctttttagcttaggacaatctctcttcctcttttgttcctcccaagaggacgttgtttgagcatccatccatgactgaaacttgcctgtccttgtacattttagtaacatgagccaataaatttgcttatatttttatagcttaagatgtttgcaatagagtctttttattgtctatatggtacatatgtctgtatctatgtgatacatggctacataatcatataaatatattgtctacatggagtttctcagaattaagaaaaagcacaattactctgtagttcaccctaatagttatctaaactaaggaaagggggaataaatgaaaaaaagtaacattttatcataatgttgtttttagatagcatatatagcatttactttaccagttcattgtaagttggcaaacatttagaacttgaaatgaaatcagagctcatctggtttagtttcattgagtagaggaaatggaagcctaaagggagtgaatgacccatggaaggaaagaacctaggacctggctttcaacctaggaaccagagctttggagtaacacagacctgggtttgagttctgcctctgccacccatacccttgaaactctgggtgaattatttagctgctctgtgtttattttctaatccataaaatgaaattataagacattgatcttgtagttatgaggcatatatgagattgcaaattaactagcaaggcgtctagcacatagaaatcccttgatcagtgttaaatctgtagtgtcccaaaaccttgaatgaattagtagtaagctgaaaaacatgaagatcatcctagtatataaaaatcatactttcctctcttgtcttcttactgttagtttttgggtaaaccagtaattccatttttcaacaaattatttggataattattgattcatataaagttataagaaataacagaaagaacttgtgtacagtttcccccaatggtaacattttgaaaaacttaataaaatatcactcaataatttgatgttatgaacaacaaatattttactggtgctaatatctattaaaacatcagaaaattcaattttatgtaatttgggactaaagcaatatcctgaatttcagtatctgttggaaccattagacaaatggatctagtgccacagacagctgactttgctctgacttggtgaccttggccaaggcacttaatttttatgctctagagctaattataaattgggacaaaagtactcatctctgcttaattcaggggagtgttccagattaattcgatactgtgcataggtatcccctggctatctctcctgccacctttctttatatactgtctatgttttccttttccttctttgccaacccataatgattttctcagttttcaaagcacaccatgttttatctcgtttctatacattttctaatgctgttcctccatgtctatcttattcccttcctaccctgcctcccaatctatacatacacttattcttcctcctcttctttccttccacacccccccccaacttctacttaatttttgaaatcacaacttttacaaaatcttcaggggaagctctgcataacccccagaccagattaggtcccagtggtgtgttcccttagcatcctgggcctccattcacagcactttaccccatgtccttattgtgctttgtctagtgtttgtttttaccagtatgtgaagtgagggcagggagaagattgccttattcaccacttcattgtacttatcacagtgtctgccacagagtggatgcccagtaaatactcattgaatgagtgaatgaatacatttaataaacatacacttgcttttttggaaggaaacgctgtgcagatcaggtggaactgtgggtggtatttctatttagtatgtgactcatctatattgaaggctgttaaatgtttaaagtgtatctttgtatggtagtttggttttccttatttctttcttttgttttcatgtcagaattactgtgtaattatgtcttgcaaaacacctcaaatggtggccaagataattttttttttttttgaggtggagtctcactctgtcactcaggctggagcgcagtggtgcaatctcggctcactgcaagctccgcctcccgggttcacgccattctcctgactcagcctcccgagtagctgggactacaggtgcccaccaccacgcctggctaattttttgtatttttagtagagacggggtttcaccgtgttagccaggatggtctcgatctcctgacctcatgatccgcctgcctcggcctcccaaagtgctgggattacaggcgtgagccaagatgaattttaatagggaagacaaacccaaaatagagatgaatgtttactgtggtgcattaaagcattaaagagttgtgaatgtgaagctctccccagtctttagtaacatcaagttatcttggtacaggaagcaaatagccacttctcattttgcctcaggtggtgaaaaacttcccattttaggccagttgagattgtatgtgctgtatggctatgaatgccaaatatgagtcttaaactccaaatatgtggctgagctaaaagtaatgttaaattgtactgtctgctttggtgtcttataatgacttaaaataatcaaagtaagaagaaatttttgtacctatgtcaactgagatttcatttgttttttttctttttcttcctgtagattaggacttataaatgttccccttcagagtactagccttgatttatcccattgttcctgccttttgctttctctgtctctggtgttgggatagcccaataaaaccaactttcttctatactcagcaattgcattgggagggaggagcagagacttttccttgtttcatttctagtcactaagagggtattttgagccttgaggtgtatatatcagagatcctagatacctagatcctatagttggtttactatcagaatcaccaggcaaacttttaaaaaaagtgcagattctgggacccatgcccaaaaattcttattcaataagtttagggtgggactgaaaatcaaactcttttgatgatactgatgtataaccaagtttggaaactactgtttgggaatcccaaatgcttgaaaccctttgtgagtctttggtgtctttgggctaaaattccaaaccttgagcatggtcctttgtggtctgacttctcctggtccattgctccagcttcttttctgcacgcgaccccctcacactcttctactgagccatggtaactacctgtaggttactgattgctcaatggattttcttaacttttggacatggtggaacatgttttgccccctccatgtcctgggtaattcctgttgtcttttggacttctctcacctactctgatagagctgggcttgtctgggctctcctggtgccttatctcttccctttcttttcctacttatcacactgtattgatttgtcctgcacatagtgggaataaatagatagttatgaatggaataagttgcttgctcagttttctgtctttcctactgtattatgagctcctttaaataagacctgcatcttttccactttgtaggcctcgtgcacgtgttagcatgtggagagcacttaacaaatcatagttaaacatgtaaattaataactgatattgaaaataaaagaatcctgtcctttgggtaaaagatcctgcagtagttaatgttctgagctggaaaacatttgcctattacaatagacatgtattttactagaatagaaaagaacctgggccataaacagtaattgagattgggaatattaatagaaaaacagagaaacatacagttaaattgttctgtatgtattttcaagtgttttattttattttcatataggtaataccatcgtatgttacaaattttaaagataaaatagtatacagggaagaaagagtctccttcctgcctcatttctcagccaccaatttctccaacccagaggcagtcaacgttttagttttatacctttcacaagacgaatggtaacataggctgcaggctgtctgtttgcttttttacttactggtttgtcttactggcaaacatctatataaatgagtgagtacacaaggagattctttttatctctttcattgtttcaaagtattccactctatggatatattccaattcattttactagtccattattgatggatttttaggtgaccgttttaaattccatatctgtgaattcattttttcacccatgtcattttgcgcatgcacatgtatatgtaggaaaatttttagagctatattttctaggtcattgaatgtgtgctttgtaatattaccaaactgccaaaatggggattatatcaattgttctgttaattgtcaccaccaacctcaaatacctgggaccttgtgggctccggatcaattgttctgttaattgtcaccaccagcctcaaatacctgggaccttgtgggctcgggccatcaagcagatggtctttcagactgtgcaatgtattctgtaatgtgtacatttggttgagatgagttgaaagtatttgagagtacctggaactctgaagctacctcagctacctgaagcaaccattgaggctgaattttcagaatgttagtgtttatctattaaattaatcgtttatttagggatatttagttaataaataaaataataaaatgtaaacattttctcattggagttttatcagtatttctgccattgatccttggaaaggggacttatatatgattagagtcaggaatttggaaatcataggaagtaacagcaaagttgacagttgactgaaataattaaaagaaggtctaggaggacatggttcttccttgtacacctactggtcatgcccaatgaggagagtcattcctcctatgctttccattttgttgaaggatcataacaggctgcactttctgatagaatttcacatagtgctggagccaggttcaccatcattttctttattttggtttgcatttctgtcttgaggatctaaatttttttcttaggtaacttttctggcatcagaaaattttctcaggcatacattttacctgaaatacttattatgaacaatgaatattaatcattctattgagactggcagaacctaggatcatgaacaccacactttaaatgtgcttttattttaagtaagagtcatttttttctgggatttttaaaattgttgataaaaatttaggaaattcagaactatattttgaaaaggaaagaaaatgtttctacctttatcatatgaatgcagaaattattgatatttggtatgttttctttgatcttgattatatagatttcttcacattcttaaacacttatactgtgcaatgtatgtagcatcctgaattttcaactatatgaaaattacatattttttcaggttaaaaattattttaaatgattttaatgagatattaatattctatattatgcatataacataacatatttaaccattctcatattgtgggatatttgtgtttctatttttagctcttttaaaatgtgctgcagctaataacttttctgtgaatgttagtctatgactatcttgctatgcatattgcaagtggaaataccagatcaaagggtatcaatattttttaaactctagatacaaaaatgccaagatgcttccagagtaagactctaatttatacctccatcatcaatttatgaagttgtccatatcatatattcttttaactttgtcccccattttttaaaaacatgcacaattatatcttcttgtttacattttaaacattattattagtgaagtagagtattttaaaagtttgttactcatttttctttccctttttgttaaatatctatccctgcctatccttttgtatttctgtctttaggagacttgctgctttttcccagagattttaatgttctttctatataaactatatttcaatggtcacagatattttctccaggaaattccagcttttttgccttttaattttctcagactgggtaaatttaagaatttatttatatgaagtctactaatcttttactttgtgaattctttctttgcttttgtgttgggaaatcctttctatattcaaagtgatgacaaatattcatccatattttctcctattttaaaaataatttcattaaaggataagttcttaaaggagtaattctataatgtatcaggtggtgggaaatgcagagaagcaaagtgaatcaagtagggggtatgtgaagtgtgggctgtgaaggaaggcctcgcttaccagatgcacctgaccagagacctgtggggggaggggagggagacaagccaacgtacctgatgctccaagcagagggatcagcaaatgtaaaggtccttagtgggagtatgctcagctcaagggctatcaggaaggcctgtgttgggggagcagaatgagtgcttgggagagagcaggtggaaatgaggcctgaatttcagaataggccgggggcaggagcattctagcctctcataaaccattttgggtgcttgggtttttactcttaatgacacaggaatcattgcaaagacttaaataggggagtgacctgacatgacttacttttaaaaaggattactttaactgcttgagaaagcatagatatctaaaagaaaatgtccaggcacagggatcctatgtataccctccttccttttgaaatttgtgctttcttgcttataaacttgctataatctatacctaatctattaaaaacatatttcaaataaataagaaagagatggatgtagcagttcagttgtgttcagatgtatgtaacaaaccctgctgcagaggttgaatccagtggggctttatttttctctcatcacaggaaacctggaggaagacaattcaggactagttcagcagctcaaggaaggcctccaggatacaggcttcttctactgtcctaaacatgtatgtggctatcatcctcatgttgacaagattgatgctttcctccagacaccacattctgcatcctaggcaggaggaaggagatggtcagaagacagctgaaactgtcttttcactaggaaacaaaccattttcctggatcctcagtagtaggcttctgattacttcatggccagaactgggtcataccactattccttgtgggcacgttgctgccttgaataccagctataccttcttactaaggaagatggaactaacagtgtttgtgataatggatagcctgtagaaaaatggatatagatgagtctcaaaataaaaatatacaaatatacatgtcctagtcaatatacataaaaattacaaaatctgtaatattccaaaacgcaaactaaaactgtcagttaccactttgtccgtcatgttggcaatttaaataaatcgataacactcaaagttagcaagaataggtaaaatgggaatgttttatggcgccagaggtataaccttcctgggaacaatttaatcattcatgtggtgtgtatgtaagtgtatcttattgagggtttgctttgcatttccctgatgactaatgaagtagaggacctttgtacaactttctaaccatttgaatttcccctttgatgagctgcctgttcaagtctcttgaccatttttctacttaattataatctttttatataaatatgaagaggttgtttatattttctagatacaagccatttgtctggaatatgcacggcaaacatcttctcctaataagtagcttgccttttcaaagctctcttaataatttattttgtgaacagaagtttttaatattatataatttaccattcttttattgttaagtacattgtatgtcctgtttaagaaatatttccttactccaacttcatgaagatattttctaatataatgttctagagatttgtttttaccttcatatttattaaaaagactgtcctctacaattacttagtaatattacctttgccctaatttgaatgttttcatatgcattggtttctttttgagcttttgcttctgttctattggtctatttgtcaatcactgcacctgtaccactctctcttagttaccatagtttttaaataacttttggtatccaaaatttagcaggttcttccccatttttttcctgttcagaacctataaagtctttcatttacctttactttagaaattacagcatacttccgtgacctattaacttccaatgttgactgaagtatgcataaatgttttacgtgtatatttatcaaaggctaaaggtagtatctctgtcctcttcccaaataacgcaaggatctaaataccatttaactacaatcttcccattcttacatataatattacaattgttcagtattttacttatacctgctttttgatactccccaaataaaccattattactattttgttgttgtttttgtagccagtcagtagttctaggtagacttaccaacatgacaaccagtttatttatgtattattgtttttgcattttccatgttccttccggattctgtctggcttctaagaaggagcatcttttatggacagttctgagtgataaaatctctctggcttactttctgaaaaatatctttattttgcttcattcatgaatatagtgttgctaagtatagaattctaaagtgatagttattttttcttagttcttagaagataatctttttggatgtccttaggagatattttttcatcgctttctgtcatcttctgtagctgatgaaagaagtctgtcaatgtaattatggtttccttgtcaataattgttttctctgtttgctttagctgtttcctcttttctttggaagagtgcagttttacttgttgtgttagctgtggtatgtttagaaatactagagacccgtgttttccttctattatggaaagttttcaaccattactttgaatattctctcccttattctctcctcttttatttttagaatttatgtatacacagcattgagtattctgtgcctcatgtttcttaatgaatctttcatattttttatttcttcatttctccatgctgcattctgcatgattttcccaggtgtatcacctcccttattacctccctctttagttggtgtcttttttgttccttttcaaagcaaccttttattcccacagagttataaactagtcctttctactcattcactgtatttatctaatagtccattttagattttcctttcttcagttgtggggatacaaattattgtctatttttatctgcttaatcttcctcatcatgttccatttccttttgtgtttcatagcttttctttgtgagttcctcttctgcagaagttttgatagttgttgtttgtatgtacatttttgaggaggggattccatgtgtcctggcttctcatggactgggtggcattttgaggtctgtggcttcgtgtagggagactgaatgctagctttcacctcatgtggtcccaagttcatttttttttctcctcatacgctttatggcccaaacccctaagttctaaagtctaaatctaaagtccatttgaagtgcatcaattcctgcctcttggtcaggaatcaaatgccttctttgtttctatagctggggcattccatttcttagtttcaagcttggctttgtaatgctttctttgttgtatttgcatgcatcatttaagtgtgttagtaatgtcattttggtccatcgtatccttttttctcccctttatttgttttattgtcaataacttctactttctgcctttagctttaattattagttactaaaacaactttatgctaacatcagaggcttataaaaaatagaaaaatttccccataatcccatattgagtcaaaatgatctatttttattctctagatatccttcaaatctttattcatagggtgctgttgttacaatcatgccatatatttaattttgtgttataactctcttctggtttacattttgcccgtatttctttgtaatcttcaaattaccattttaatggctctatgatagcctcttgaattggtgtactctatcatacttacagagtttgttttctgtttttccttgtttatacaaatttccccagaatatttttgcatttgtagtgtttgcattattttctgcggctaaaatctcagaagagaggatgttaaattaaaaattcttaaccatgcattgccaatttgacctttgaatggcttttctcattttacagtgacattaggaataaattcacataccgacataaatttaatacctactgtgtgggaagttctgtgcattttgagtggcatagtgacaaataggacctgcttcaagtttcaaggaatttacagtgaaatcaaggatatagatatactatcaacttttataatattaggataaatggagcaagtggtacagtcaaaatctaatcaaagaaggaattttatagaagaacttgtatttcagccagggatagaggaaggggtggagtttccctgtacaaagggaggctggataatattccaggctgagagaacttaacggagaaacagccagaggtatgaaaaagtctacagtgcatttggaaactattgaaatcgatggtgtggctggaacaatgggtgagagaaaggagcttgtaggagacttgaagtactttgccgaaggattttggttataatcagccagaattttcatttctgccactaattgcaaatgctggtttgagaaaagcatgcactgtagattcatggtagcctgtgattggcagaacccaccagtctcctattttatagatgaaaacaatttctacggaaattaagaaaattttccaagtttacactaggagtgtatctgaaggcacacttgctccctttttcaagaaaaatttgtttagcatctgtttgtaactcagtagtaagtgcttggaggatagaaagtaaatacagtatagggtcaacttctgtagccagctgggggaaaaacaaatcaatatttgtaaaatggcaggataagacaatgatagaaatgagtaaagggtattttgagaacacagaagaggggaagctatttcagcttggcaagaaggatgaagagtggaagatggtggctctattaaatcataaaggatggataggaagaagcttgccaggtatacctcacccatggtgagggaagggagtttcagcctgagcaaaggcacggggtaggaatcagcatggtggatgtgggaatcagagcagcttcgcattgtggaagaatcacatgtgaggcagagagtggcaggatataaaaccagggctagatggtgtttgctatggtaagtagtatgggcttgatttttttagggctgctgaggatcttaaaatatttaagagggaaacttggcaggactttctgattgactggatgtgggagtaaggatgtgagggagagaagagcaaaatatgattctctggtagacttcttctttcttctctagttagtgagtttatcaagatttaagatggtagtggttttgtttcagcagaagccatgcagtgtggtgtcatgtggcagtggaaaaaccatcatggggcgtatggagactcaaatgttcctgaaatgcctgagagaacatccagggacatttggaggtcactgccagaggccatgcacattgtccagttttcagtggtttctcttcgttgctaagaagcttgaacatatacagaatgcatttaataatgttcagaaaaccttcttaagtggacaatctcaaatgtacaacagacaaagcagaatcagatatttttttggatggtatacctcattagtacagaataattacaacattaggtgataataatagcaactgatatttatggagtactcactgttttccatgtaggatgttaaatgctttacattcgtgatctgacttaatccttaccataatccctactcaaggaaacaaaggcacagagcatgtaattacttgcacacggtcactaactccaatgcaaaccctgaggcatgccaactccaaagccctcatttataaactccaggccatattgcctccccatgaagctgatacgcagacaagtgtggtgccactttgagattctctgggttcagctgtcaaacaatgacatcattaaattatccatgtaaaataagaagttgagtcctctatatccgctgtgtttgaggagtggcaggatgtgggatgaaagaaagaaattggattgcctctgaagccctctgaatttgtaatagaactacagcctcctcaaaccaaaattataaaataacctacatcactctgaaagaattttcttactaaatacgttaatgtgagaagacaaaaccaaaccaccaaagataatatttgaatattgataatattcaaacctcatttgaaatcaaaccactagaaccagaaaagaaaatgaaatgtgactatttaattcctcagcagagatatatgtatgaaaacataatttctatcactggtgataggagaatttgatattgaggacttcatgagttgggaagagcgatttcttaaatgaaggtgataaaagcctgtataaataatacagtcatgtattgcttaatgatggtgatatgtctgagaaatgcattgttagctgatttcatcactgtgggtacatgaaagactgcacttacacaagcttagctagtatagcccactacatagctagggtacatggtatggcctgttgctcctaggctgtaaacctgtacatgttactgtattgaatactgtaaaaaactttaacacagtggtatttttgtgtctaaacctagaaaatgtacagtaaaaatatgatattataattttatgggaccgccatcatatatgtggtccgtcattatgaggctcatgactgtctaagataaaactgtaggcctcataccaaatagagaagattggcaatatctatatgtatatgggtgtggattgtataattaatttctacttagtatcctttgcttcttagaaactttaagttccctcaatttaaaaaaatccttcttgatttcttttgctttttaaagatattttgatgtaaaagagcttttgtttttattttctttgcctggttctccactcaaaaatttaatgcctgtgtgacttagaattctcataagatttagctttctgtctttttacagatatgaagtggcatagtaggatttggggtccattttccctcagcttcctatttcttgccagtagcttcattgcaaaaccactctaccatctgccctgcttctttttctgcttccacccccagttccctcattttctaattactcccaacaggagtgactcaaacatatattggaagcaagattcccacagttgccaaataggagcagggaagtgccacgtactaggttttcacaaaagaagtcattatgtatctggatttttatctgccagagaagaagaggaatgcttgaggaagtcaagtctcagggcaaaaaagtaacataataaacaaattagagaatggcactttcacattaccatttctgttacattttgtggtagtctttcaggctgttcacaagtatatggctcccttccttttttgggctatagtacagtatcgttccgtgctagtatagttcggtccaggctcttctgcactccactgaactcggatatggccatatgacttgacttgttttagccagttaaatgtgagtggcagtgacaggtgtcacttctgagaagaagctttaaaagccagtggctttaagagcatattttgatgtcttatttttgacagtagttgctctatcaacttgagtctttaagtgacagtgtgaacagagcaccctccccataccagctgactcataatggccaggtgacatgggcaagaaagaagcctttgttgttttaagtcactgagatttggggagtaatgttatggtggcagaatctagtctgtcctgactaatacactgaaacagttttagcatgtataatctcatgtagttaagagattcaaatcataattcctccgatacatggatcaaagataatagaagacaaacatttaaagtgtttttaaagcattcactcaaaaagaatgtattttgtttgcatccatatagtagcatctaacctatcgcacaatagttttgtgttatataatagatctgccactgcttcagagcctctgtgagggcagagataaggtctcgttcttttttaatcctggcacctggcactaggtgtggcatttagtgggtacttaatactattagattagtgaagaggactgaaaactgcctggcacatgagaggtactgaataaatatttgtacagatattaatgttgttaatatctgtaccaaatattcagcacctgtcattaaaattcatccatcacctatcataaaattaattagcattggaaattctctttgtacaatcacaaataattgtacaaagtgcattttcaacatttcaaccccttggtagctactgggctaatttttcaggcacaaagaagcagtttaatgtggaccctcaagttgtattttttcctgccaccagggcctttaaagccttacttaaggaagtaccattatttcaactttggcaggagggatgatacatttgcatgtaaactggtttggagtttgatgctgagcttgcatcgtgaccacctttccactggacattataattagggggaaattctgatgctaaagcttggccagtgtatagttattaattcaaagttgattatctcaccagggattgtgaagagtttcatttggttttaaaactgcctaatacatgttattctaaggtgttgggaaattatcagtgtggctgctttgtgtgctctccttggtccagtgaaagcttcaccttactccttggcccctgccagctcctattttatctgtttcttcccaggaaggatttcaggcatctgggaacatacatgtacacaaggttgttgtcatcaggtccctgcttgcctacttccttcttcctaaatttagattctctaaatggagcttactttcctatgtctctgtcctgtctaagcagtttctccattacccaaaatgcaattccccaggttcattaattcattctcaaatatctcttaagagcctcctctataccaggcattgttcaaagccttgtgagtacagctttcctggaacttctatttcattggaagagacagatgataaataaaaaagtaaatacagtcatgcatcacttaacgatgagaatattttctgagaaatgcattgttaagtgattttatcattgtatgactatcacagtgtgtccagagttcgttccttctggtgcatttgtgttctcgctgacttcaagaatggggccgcggaccttcgcggtgagtgttacagctcttaaagatggcacagacccaaagagtgagcaacagcaagatttattgtgaagagcgaaagaacaaagcttccacagcatggaaggggacctgagagagttgccgctgctggcttgggtggccagcttttattcccttatttatcaccacccatgtcctgctgattggtccgttttagagagcactgattggttgattttacagagcattgattggcccattttacaaacctctagctagctacagagcactgattggtgcattttacaaacctcttgtaagacaggaaagttctccaagtccccattcgaccaggatgtccagctggcttcacctctcaacagtgtgtacttaaacctagatggtatagcctactatgcaccttgggtatgtgatatggtctattgctcctaggctgcaaacctgtacagcatgttactgtactgaatagtgtaggcaattgtaacacagtgataagtatttgtgtatctaaacatatctaaacatagaaaaggtacagtaaaaatacagtataaaagataaaaaatggtacacttgtataggacatttaccatgaatgaagcctgcggaactggaaattgctcttgatgaatcagtttgtgagtagtaaatgaatatgaaggcctaggacattaccatatactactgtagactttataaacatcctacatttagtctacactaaggttaaatttttttgtttcttcactgttaaattaaccttagcttactctttttgctgtataaacttatttaaaaaatgtttttgactcttttgtaataatatttcacttaaacacacattgcacaggtgtacaaaagtatttcctttcattgcattcttattctataagtttttttctattttgaatttttgttctttaaactttctttgttaagaactaagatacaaactcacacattagcgtaggcctacacagggtgaggaacattagtatcactgtcttccatctccacatcttgtcccactggaaggtcttcaggggcaataacatgcatggagctgtcatccatgataacaatgccttctggaatacttcttgaaggacctgcctgaagctgctttctagttaacttttaaatttaatttaattttaatttttaaatttgtattcttttagagccacggggtctcattatgttgcccaagctggcctcaaacacctgggctcaagcgatcctctcacctcagcctctggagtagcagctggaactataggcatgtgccactgcacccagttaaatttttaaataaatagaaggagtatactctaaaataacaataaaaagtgtagtacagtaaatacataaaccagtaacatagttttttattatccttattattattatttgagacggattttgctttgttgcccaggctggagtgcagtggtgcaatctcagctcactgcaatctccgcctcccaggttcaagtgattctcttgcctcagcctcataagtagctaggattacaggcgcctgccaccatgcccagctaatttttgtatttttagtagagatgggatttcgccatgttgaccaggctggtctcaaactcctgacctcaggtgatttgcccacctcagcctcccaaagtgctgggattacaggcgtgagccactgtgcctggcctttattatcattattaagtattatatactggacataattgtgtgtgctacacttttatgcaactggcagcacagtaggtttgttcacatcagtatcactgcaaacatgtgagtaatgcattgccctatgacattataatggctatgacatcactaggtaataggaattttccacttcggtataatgtcatgggatcaccatcatatatgttgtccatcattgactgaaacgtcattatgcagtgcatgactgtatacggtaagtcaggcagctgtaagtgctacagtgaataataaagagggaagaggtattatgtttgtggaagtagggtgggacagtgttactaatcatttcaggacaggaaaagcctaactgataaggtgttaggtaaacagctgaaaccttaaggaagtgatgaagaaagccacgagcacatggggtgaagaggagctagaaaggttcccaacagaggggacagcaggagctgaggcaggagcatgcttggcaacttcaaagaagaggaagcaggccagagtaattggggatcagagcaggatgggctgaagtggattatacagatcttgtagggctttttggtcagtgttatttagtctttagcctgagtaaggtaggaagctgttgtgagtttttgagcagagggtgccttaagaggatctggctgatacggtaagaactggtcaccagaacagaaaaagggtgaccagttagacatctgttagataataattcaggcatgaaatgaaggcattgactttcaatactcagctcaagtgttaactctaactaggaagcctctcctaactcccctaggctgagttgagtctacctcttttgagtttctgtaacaatcttactcttgaaatgaaggctttcggctgagttcacttatatttggaagctgactatatagttgagaggtctctgaattaatttacaattagaataaagtttatttatagataagtaaaagggctaacttagtatattatgtattatatattcattatgtacaaatatacgtgcattatattattaaaacttaacaataattgtggcaattacttaaaactttgtccattacaaagatttttgggacaggattattttgataaggtttaaaattgccagaaatggtaaaataaaaagcagagtgactcatgatgggttttattattgttttcaaattctttataaactaccccgtaatgcctatacccacagtggactgatctcactgccttgtcttgatatatcactgatggtaagatcttttattcaaagtgccttgagcaaaagaaaattccttcaggcacggtttgatccagggagctcgaacagtgtcatcagagctcctccaaattattccaatctgttttccatctgttttcctctgggttggcttccttctacagcaggctgtctacttttagttgcaagatgactgacagtgactccagccatccaaatgcctttctccaggtcactgcagcagaagtcccaaaatatgactctaacaatgtcgtatgcccgtacttgaaccaatcacagtggccacaggaatgcaatattctaattggcctttgaaagtcaatattctaattctgacaggcttgggtcacttgcccccatttggagctgggtatggggtaggtccattttacacgaattacatggaagtagaggaggaaaggcaggcccccaagaaaaattaagattgctgttagcagaaaaagaggagatagatatgggatattcaagctacatccatgtactacaagcaattatttctgattcctatccagaattctgtcctaaaagtgttcccacttggtaaatcaggtacatagatatgaagttctcacccccgcattgattgccactgtagcttcctcttcctttcgtaggattctcagcaggaatcccctcttcagcctctcactcacacacccacacacagacacctttcatcataagccctgcttttgcctcaaggagctttcatattgtgtgcgttcagtaaagcaaaaaataattcctcacaaaatcggcattttttattatactttaagttctgagatacatgtgcagaacgtgcaggtttgttacatagatatacatgcgccatggtggtttgctgcacccatcaacccgtcatctacattttaggtatttctcctaatgctatccctcccctaacccccgacaccctgacaggccccagtgtgtgatgttcccctccttgtgtccatgtgtcctcattgttcaactcccacttatgagtgagaacatgcagtgtttggttttctgttcctgtgttagtttgctgagaatggttttcagcttcatccatggtgtatatgtgccacattttctttatccaggctatcattgatgggcatttgggttagttccaagtctttgctatcgtgaatagtgctgcaataaacatatgtgtgcatgtgtctttatagtagaatgatttataatcctttaggtacatacccagtaatgggattgctgggtcaaatggtatttctgattctagatccttgaggaatcgccacactgtcttccacaatggttgaactaatttacactcctgccaacagtgtaaaagtgtctatatttctccgaaaagcaatgacaacaaaagccaaagttgacaaatgggatctaattaaaccaaagaacttctgcacagctaaagaaactatcatcagagtgagcaggcaacctacagaatggaagaaaatttttgcaatctatccatctgacaaagggctaatatctataatctacaagaaacttaaacaaatttatgagaaaaaaacaaccccatcaaaaagtgggcgaaggatatgaacagacacatctcaaaaggacatttatgcggccaacaaacatatgaaaaaaagctcatcatcactggtcattagagaaatgcaaatcaaaagcacaatgagatatcatctcatgccagttagaatggtgatcattaaaaagtcaggaaacaaaatttgcattttattttaccctgttgatgctgtataaatccaggtctcagcaggaaacagatggaacactcaaattaggataattcaagaagagtataataaagggactatttgcaaaggtgtgggtatcgtgtaagaaaagcacagggacattacagcgctgtgggactagtaaatgaagctctgtttatctcccccaggtctgaaaaaggttgggggaggagatagccattgccagagctaccagacttggtggggagacacagccagctgtggatgatttcataggaaagccactggggtagtaatactctgacatctctctcccttagctttcctgtcttctacaagtgcctttcattggcagaagccacacggcaggggagcccattgacagagtccattccagtcagcctctagagtggagggcagggttgacaagagaggagagaggatacggaggggaagtggatgttatccagaagagtccatctctttgtcctctcagtatatgtgcttatctttaagtgaaaagttcctgttcccttcacagaggacacaggaagtctcatcgctatggctctatgttggataattttactttaatcatactgcctcttcaaagcagtggcaggggaataaaggaataatggaaggcatagcacctgcagttcttgattctgaagcataaggtgtctactctcaccatgactccacgttccccttaccttctccagctcctcagctggatgtggctggatggcggtgacccaaaccttcgttctgcagaatctcagtgccacccctgcccccacctttttggatagcttcagtgttatttggttccaagcatggtcctcaatgttgtatcagcaacccagctgctccctggtagttgggcttactctgtaagtccttttctctgtgttagttcagtaggatgatgaatccaaactacctaggggctgtctttgcttccaacttaatggaattgtggctgtgtttcctgatagaagcatttctacattaaacatgaggacttccaaggtcatgtggtcaagctcaaggtcatagagatgagaagcaaaaattctgtaagtggatagttagtgattagggttagagttaggataagaacactgatacctctccttgttcctggtcctgtgcattctggctgaggaggagatacgttatacaaaatactgtttatgtaaaatgctttttgaatgcatatactaaattctgtgggacagcagcccaactttgtagaagttgtctcctctcctagctcccactgtaattgagcctttgctctagacactaacaagacagagaggcctgatacagtaaaggtgtactgttatccgcagtaagcaaatggatcccgattttctttactgatggggctggaggtgggaggtgagggcatgagtacattagtctggtcagtagctacataccaggcaccacactctgtgttgattgctgcaataaaaatatcacttctggagccatagttgtgattggcaatatcacttggttcagtttatgactcttgcttaacggtcttcatgtcttcagaccatcttgtatcagtcaaggttctccagagaaccagaatcagtatattgcccagatgagcattaagcaaactggagacccaggagagccaccagtggtatattttcagttcatgtccaaaggcctgagcagtaggcgagccaatggaataaggtctagcctgagtctgagtccaaaggcaggagaaaactgatgccccagctcaaagacagtcgggtgtagagagttagttcttcattattcagtccctttggtctattcagtgtttcagtgggttaaagaaggcctgtagaggacaaactgctttactcggtctacccattccaatgttagtctcatccagaaaaactctctctctgtctctctctctctcacacacacacacacacacacactcagaatgacgtttaaccaaatatatggacaccccatggcccagtcaggttgacacataaaattaaccagcacacatctgtctgactgttgctgaattaaatgaagataacataggaattatgcctacattctttgagtcctggatagtagcaccaagctctgcaattcctccaggtgtgtggctttgttcttagtttattctacagggaggggcagttttaggagtgtcattttgcactctttcattgccctcatgcaatgaatcagtaaaccaatgtagtgttttgccagttgataaatatatctgcttctactatacaatatggtactggggaaataacatcaggatggatctctggtgccgttggacccactctgagatggactcaggccaagactctgtcacctgtctccacaagcctcccatttgaatggtgtaccacagcaatatttcagagagcaacttaagtctagacccacagctaacctggggaaagcctgagcctttctttcttcagtgcacagtcaccctggaaacagccataggatgctatgtgggaggcttgaagggcgagtcacagcatgcacctgaggcagcattgttgggtccctctcaaagacacccagccactttctctattgagaggctctaggtcagtggaacttggtgagaggctaaaatccttactatggtgactgcattaggtcccagcccacgagagtagaattttgtctcttctatatgccaagtagcaccttagtaggtggtccatctatttttgtttctatttctgagattatttagtcaccaccacagatccctgtggaataagattttgattaccactcatccctgtggtttgtttcatttaccttatttctgatagttaaatgccgccaaccagttggtctcccttactcttgggttcctttatctccattgataacaaagacactgattccatttcagccacccccatcccattttccaggctgcagaagaaagccaccacacccagggcagccaccacaagctttccaagaatactcctcctcccccttgtgggagttgtggttagagaatggctgttgctcatcctaggtccacttcaccactcccatttctgagacttcagatttcttcctctccagcagggatcagctcaggaccagatcataaatattttaggctttgtgagccaagaggcaaaattcaacaggtattcttgccaaaggctgatagttttgtttgtttgtttaacatttaaaaattgtaaaaaccattcttacctttcaggccatacagaaacagacagcaggccagatgtggcccacagtctgtagtttgccaacccccttctccacaggatgccacagaagttcagttgaaccacataaacacagactacccttgagtccaggctttaattgtccaattaggtagattactgatgccactccctggtactcaacctgaaacactgaatcctaaatccggggtgagtatatcccatgagtgaatttaatgagatcaagccttatgttttgtcctcattgatccaatgcctttcgaaactcataccttctctcctggctcctgccaatatagactggtgtgaggttctataaatcttatgaaagatttcttatgtaagggatgtaggctgtctcatatttctccctctgagctgtgcttggacctgagtcttagatcaagaggcagtgagaggtgataggaatgagtcctgagggaatgaccagcaggttattatgcatggaaaagctgttcttcttagacagggaggacaaatctgtccccatgggcaagaagattttgtgggttcgaagttttcatatttgtccgtgtctgcccaaatgatcgcaatccagttatcagggtcacattcccttgatatgagacccctcgtatgagctgatcatgtacttggtgctgcagctctgcaacttttgttaggctctgagctttgtcctcagccatatctgccgtgggactctggaaaatgaggggttgctgcagttataccatctgaatagctacagggactttctgattttttctatgcgtgctctcaattgtacattcagagatttcagtttctcattttccttttgtacaccttctaaggctgtgagaagaagccaagagactcaacagtctttatagtcactgctgtaaccatagcaattaagtgcctctgccactgacctcccagcatctccccttccacctgcatttcatctcctaccactgctagagacaacttgaataactgatgtcaccacttgtcctggattatttgttttctgttttttcctggcaaagtggttctacctgtgtttctcaacaacatgatcaatctaatcctggaatcccacttcaggatctcaatagaaaacagaatgctcaaattgggatagttgaggaaaaattcatgaagggttatagaggcctaacccagtgatgatgaggagcagttactgggacttggagacaggcataactgtggaaagggttgctggaaagaagctgggatcctaagttaagcaacacagtcatcacttttgacattttcctctaatattttgtgcagttatgcagcaaattgtatttcaaaggtaaaccttatttaaaaccccatagcatcatatgactcctatttttaaaagtctgcaaaataattacatccctttctttagttatccttatcatattctacagctgatggaattcagttaagcagcattggttgtctattcaaaactaaattaatatagtgaggatttattttaagttttcattatttttttttacatcatagcccttgaaacatgacagtttgtcattccatgtatttgcaggatttttttttaagaaaaccatcctgattctctattttcttactttcaaataccatcacagtataatttattttaatcccttatcctgtgggtcacttttatctgatgattgctttcatttaaattttaattggggtttgaaaactctttttatggactggaggacaataagtaaacttttgtagtatggcagggtgatctatagtccaggaaatcaatatctaggcttctatatgcaggagctgttcaaggcaggaactattttcttatttatttttgaagtcacattagagttccaaatgtataattatacaggattccataagttaatagtataggcttattggttttaaagaagtcttcttcttcacagtgatattttttcaggtattattgagatgtgtccttatttatctggagaatagatatacttattctctgccttcatttcgttattgctacctagtggtaggagatgacaaaaaacctcatctaataggtgtcacttatacctcttaacatcactatttccaaatattaattgttccttggaaatccttttactagggctgttcttgatggtctgtctgcattcatcactttgtgattactgagttttcatatcaccttaaatctttgatgagctgttcctcaaagaaagaaggtcatttatcatgtctgttttactgaaagaaggacaagatgagacaaagaggtattacataattcagtgtgcctatgaagctttctaggccgtattccaaaatagatagcagtttcttcaatcaaactctgtataagataaatgagatattgtttggtaagaaccccccaccccactttgtgccaaacttgttggcaccctgcagtttacagcatgaaagtcagcttctctgcacagtgatttttaagactgctaaaggcaatcagctgttcttagagctgtgccccaatgcactttatatgcccttctgttatagcactgagcacctggtggtttgtaaccttttacaagtctttttccttctgtagactgaatgccctgacagcaaggactgttaattattcaccattctgcatacactctgattgggtggcttacaaacaacagaaatttatctcttgcagttttggaggctgggaggtccaatatccaagcactgacagatttggtgtctggtgagggccagcttcctggttcatacatagccatcttctcactgcattctcacatggtgcaaaggatgagggagctctctggagtctcttttataagagcactaattccattcttggtttggggtgggggctctgcactcatgacctaatcacctcccaaaggtcctacctcctaatgtcatcacattgaggattaaactttcaacatatgaattttggagggtcataaacatttagtttataaaaaagggctgcttggtgtatcatggccactgaataaattttgagtagcaatcttacctggtatgccattgcatttatatatgattgccactaataactcaaattactgaatttatgttgtatcgatgatgctgttttcctagtcttagtattagtagccaaatggccttggattaactttctcaatattattcattcattcattcattcaacatttattgaataccttactaaatggcaagctctgaattaagctttgagaatccaagaagactaagactttgttcccacctttcccttcagcttccctttcctaagatagacataataaaacaattgcatcacaacatgatggatcctgtcatagtcagagtggaaatagaaggagattgagtgggacaggggagttgaaagatgcccagcagcccccagggagagtgaaaacgtgatctcaagatcagctttattttctgaccaattctcatataccaagtgtggtcaggaacatatatttatgtgtctaggtagccagttgcatttcattttatgaagctaagtgattatgatgattagctatgggattaacatacgttttcagctaagcaagtcattaaaaacaaatgcaagtacaattatctcctcctttagcttcagtaaattaacatgttatagtaagaaccttgttcatttgtatgatgctaggaaaaagccacacaaatgacctgctttttactttatatttcggcagctataattttgtaaaaatgggacatgttggccatctgaaaagcacttagttgtataacttctacaagtcattgaaagtaattatcacatcataatccaatgttttcctgaggttcccatgggaagtaaagtatattctatcctgatgtggtttggatgtatgtccctgtccaaatctcatgtagaattgtaatcccagtgttggaggaggggcctagtgggaggtgatttgatcatgggggcggatttcctccttgctgttcttgtgatagtgagttctcacaagatctggttgtttaaaagtgtgcagcacctccctcttgtctttcttcctccttctttggccacataagaccatgcctgcttcccttttgccttctgccatggttttaagtttcttgaggcctccccagccatgcttcctgtacaacctgtggaattgtgagtcaattaaaccttttttctttataaagtacctagtctcagttagttctttatagcaatgtgagaatagactaatacagcaaattggtactgggagtgggcatttctgcaaagatacctgaaaatgtggaagtgcctttggaactgggtaatgggcagaagttgaaagagtatggagggctcagaggaagacaactgggggaaagtttggaatttcctagaaacttgttaagttgttgtaaccaaaatgctgatagcaatatggtcaatgaggtccaggctggggaggtctcagatggaaatgagtaacttattgggaactggagcaaaggtcacttttgttatacactaggaaagaggttggaggtatcatgcccctgccctagagatctgtggaactttgaatttaagagtggtgatttagggtttctggttaaagaaatgtctaagcagcaaaacattgaagatgtggtgtggctgcttctagcagcccatatttatatttgtgagccaagaaatgacctggtactggaacttatatttaaaagggaagtagagtgtaaaaattttgaaaatatgccagcccagctatgtggtagagaagaaaaatccattttctggggaagaattcaagctggctgcagaaatttgcataagtgaaaaggagctgaatgttaatagccaagacaatggggaaaatgcctcaaaggcatttcagagcagctcctcccatcatagggtcagaggcctaggagggaagagtggttttgcggactgggcccagggccccgctgacctgcgctacctcaggacactgctccctgtgtcctagctgctccagctccagctgtggctaaaagggccctagatacatcttaggccactgctacggaaggtgccagccataagcgttggtagcttccacatggtgttaagccttcttgtgcacagagggcaagagttgaggcttgggaacctctgcctagatttcagaggatgtatggaaatggctggatgtccagccagcagtctgctgcaggggtggagtcctcatggagaacctctactagggcagtgtggagggaaaatgtgaggttggagtcccccacacagagtccttcactggggcactgccttgtggagctgtgagaagagggccactgtcctctggaacccagaatggtagatccactggcaacttgtaccatgtgcctggaaaagctgcaggcaatctataccaatccttggtagcagccatgggagctgatccctgtatagccacaggggcagagctgcctaaggccttgggagcctagcccttgcatcaggtggccaggatatgagacatgaagtcaaaggagattattttggagttttaagtttttttattttttatttttatttttttgagacagagtctcactctgctgcccaggctggaatgcagtggcatgatcttggctcactgcaacctctacctcctgggttcaagtgatgctcctgcctcaacctcccaagtagatggaattacaggtatgcaccaacctgcctggctaattttcatatttttagtagagacagggttttgccatgttggtcaggctggtctcaaactcctggcctcaagtcatctgcccgcctcagcctcccaaagttctgggattccatgcgtgagccaccacacccagccaggagttttaagctgccctgcttggttttgaacttgtatgggtcctgtagccccttagttttggctgatttctccttttgattgggtgtatttccccaatgcctgtaccctcattgtatcttgaaagtaactaacttgtttttgattttacaggctcctaggcagaagggacttgccttgtctcagatgagactttggaccatggagttttgaattaatgatgaaatgagtcaaggctttgaggaactgttgagaagggatgattgtattttgcaatgtgagaaggacatgagatttgggaggggccagaggtggaatatgtggtttgggttttgtgcctgcccacctcatgtcgaattgtaatcctcagtgttggaggagggacctggtgggaggtgactggatcatggcggtggattttccccttactgttcttgtgatagtgagtgagttctcgtgagatctggttgtttaaaagtgaaacccggggtacaccatccagacaggaagccatgaagagaaagggtaggtgatttcacgcaggaatgttctatgagccagggcagcatacatcacttctgaccagaactcagacacgtactacaagggagcctagaaatgtcgtctagctgtgtgtccagaggaaaagaaggaactgggtttggtgaataactaaccacaatgatgataaacttttaaaaattaatcacattatctataactgcccctaaactgcttcaaaattttcacaacagcctcattcacccaatttcctattgacaaatatttattgttctcctgtaatgtgtcagagacattgagccagagtggagacagtagacgtggtaaaaagttgatcagattactgatatattttaaaggtaaagtcaataggatttgctgatggactgaatctgggatataagagcaacagaggattcaagaatgactttcagattttgggcatgagcaactgggaggataaaggatgccatttattgaaatcagagcactgaggtagagaggtcattttgtgggttggggggtggggataacttaacagtttgctctggccatgtcaagtttgaaatacctcttagacatcctagtggagatgccaaagagtcagttgaataaacaaatcttaatttttaaacaaagtacaaccagagccagcttcatgagtgggcaacccatgcagtcccacagggctctcctacatggaaaggtcccatacttgatgtaatggtttactgttgcagtcttgaaatttttaataaattacttagtaagtgctccgtatttttatttttcgccaggccctacaaattatgtagcttgtcctgggaggaattctttttgaggcagtggaaacttgtaagtgtggggttctgaaggcaaggaaaagaaaaccttttgagaagaaagagattgtgagagatcaaggaatataaagaccaaaaaaaaaaaaaaaaaacagtgggaattatcaagatggaattgctagtgatgtcgacaagagccatgtccaagggtggagtgggggaggataaaaatcctgttggaatgagctgaaaagaggagagctgcctatggccacagtttccccctgcagggagcagggaaatgggatgatagctggaaggttgtgctgagtcaaagcatgtttttgaaaaatgagagaaattaaaaatgtttgtctgctgatgtgagggattcaggagagagggagaaactgatgatgcagtggagaaagggaagaattacagggaaagtacgtaagtcaaggacaatggaggacatgtggaggagctggctgtaagaatagtcatgtgattccatttcaaaagcagagaaggcagatttctcaagaccatgtattgaagagactatcctttctccacatatgttcttggaacctttgttggaaatcagttgaccataaatgcatgggtttatcactggattttctattcccttccattggttgatgtgcctgtttttatgccagtaccatactattttgattactttagctatgtaatatgttttgaaatcaaataatgtgatgcttctagctttgttctttttgcgcaagattgccttggttgttcgggatctaaaaaagtaagaaattttgtcatttgtgacaaaatggatgaacctggaggatattatgctaaatgaaataagccaggtactgaaagacaaatactgcatgatctcacttatatgtggaatattaaaaaataaaactcatagaagcagagagtagaatgatgattgccaggggctgagggtaggggacggataaaggagagctgttgttcaacgggcacaaagttttggtgagacaggaaggctaagttctggagatctattgtacagcatgatgactatagttaataataatatatggtatatttgaaaattgccaagagattagattttaaatgttataatcacaaaaaaagataagtgtatgaggtgctggatatactaattagcttgatttaatcattctataatatatgatattatatatatatatcaaatcatcacattttatagcataaatatatataatttttattttccaaatataccttaatttttaagaaacagagaaagcagagtctatgggttccagaaggttggcaatttggggttggttctagaccacgtgcttttttttttttcttaatggaatatgaggtgaggtcagcagctgaggtggtgggaggagtcatgagtttggtaagagtaacttcagagaactgaaaggttaatttactagaagatggtaagattgctgggcaatcctgtgctgagttgccatttgagattttgtgaatatccatttgctgtcaacatcgtcgagtgatgtttttttctccagcatctttcagctgctcaggtgcaagtacagagtagagggatagttgagtttagacatgattggttctgttatggctcttattttacagatgaagggactagggttcagagaagaaagtaacttgctagtaatggacagagtttgcacataaatcttctctgaccctcgactccaggctcttaagcagtatgtcatatttcagagctgttcttaatatcatggaataaaaagtgtagattctgcaaacttctatcccttcccctagtggcgagcaggtgaataagcaatactgtaatttgtatctcaactttttttttcctactagcattatctaaaaagggtatctcagctagttaccaaatcccagccttgggaatcacaaagcaatattgtgcattgaagatatgctcatgggatagaaaaagtatcactgagtttgatcaccatctctcctgcctgctggccatgtgacttgcagcatggttgtaagaatctgttcagcattaactgagcacctatggtatgccaagcagtaaggaagatactgagaagatattgatgaaactgaattttgtcctcctaagaattatagtccagggaattcagtgagatagtatatgcacaatgttgtgtccaacacagggtgggcacttaataggtgttaattctctttgccttctctatccatttgtcctcaagtacctgatgacacctcttggtgaaaatatcaacactcactgagatactaaatgagggccccactcatgtgtaaatatccaatgatgttaatatttaaaaattagttcccatccactgaatcagaatctcagcaactttgagtgaaggcaggacccttaactgagttgagtcttcctctacccataaaaatatactgtatataactttttcctgaagctattggaatgaatacaagttagcatgattgtctactggcaatactagaataatctccctaaggcgtgctgttttctggctggaagttattttattctgttgaaatgtatttttttaaatgaaaggggcatttccttttcctatattatttgctttcaaaaagcgaagagaattctttaaacatggcaaattaaccactggtgaatcttaaattttaccttctcaatgatgcatgttctgattcaccagtcaatatttatttctaagccttcagatctcaaaaaggtctatatggtacctgagttagtgcatctcaagtaaccaacccctgggaaggtgttttatttctgtaacacaaatgaggcaggattttatgcccctggaggggagatgtttgtcttttatctctatattggggtacctaatacaggaaagagtgttaaatgaataaaggaatggacccacagtggggaaaaggagcttgcttgatatcagtgtgtttgaatttattaccatgaatctcactttctaaaattgctagcactattaaagtttctgacagtgaagcaagccattggaacatgtttgtggtgtgaatattaggtgtattattatgcactcaatttagcttttttattttatataatttctctccaagtggaaatcatgttctaggtaaaggaacaagaaattaagcagtgtggaggttagattcaacttccactaatggagaagatgactttggataactattggctccagtttcatttggggattagggattggattagaatttgtaaatctaattgttgtttctctgtaaaattgggagaccctcagggttgagagcagatcttcctcttttgcatctatttcagcacctagcccagtgcattgtaaatgcttaataaatactagatgaattaaaagtgaagtattctatttattctttagagaaagatacacagacgtttttgccaaccagcagaaatgaaggcagcaaccacttctagtttatcttgtattcctagcatcaggcaaaatgatagggacatggtaggcatccaacaactgttaattggctcctccaatcacccttttttgtcatccttccacaggaatttattgaatgccttctaagtgtcagaaacttggtttatattaatgaaagaacacattccagaggagtagttttatttgtataggcaattacaaagtaatgggatacaggttataatagaagtatgtaaaatttcactgaagttcacagggaggagaacctcatctgctcgggagttggggaagacactccaggatgatgagggttgagctattgaaagaggaatgggatttgttaaagtggaccagggtttgagggtattagaacacactccagttagagaagatggcacacacatgttcttggagctgtgatatagcacagtacacattgtaggggtagtttagcatggctataggaagaagtgggtaacataggggaaggaggtatggacagaattgagaaacagggatgattctgggaggttattagaggtcagagtttgaagaacatctcaaaacaggaaatactgactggtatctgagcttctctagaaggctgaagttaaattctataggtcatgtctcagtaatagcagtggtagtaatagcaatggctaatatttattgagcatttgttagagacaggtgcctttctaagcatttcatcttcttaataacttataaggtagatattgtctttatcctcatttgacagatgaggagattgaagcgtagaggtgcctcattcaaggtcaccgagcaagtccagactttaactcagagggtctggctgcagaatctgttcttaatcactatattatattacaacgcagaaaatatagtgttgtaatgctccaaagttaatttatacaataatacaatcacaaggattagaacttcattctcactttaaatccaaacagcagcatgaatcactgcttctgcctttcatatgttttttaatggcttgatcattgtcttcctgatgatttgattatgtgaggagggcaagttaaggtcactgccactaggtgctcactgttgttgcccatatgcaagacctcagtaaaagatgtctatatggcgaatgtaacttttagccaggtctttgcgctatgagagtatttagtctgtctgatctttgaagatatctatgcatggaccattggctctaaaatccccctctttgtatccccacaacaatgcatattttcatctagtgtactcttaaaaggggccagattttgtgaacatagatgcctgtccttcagagtttatttatagaatatgctccaagctcaattcccacctatgagtgagaacatgcggtgtttggttttttgtccttgcgatagtttgctgagtatgatggtttccagtttcatccatgtccctacatggacacaggaaggggaacatcacacaccagggactgttttggggtggggggaggcgggagggatagcattaggagatatacctaatgctaaatgacgagttaatgggtacagcacaccaacatggcacatgtatacatatgtaacaaacctgcacgttgtgcacatgtaccctaaaacttaaagtataataataataaaataaaataaaaaaagaagaaaggcaggaagaaatggaagaagaaaaaaacccattcctttatattataatacaaatgcatattcatattctgaattttaacattaacattataataaaactgtttttatctttaggaaaaaaaaaaaaaagaatatgctccaagcatttgcttctcaaattctccactattggataacaaataagccataatgtaacaggattttcatttaggtttttccattaagccttagccatggattgtgatggtatctggttgaggccagatctgagtttagtttttactctgctgccgaaattgttgtgtgatcttgagccagtcattgcactgttctcaacctcagtttcctcatctggaaaatgagggtgttggagcagacgatcagtgagctttctcccaactcttaacattctctacttgtagagtttttataatcaaacacaattatgtaaaagagagaaaagcagttgtcatggaaactgttatttaatacataacactgtttcttaatcagcctgttttccttgaagaaatttgcttctcttgtgatacaggcccaaaggtctcctaattctgcctttagaaaggctcagatttcagttccatcacttaagaattcaatgcatggaaccagttacttaaccaccctgtgcctaaattgctttattctaaaagtggtattgacaagaatactgacctcatagtgtggagcatcaggcctgatgcacaacaacaaaaatgttaatgataataataccaatacagataatattaaaaatatctaatgtttattgagttacttattgctactctgtgctaggcattagtaaatgtattaactcatggaatcttcaaaccaaccctgtggggtaaatgttactattaatctcataattagatcaagttacgtacttgtcccaagtcacacaacttgaacggggtggaaccagaatacttgtcgagctacataggccaatttcagagcctacactctgaaccattaacgtttctcaataataacactgttaatacataattgtgaataaccagcatcttttatggcctttgctatatgcccaaatctgttctatcctatgaggtagatgatatcatcatctctatttcgtagataagaaaactgagacctctagaggttaattaaaaacacatagttggtagtagtggaggcaggacttgaactcttgcagtctggctcctgagttcatatttttaacgatgatatctcagtatgagctattattaccctacatccagttcagttttgtgtccatgaatgatgtaagatgattatagctccacccactagatgatgtgagcctttggcagtcttctggaactctgttttttttgtttgttttttgtttttttgtttgtttgtttttgagacagagtctctctctgttccccaggctggagtgcagtggcatgatcttggctctctgcaacctctgcctcccgggttcaagcagttctcccttcctcagcctcctgagtagctaggattataggcacccgccactgtgcctggctaagttttgtattttttagtagagacgaggtttctccatgttggccaggctggtcttgaactcctgacctcaggtgatctgtccgtcttggcctcccaaattgctgggattacaggtgtgagccaccgcacccagctggagctctgtttatgctctttgttgattccctattgtgctcctaactaccacaatcgtttatggaaaagccaagctgcgacacaagtatcttgccatgtcttataaaataaaacaagaggagataagtacaaaagtctatgaatttcaggccagtaagctctaaaatttcaaacagcaaatacagtccgtaaaacatttgagagagagtttacttcagtagctccaattatctgagcaatgttttccaaataccttagcacctattgatctaagagtgaagtaggagaacttctttaaagatcagatagtaaatattttcagccttaagggccataaggtctctgtcatgactgtttaactctgttaaagtgcaaaagcagccatagatgatagtaaacaaatgtatctgtgtttcaataaaactttatttacaaaaacagatggtaggccagatggcccagaagccattgcttactgacctctaatctaagagagagatagcctactgataaagtatttaatgccaatgggttttgggataagtggcctcttgtacgtgcataaaagcaatagtaatgacatgtttattttttccttccctcctcatttttaatgagtcctgatcttgctgttccacatttactaaattaggtactggcaaaatgtgatagtgtaggcttacactattcacattactatctgctacttgactcaatatattgaaatttgactttaaggacagactttcagcagtaggaagcaatgttgacaaaacaacttttaaaaaagatcatatagaatgaaaacgtggatatgtgccttgttttgagctatctcaaatccttttgctaaataagtagggggtaaattattttaaatggggaaaatggaacacaatttttaaatattttaaggcatttcaaatgggccttaaaatacaacggttgtcctctggagggattttcattaattattaaccatatcagaaatgtaattaagtcagtgctgaaattagtcaagatcagctttataactcaaatcacataaataacatatatgggttctatgaattaatcattgtagatttgattaaaaagttccatttcaaagttcatgcaatttaatgtcatgttgtttctgtttttcaaacatttgttaaaccaactgtctatagaggcacattatatggctaaagatctaattgcaccattgttagcatagaactgtagtcagtaaataattagtggcttgcattgtgaagttttgataaatttttaggcttctctgaattaacatttgtcttatggtcagttaaggaaattaaatatcgattaaggaaattcagacagggcagcttcacagtctccctcctccacagggccccccatgaccactgccttggaggctgtgctgactttggggaaggcctatcagtggctgtgacctgggttaagctgatggaccaggggcatttttgagaatattgattagattaaggagaggtggggacctgtattagttttttattgcttctgtaacaaattaccacacactcagtgccttaaaatgtcaccaatttatcttacatttctgtgagttagatgtctggtgcaggtctcactgggccaaaatcaaagtattagctgggctgtgttccttctgtctttctggagactctaggggagaatctgttttatggcctttgttttttgggatggaatctcgctctatcacccaggctggagtgcagtggtgcgatctcagctcactgtaatctctgcctcccgcattcaagcgattctcccgcctcagccccccgagtagctgggattacaggcatgcgcaaccatgcccagctatttttagtatttgtagtagaggtggggtttcaccatgttgtccaggctggtcttgaactcctgacctcaggtgatccgcccgccttggcctcccagaatactgggattacaggcatgagccaccatacccagcctcggtgccttttccagctcctagggctgccacatccctagactcatggtccctctttcatgtttgaagccagcaacataatgtctctctgatccaagccaccaaaggttctctgtttttgaggtcttatgtgattagattgccccccttccttttggatatcccaggataacccctccatttcaaagtccttaaatctgcaaagtccctgttagtcccatgtaaggtgacatattcacaggttccagagatgaagagttgggcattttagcagagccatcattctgtctaccacacaaccgacattcagtgtattggattcactgtcggcgcttcctctgtttaccagcccatcttcttatgtttcagcttcttgtgtcctgacacccatttttgtctcagtccactttaaaccttgttcttctcagttctcaatttctctgaccttcctttagcatgcagtccagtggaccttcttctgctgagagcagtattgctggccaggctgtctgggttcaaagctaggctgtgcctcataaacatgacctttggtaagttatgcaatatctctgtaactcagttttctcatctgtaaaaggaggataaagaatgtgcctggactacatatgattgatgtggtgattacatgcattaatatattcatcactcttagaacaatgcctgagacatagtaaaccatcaatacatgctaaccattgttgctgtgaatttggttactctccttttgggtgctggtagaaattccctcaagattttatctgtgatttcttgtattttcttcggaagttgcagcttctctcaaagctttagcattcatccctaggcaaagaactccagctggacgcatttccaagctctatacctttatttctggcagtactaggtgaacatttttgtttggatgtcccaggggagccacaaagctgaacttaacatcttgcctaccgaaatattccatccgtgttcttatttctattactgtctttagatccgaagtcaatttttattctttccctctcatttaccactaaacatcaaaaaagttatcaaatactaaagactctactttcaaactatcttttaatctatttgtgtccccacttccactgctctgatccaggcttctatgaccgttaccctgatttgttgccccagttgaagtagaacagtattcttaaacctttgctctgattatgcaacccccacccccagacccgcccctcccttccaccttgctccagcatcttaagtgattccccgctgtcttagcatggagactacatccagtgtagcatataagtgagttttcttcaggaattccctaaaaatttaaaaatttcatacaaaagtatgttgtgaagatcgttgctttcagtctcaacaaccagtcactgctcacgcatcttaaacatgcttgaaacaggacatcttttcctttcatgaatgagccttgttctttcatacctgaaccttcaccatggggggcgtgctcttctcctccatctctgcctatgagaaatctacccagcaatgaggcttagtgacaatacccaccactctctttgtgaagccttccctggtagcctttccctgaaccgtgtaagtcagaggtcagcaaactacagcccacaggccaaatccagcctattgcttagttttataagttttattagaactcagtcacactcattcgtttatgtattgtctgtggctgcttttgggtctacagtagcagagttgagtagctgcaacagagaccatatggcccacaaagcccaaaataaattatgctctggctctttacagaaaaaaacatgctgacccctttctcccctcagagattacatagtctaccttgtgcatctttgacatctccttctgttagagtcacttctgcacaacttttttcctggcaagaacgatctcctcttgtagacatagattctgcctttttcatccttgtttctatccttgggcctagcaggggtagggctcagtagttgttggggacaatagattgcctgtaaaaaaattttttaaactacattttgctcacttggctaagtgacaaaaatcttatataaagcagtgttccctttagggggttagtgcttatcatttgatgtttctggtagtaaaccatttcatgtttcacttcgagaagcgcttttttgactgccaagataagctgcaaaattgagtccaaggatcttaagaaataatattcctaagccatttaagcagctcacttggtgatctcatttaataagtggtccactgaaatttaggattgcagagtatactttttcattatgcatgggtttcaccatgtgaggtagatatctagttcctactcagctatttttgttgactgcctagggtatgataatatttgaccatgctactctcttatgaaaaatgccaaatagttaaatttgttttaggaaaaccagagattcctctcttgctcctaaaggagaaaccaaatgaccctgggtttctttcttttttttttttctttctaaaacccaagaagtattgatgtcatgtcctcctgcgaagtgcattagctgtccttgcctttgctgctttagtactggggaatgcctctgtcagacagtgagctcatgagtgcaaggactctgtcttttaatttctgaatcctcagtgtttggcacagagaaagctcttgacaaatatttattaaatgaataagtcaataaataattgaagatctcagaaagaaccttttccccaaggtattacttttaaactataaacttacaattgcctacttctatctagttcacatccttaaatatcacttgggagaatttcctgttgtgatgatatagagtttatgtctagctgtgggaggtcaagggtgggctacgttgtgcctaagtccacagaacacaaggaaaacccttaaacttttgtgaggtgaccggaaataaatatctgcttcctaagtatttccctgagtgagaatgtaaaggtttaagataaattaagtatcacagggtgagacaaagtgagaaattcaggatttagattggcattcagagcagggagggaaaaaaagatgacccaaattgacacaaaatgagaaaatcttgggaaataaaagtaaacggtagcaaatgtgatgtatttgagaaccttacaaggaggttttcagtatgttccagttgatttataggatgtagaaacattaagtgttaaaatggaaaggggtggattttcaagactctcacagtgagggttcagttaggaatcagaattccaacaaacaaacagattttaataaagatgttacaaaggagaggctgggttatggaaattgacaagagatggtgaagcacccagggtctagcaagggtgaggagcctttataaaacatgcctcaagaggcaagggcaatattggagccgcgcaagagcaggagccctgggaaaggggctacccaataggagtagaccttgcagagggctttccaaatggctagggccctcacaagtattcacacaggaagggagcagggaagaagtaactcagcctgtttttcctcccaacctttagctccttcttgtgcctccattggctgaggccaactggaggcctgtgagggagcccaggtgatgaaggagtcaccttcccaggacacagaacaggtggagaatggatttgaagtaggtggaggcccacaaaacgtcaccagcacagggaccatctccagcctttcagtttacaaatgaggaaaacgaggcccagactgggggaaatgaacaccttggaaattcatccctttcagccttaacacttaatgttcttttttttctttttataggtagtctcttatttttattattattattattatacttcaagttttagggtacatgtgcacaatgtgcaggtttgttacatatgtatgcatgtgccatgctgctgtgctgcacccattaactcgtcatttagcattaggtatatctcctaatgctatccctcccccctccccccaccccacaacagtccccagagtgtgatgttccccttcctgtgtccatgtgttctcattgttcaattctcatctatgagtgagaacatgtggtgtttggttttttgtccttgcgatagtttactgagaatgatgatttccgatttcatccatgtccctacaaaggacatgatctcatcattttttatggctgcatagtattccatggtgtatatgtgccacattttcttaatccagtatatcattgtcggacatttaggttggttccaagtctttgctattgtgaatagtgccgcagtaaacatatgtgtgcatgtgtctttatagcagcatgatttatagtcctttgggtatatacccagtaatgggatggctgggtcaagtggtatttctagttctagatccctgaggaatcgccacactgacttccacaatggttgaactagtttactactcatctgacaaagggctaatatccagaatctacaatgaactcaaacaaatttacaagaaaaaaacaaccccctcgaatagtggacaaaggatatgagcagacacttctcaaaagaagacatttatgcagccaacagacacatgaaaaaatgctcatcatcactggccatcagagaaatgcaaatcaaaaccacaatgagataccatctcacaccagttagaatggcaatcattaaaaagtcaggaaacaacaggtgctggagaggatgtggagaaataggaacacttttacactgttggtgggatgtaaactagttcaacacttaatgttctatatcctcataaatcagtgttcaaatgagaaagacaataaggactgactgaataaataaatggaagaataaattaatttgaagaataaatgaatttttcatatcataaatccatttttcaccaacatgtttgctaggtggcattctaacctatcagtggaccataatatatttaactattgccctattaacagttatttttctagtttctaatattactataatcataattattatagttatgtcagtattaattataattatgatactaagtactatttattgagtatgtcaggcaccatgctgtgtgaaaacatatactttttttagcccttattatgaatatttgaagtatgaatttaaactcccattttgtaaaagaggaaattgaagctcacgtagtaactcaatcataactcatcagaagttccacagctactacaagatagacccagaatatgcacgaatatccattcaacacaaaagtccatctctctattgcttccctatttaataaaaattttgaatggaacattttcttacgtaactgttagtatgtcttatcattttcttgagataacttcctagaagtagaattcttgggtccaaagagatgatcctatttttaagtagtaagaaataacatttagttgcaatttgaaacatattaaatatctgtgagagaaaccttatatgggtatgaaatttttagttttgtcaaatgatctgattgcgaatggtgagatagccatgtctgagagcccccattttcttatgttaccagcagtgaagagcatcttttttaatagcctgtattttttagagcagttttaggttcacagcaaaattgactgcaaaatacagacattccttgtgtatctcctgcccctacatgtgcatagcctcctctattatgaccttcccacaccagagtggtacaattattacaattgatgaacctacattgacacatcatcacccagagtccatagtgtgtattagcgttcactgttggtgttgtacattctgtgggttttgacaaatttattacaatatgtatgcaccattatagcattaaacagagtagttttattgccctaaaaatcccttgtgctctgcctatttctccctcctttcttctttcctcgtggcaaccactgatctttttactgtctccatagttttgccttttctagaatgccatgtagttggaactatgtaatatgtagccttttcagactggcttctttcacttagtaatggttcttgaacatttaaggtaagtaaatggacagttaaggttcccacatgtcttttcatggcttgacagtttgttttgttttaatgcttaataatattccattgtctgaatgtatcacagtttatttgtcagtttacctactgaaggacatcttggttgtttccaagttttggcaattatgaataaaactgctgtaaacattcatgcgcaggtttctgtgggaacataagttttcatctcacttgggtaaataccaaggtgcatgattgctggattgtatggtgagagtaagttgagttttgtgagaaactgccaaactgtcttccaaagtggccataccattttgtatttccaccagcagtgaatgaaggttcctgtcgcactgtattcttgccatcatttgatgttgttggtgtttttgactttcactattctaatagatgtggagtggtatctcgttgttttaatttgcaattaattacccaatgacatctacattattttttaagatttatttttattttaatattttatttatgtacttattttcaattaacaaataaaaattgtatatgtttatcatttataacataaagttttgaaatgtgtatacattgtgggatagctaaatcaatgcaattaatacatatgttatatcacatacttgtcaatttttatggtgagaatgcttaaaattactctgttagtgatttttaagaatacaatacattattattaagtatacccactattttgtataatagatccccagaacttatttctcctgtctaaatgaaattttgtatcctttgaccaacatctccacaactgagctccaccccccagcttttggtaaccgccattctactctctggtacttatgagttcaaaattccacaaataactgagatcatgtggagtttgtcttcctgtgcctggcttattttacttaatgtcctccaggttcatccatattattgcaaatgacaggattttccttgtttttctttttaaggttgaatagaatgtctttgaatatatccaccacacattttctctgtcaatttttccattgatagatacttagattccatattatggctgtgttttggctattgtgtctaaagttgcagtgaccacaggagtactgatagctgttggacgtactactttcatctcctttggctatatactacaacatttaaagagttttaaatcactctttatgaattaaaaaaaatctcaggttgttttcactgtagatgggctagtagggttgaggaaaggagagtgggaaggctaagctattcaaggttgtcttcaatgaccactttcccttactcaccccctcttccaaggtcttagctaatctcccagggactgaacactctccagacaaaatcaacgtaacagaagtctggcatttgagaatatttgagtttagttacctgtagtcttccttaggtatccctagaaagattagttcctggataaccacctccctcccttccccagataccaaaatgttcaagtcccttacatgaaatagcaaagtatttacatattacctatgtgcatccttccatatactttaaataatctctagattacttataatacccagtacaatgtaaatgatatgtaaatagttgttatactgtattttaaaatttattttcctttattattgttttaattgtagtttttttttttctgaatattttctatccgaggttggtttattccacagacatgggaactgcagataaggagggccgtctgtactttgtttgatacctgtcctgccggctccctgccacccccggcaccctccgtttctttctagaactatttacattaatgtctactgtgagctaggcattgtgataggcatgaaataagacacagtcctggccccacattcaggggacatatatatagacaatcacagtgcagttgggtaggtcttggtgtagttatgtaccaggtgctaacagagtgcaggggagggacatgtgagctgagggttctggggatgcttggtagagttaggggttgggaataatggggtttcttcagaagggtggtgaatgagctgatcttaggagaatatattggattagggctatgaaagagagcatttcaggcaagaaggaggatttttttttttttcatgaactcactacttaggaccaaactgtgagcaccagcactgtttcattttcaccttatggagaccattattggaggtgtgttcatcaagttttttctatgaaccaacaaacccaaatctcagtggttcacacccagaaacatttgtctttttgttcagagttttttcaggcagctgttgtttgcctgatattggctggtttaagtaaggcttggtccaggttgcagatcaggtttgagtttgttcttagtgtctccttctgggacccatggctagtcgggacatgtgctttttatgataatagcagaagcaaaagagaccaagcctaaaccacacaagcacatttctgctttcatctgtttgctaacatccctttgactaaagcaagtcatgatggccaagtccaaaaccaatggagcagggaatataccttctctctctattgggaagtactaacaagtcacatggcagagagaagttatgaattacgaatcaggggcaataatctactctgccactgtggtttcctgaaatgaagtcctgatagaatttggtcgcagggggattaaaagggagattctcactcagcctcagcaacaggaaagaaagaagttacaaaaagcctgtaaagaatctaaaggaggatttgaaggagagaaagcaccaataatctaactgcagcactttatttgaatttaagtaacgctggtcaaacattcttacaggctcttaccctttctgatctataaattcttcatgtagatattgagccaaaggttagatctagaaaatattatatctagtccttagcatgttggtttcttttcaatgcgcttaaacgctcagttaacgtggctttagacataattgtaacagaattacaaaggacagcaccttggcagaaagttcttcctggttttgatgtgttgctactgccagatttttgtgacatgctgatgctaatctgtcaaatagcctgacactaagtgagaagagaaataaaaggaggcatgacagggccaaggacctggtgtggtggaggatggttgggcagtagcaaatcctctcatcagccctactgagactaagcaacaacctatcttcaggtctctgggttcggtggttggggggagcgggggcggtcctacgtgggttagaactcatactactctcagaaatgcacctactttcagttacccaccaattctgatgctcaaagcccctccaaacctgttttctgtgggtccacctgagctcgcttaactaagatagcacaaattctgccccctcttatgggaacatacctaagctaatgacacatgaggtgctacctcttccgcatgtatacctacgtgtttgagctttttcctcccttggatgtgggagggtatcagtctattttataaacattttgtcaagtgtcctttgagtcaaataagagaggatattagaaaagctccagaaaactttgggaggccgaggcgggcggatcacgaggtcaggagattgagaccatcccggctaaaacggtgaaaccccgtctctactaaaaatacaaaaaattagccgggcgtggtggcgggcgcctgtagtcccagctacttgggaggctgaggcaggagaatggcgtgaacccgggaggcggagcttgcagtgagccgagatcccgccactgcactccagcctgggcgacagagcgagactccatctcaaaaaaaaaaaaaaaagaaaaagaaaagctccagaaagtttggaaaagtaaattcagacctgagagtaaccaagagagttcccaccttccttctggtcaatgttccaggaaggcgaagcactggatttaccctccactttgcagttaaagaggaaactcgaaataaatattcccttctacaggtttttttttttaattaagaatagatgagtcttatgttttgtgtgtggtggtgacattcaaaacatagtttttcagtgttttgaaaagtaatttacctaagaaatgacaagaagagtaatgcaacacatagacagcattgctgtgagttgtaaaacattgacagaacgacaaatgttcctgtggcatagagtccttctgaatcacagaaatgacatttggatgaaagcaaatcatttttacataggcacactgctaactgtgcagtgaagccagaaatagcacaccttggaagtgggccagagagaaagaacacctaagaattttatgttattcagaaaaattttcactttttcggtaggatttttgaggagtaaagaaaatatttgagagccttaaagaaaatctgagctttgttttttttttttttttgagacagagttttgctctttgttgcccaggctggagtgcagtggtgctatctcagctcactgaaacctccgcctcttgggttcaagcgattctcctgtctcagtctcccgagtagttgggatgacaggcacccaccaccatgcccagctaatttttgtatttttagcagagatggggtttcaccatgttggccaggctggcctcaaactcctgacctcagatgatccacccgccttggcctcccaaagtgctgggattataggtgtgagccactgtgcctggcctttgatttttatttattaaaatattagtcatttattgtgttcccgtatactcatcaagtgtctcttgagaaaactcagaccaagcaggaaacataggcttgatgtttaggagacagagtaaagtgggaggcatgacatggggagctgatcacacagagattacagatggagataaggagtgcataacatccccaaggatggacaggatggagagaagaaaaggccaaaatcaaaactttggaaaatgcccactgtggtgggctgataatggctcccaaatatctgtccacattctaattcccagaacctgcaagtgttaccttgtttgaaaagagtctttgcatatgtggtttacttaggaatcttgagatagggagattatcctccattatccaggtgatccctaaatgtcacaaccagcgtccttataagagagaggcagagggagattagacacaaacactgagaaggtgatataatcacagagatagagattggagtgatgttgtcacaaggcgaggaacaccaaggaatgctggcgcccgtgagaagctgaaggaggcaaggaatggattctccccagagcttctgtctacctttctggagtcttgattggcctacaggtgttcagtttgcacttctgtggaaacagggaacatacagcagtgacacagagccctgccgacaccatggtgagagacacctggccttcagaactgtgagatgataaaatcttgtttgaactcatcctggttgtggtaatttgttaaattgggctttgggaactaatatacccacctttgggaacaggaacagaaagagtttaaaaaagtaaggggaggtagcaagaagcttaagtgtcatgaaaacgaaagccaaagcaagagtttaaaaacagatgagcagaggcaatggtataaacgctagagcctaaagcctaatgggtaaaaatgaagattgaggagaatcattgatatgatagaagctaatgatggcagctaacttgtactgagcacccattatgctggacattgccataagcactctgcagatataaactcaattctcacaaaaccctatcaggtatgaattattgttaccccattttacaggtgaaaaaactgaggcaaaaatttaaataaatgcattaagtaacataggtggtaaatggtgtggccaagatttgagcccagaattctggctacagcatccacattttagccactactttgtactaacctcaccttatcccccaaggtgtgtgtttcccaaggttctgactttgggtcttttatcaagtaaggtagatgatgtgtctcaagaggaaaaggtatttttgtaatgattatttgaggttgaaaggaggaagattaggaactttatatcacctggaccccatcttctcagctgagttggagaggaggctatctgatgaggctgagggaggcagctaagtttctgacctcagggagcctaggaaagacagtgaggatacaataaaacaggaagcactaaatgaaaaacttgctgcacagtgaagcatgctcagtgttatttccttgactggcttttggcactgtgccatctgtgcccaagatgtctgcaccatgtagcgtgccaagtgcagaaggaaaagggactgaaggggcatcatcgccccacacctgccctatggaaagtactttgttcagagacgaagaaggaatccgaaaactgcacaatatgacctttgtcattagaaactcttgaacgtttgagaaatggaccatccatgtactggcagatgaatgagagttcaagggcattacatgataagggctaattgcaagactagagactggagtgggtcagaggaactgaaatgtgtcaaggggaaggtacagctctagatagttcttactaaggtctttgacagctgatcaagaatcaggaggacatttcagcctggacgatgccatgggccaagcatgggagaggggagaaacagatggttctttaagagcttaggccaaaggactctcaacattctgggcttccaatctgtcccccacccaggatagctttctgttaagttactattcagaaccactgcaggcttaaaacaatgagtgtttatattggtattgaatccattagactgcatggtatagtggaaaaaggcaaggttaaaatatcagttaatcactttgttgtgtgaccttggtcaagtaacttctcgagcctcagatttcccatttgtaaaacatagataccaattctcaggctcttatggttgtgatgatacattaatgggataatgatcaatatcgagtgtggtgcctgacatttaatagatagtgtcaacaatttttttttagactaagaacaaattggatgatgtaatttattggctgacaattcatttctaaagatgtgacttcagaatgttctataaatgttaacattttcaaatgcccagagtatattttctatcttgcatactagctatttatttacaaatctctttctcccattgacttagcccttgtgtgaggagagctcttttaggctaggccctttatctgtactttgaggacccttaattcctagaggaagaacatggatttttctcaggcattaaagattccttccaaatttccatgtaacatacccactttcctcatacctatcttctcctggtaatattcttgaattattttttatttttaacattttttgctatgatctacattattatattttaaaaacacaatttcaagttatatattttaaaaaaatgccatttatttccatgatacaatttctattctcatttacgtcattttgtgcttccttcagaaaagttatataaaagctaaaagtgctgtgctgagtcagaatcctgttcccctcagcccaataagcctctgcaaaaaggaaaagaagaaattttttcaggagagcagtctatttcatatttgcagactgagagtgcatgtatcatctgatgttgacttaaaatgtctctccccttcccttcatctgtcatccacaaagctgtttgcattcttctggagtcttgatgggtctacagatggttcagtttgtacctccgtggaaacagggaacatgcaccagtggcacagagcatggtggagtggaagaaaatcactccaccatgatgtggatgatgcatgtgtggttgatgctgtggtgtctgtcctacttatagagagagacctctgggagtagaaggctcatacttgcctaggcacctgagcatcagagtgcctgggggcagcctgccagcctatctcctacggggccacccagcctgacagtcctaacctgggtgaatctcctgagaccaaggcttaggctcacagcattgtgggcttagaaacaacatcttgggggcagactcataccaagcaattcatgtggaggtagatgtgtgaaagcccaggatgtccatctgttagctcacactgagaaccctagctgccaggtagacaggaacactagcgtgaaaactctcttcctgtactggaagcccaatcctaatccataggttatccggtgagcactgttggaatgagggcagttaaatggataaaggagagtaaaaccatatgtcaggactgtctggcggtgcaactggaattcttgaacttagtctgtttcttagatgagtgctgcctatatttgttacagtttgttttaatgatttcctggcttaacaagccctaatctgatttgagtcatccttccttaagatttgctagagtttacaaattggcccaggtcatatcctctttttcccctgggaaaatttaaggtgacccttcttacctttgacatgacctatgattggtgattttgcagtttacctcttagcagacttgttattttccctgtttctgggtttttagtagacttcttattgtagctttaaaataattttttttacattccatttttttaatgttcaatatccattttaatgcatacaacaacattataaggtagatactgttttatatcccatttacatataaagaaacctgagactcagaggctaatgaacttgcctagaaatacctggccagtaaaggaagaggttgtgattcaaacctacgcactctgattccaatacttaagacatacctgtggctacttttctgaatgtttcacatgtactatctaatgtaatccttacagttacacaatttttattaaaaagtacagttctcactcagaaagaaagaaggatttgcataaaaaagaatttcaagcccagaaatactaatattacaggtgtcaggaatagtaacatccagcctacttccagcctttctctctctctctttctctccttccctcctttcttttctccctacttccttctctctctctccctctcccaccctccctccttctttctctttttatttacttacttatttatttatttttattatactttgagttctagggtacatgtgcacaacgtgcaggtttgttacatatgtatacatgtgccatgttggtgtgctgcactcattaactcgtcatttacattaggtatctcctaatgctatccctcccccctccccctaccccatgacaggccccagtgtgtgatgttccccttcctgtgtccaagtgttctcattgttcagttcccacctatgagtgagaacatgcagtgtttgggtttttctgtccgtcaatgatagactggattaagaaaatgtggaacatatacaccacggaatactatgcagccataaaaaaggatgagttcatgtcctttatagggacatggatgaagctggaaaccatcattctcagcaaactatcacagggacagaaaaccaaaaaatccaaaataatttttaattctctttcttatcggtgtttcttagcaagaattcttctgtagtgaagaattttccctcatcaactaataaaaaatggctagtaaaggcaggataaatgcttgctttattccctttattaatcttctgagtaacgaattggtatcttaggaacctccaatggtgaacaatgagtgttttaaaaagatacacattgaactcagcctttctttatacagttgatatgcatcagtagatggagtccatattaatgatgtaatctatataggctgatgtaatcaattctacttttgaggagattgacatgatgtctggaatttgctttaaatactccagcatctaaaaagcaaatcaacaacaaagggagtgggatcgatgaaaaaaaattggaaaaatcttgatatttgttgacactggttgatgagtacatggagttcattatactattcattttgcttttggtatgtttgaaatatttccaaataaaatagttctcaagatgcatataattctaaggttatcaagagtgtaaatgtgagtttagccaacaactttggcctatctgtgaatcttgtggagaaagttcttgatttttattgaaattccagataccccaacagtagttcctaagccctactgctttggcaacagcatgtcaaatatgtgcacattttcccagcattttggaaggaatttttataagaattttcagatttgactgattggatcctgattcataaaagtcttgtcttggtaactaaggatgtctacttttgagtgatgcataccttaagaatttgaaacatggttgcttctgttctctggacttcatatgagagcgtaacagccttttagccattctgaagtgacttcttcagtctaatggtgccatttctcattccaggtttaagtttatctattcatggggctgaaaagcgtttgcaaatccatcaacggcgaagtgtggcaagccgcccagcgtcacgtcgtcgcctgcctgtggtcaggcattcctcactcccaccaggcagaaggtcaataaaaatggaggcaagctcttctggaatcactaatggaaaaaccaaagtcttccacccaggtgatgcatggggaagttcaacggggacccatttcagtagcaacctgaccacagtctgcattatatttttattgtgtaaatatgccatactttcagctaagcttgcttttgttaggagtcttgttctatttccccttctgctcacctcagtcaatggtaaatatcaccaagacgaataagaggggagagagcttggtggttcagagaaggttgaggctatgtgcacagtggtagaatctaaatgaaaatcagagtgcataaactcttgctcagttcaggaaagctcattatataataaaacaacatagagatttggtcattttcctgataatttgctctaagattggtcaggaaaaaaattcaagccaaaaaacacccactttgaaacctaggttatctgtgttggcttgcccacatcctcctgagatcaggagagaagactggagtcattatattatattgttttaagtcttctgggaagcatctgtgatctctttaaaatattaaaatgattctacattaaatgaagtaaaaacatcttatgtgcttatttgggggaaaagctcatttaagtattcattcattcattgaacaaatatgtattgagtgccagctacatgctaggcattgttttgggttcaaggaaatatcagtgaccaaggcaatgttcctgcaaagtgactttatagaaacatcaaattgcgaaagaattcataagtcattgagaataactctcacccaatcctgattcctctctgtaatgtcctagtggatgaccacacagctgctactgaagccagcctccatctctactcatgtcacaccaccttctctctcttagcatgtaaccttgcttcctaacccatcaagaaacaccagggccgttgggcatgaattactggaggtcccttatcctctctcttcaaatgtattgctctttatgcatcattccccactttcctccagttttcagaagatgaggggcctcccactgtctttgaccaagctcttacccatgtcctttagccatggtcacctttcacctcttctgaagcttcctcaggagaatgtgtcctcttgttttcatctctttcacccttccacactgctagctgtttaccttcagtctatgaaaaggctcaagcttctaccattctgatcatttaacactgtacccttttccctcttctgccactttttcctcctcccttccaagccaaacttctgaaaataataatttacttttgattgctctgttctgtcgagagtaaccaacacaatctggtttctagctcctccattccattctggctgtttttgaggccctcagtgacctccttttatcacaatgtagtggatgcttgccagactttcctgatgcaccagaccaaggtggacaacccacttgtttcccaaacactgttcccttggcttccatgacaatcttagggttcttctcttatttctctcgcatgtaactttcctggtttctcccactccagcatctctttcctcctcttgcctcctttcccagtacgtaccaaatccagaatgattcatctgtacccctaatcagttactgtgcttgttctaccaattacagggtccagttcaaacttcttagcatgttaaaaacaaatgccttttgtgatctggcccctactgctttcacccttcattttttgccctcttcttccttaagctttattactatagtgcatcaatcaaggttcaatcagaaaagcaaaaccagtagaaagtatgtactagagactaattacaaagaattggctttcattgtgggagatggctaggcaagtctgaattcataggtcaggctatctgcaagggcaggctggaactcttgggcacagctcttaaaagcttcagctctgcttttaaggcttttcaactgacctagattatcaaggagaatctcctttacataaagtcaactgactatgaactttaattgcatctacaaaacaccttcattgcagcactagattagtgttcattgaataactggagactgtagcctggccaagttggttcatcaaatagaccatcgcatctgagtatatcaatgtgctttcacttctctaaatatgtgatgctgtttcatgcctcccaacctttgctcctgctgttctttcttcccaggataccctggttttgctctgttatctttgaacatgttgaaattacttgtctatccgtccactgaaaggtctttaagggcagggattctggattatttatctttgtactcccaataaatatttgtagggtaggaccgaacaaaaccttcattagctgtgttttagactactacaatagcttctgaatttttctgcctgcctttctttcaacaagtacctgatatacatcagtaaacaaagcagacaaaagtccctgcccttggggagtttacgtagtagctgcaagagataataaataaatatattaaagagaccaactgtgtaatctatattatagttatatgtaagctatatataacatatagtgtttagggaaaggataagtattatggataaaagaaaaagtaggggaagagggtagcatgttgcaatattaaacatggtgatcagggtaggctgagtcacgaagatgtgtaatcactgactagaagtttctgagacagccacgtggatgtctgagcaacttcattccagcagagggacagttagtggacaggttgtagggtaaaagtgggtctggcaatttgaagaatagtatggaggctcctcaacttggagtggagtgagtgaggtggggaatcaactcagtgaggttgtagggactagatcgggcaggaccttataggccattgtaaggactttgagccctatgtgaaaggaagctcttacagggttttgagcagaagaattccataatttgatttatattttaacaggatgtaatatagactatggggagaatagattataggaggagaggataaaaggagaaaggtcagataggaggcctccagaatgatccagtggagaaatgatggtagctctgactaggaacagcagaagtaatggtgagaatttagagtctggatatattttaaagctgggccaacaaaatatcctaatggattggatgtagggtaaaagagaaagaagagcaaaggatgactgaaaagtttttttggcctgagtgaaatcagctgagatggagaaggctgcaagagaagcagatttggtgggtttgagggcaaaggtggggctgagttcagaagtttgattatagatgtgataatattgagagctggcaagatcttgtgggtggtagtttgagctccatgtctggagtttgaaagatgattggtctgtgaaagagatataaaactaatagttgttgacatataagtgctatttaaagaaatgagattgcaagagatgaccaagggaagaagtataaatggggaagggagagcatcaagggctgagatctgggacactccaataataaagggtcaaagaggacatgaaccacgagcaagaaggccaggaaagaagcaccagcaaagatggagaaaacccagaagtgccacatctcagaaattacaaaagtttatcaagaagagaagaatggttttctaggctaaatgttattgaaagtcaaataagatgaggactgagaattagtcgattttagtaaagtggaggtcaatggtgattttgataagagccgttttagtggagtggtggggatgaaaccctgattgaagtggatttaagggagatgagaggatataaattagatgctctgaatatgggcaacttttttgagcagttttgctatgaagtgtagtgaagaaatagggcagcagctggaggagaagtaaggtcaagagtttcttttaaaaatagcagctctccagcagataatttatggtgttcaagagaggggagaatttgtgatgtgggcatcagtgagaggatgagagctatgcacaataggaccatggatagtttatctgtgataactggtgggaaggaggcgtatgtatataatggcaggtgtgctgagggtctaataagttcttttcctatgttgtcagctttatctttaatgtgagaagcaaggtcatctctgagaatgagaatggagccacagggagaaagagagagagaaagaaagatatggagaggggaaatatgtttgccaactcacattaaaagggatttgagattcatagtcatgaaactaaagtaggactagttatcatcattgtgtagtttttaattttgtgtagctacatgagtaaagacatacagttggtggtgagttggatttgaacagcagtgtggttttgcaaaggaagtaggaaagagagaaagggaatcaaaagtgcatggaagggagtgatgatagtgattcattttgtgatttggtaaagagggtacaagacatcaagggaaggaggtacagtgaaaagttggtaagatcaatcggttgaaattcccagagggttcaaaaaattgtgggggttagggtaatagaaggaggatctggaaggataagagaggtggtaagagaatggaatgtgtggcactaatattgtggcacatatcttaataacatttatttaattttattatagtaatatcaacacaagatgctgttactggtaatgacaaggtttaggccaaggtacaaaacaagggactataaagggtagaaggcaagatcattgaatgaaaaaattcctagggactgagaggccaagatgtgaaaatgattgagtcaagaattgagtagctttgggaagaatgataagccaggcattaactttactgagaaataagggaacatgatctggcaggtagcaggagagtacaaagataaagggtagaagatgatgtagtataacaacttgagattcaaggctgaaggtgtttggggaagagggaagaagaatggtctgaaggtggatttgagactcaagaaaggtatctactcctctttcagatgcgttggtgccagggctattggagaaaaacagttctaagtgaaagagccacagggaagcatgaccactgggaagatccaggttttccttagagcaaggtgaatggggcaatctgagaagagattgacgacattcagagaattctggagagcccagtggaaggttttagatgttggacaattgtcttcagtggttctctcagacaccaaggttctcctccagagaggataattagcatcagccttcctcttcttaaaattgttatggctatcccgaagaaagtgcagccttgtgagcccaccttttcaagtcctctccaatttagcctctccctacttttccaggcttatctcattttacactgtcattatccatgttattcagcttcaggcatccacaggctttttagtatttctcaagcaggcttttactcttccattttctttgccattgctcaagctcctctctcatcttggaatatcccttcccctaataaatgtctactagcccttctcattcctcaaaatgtaactcaaattccgcttcctccaagaagctttctagatcttatagtcagaattattcccctacttccccgtgcttccacagaacttagaagccttatcaaagtccatctgtttctatggtcttatagttctcccagaaggcaggaactctcctcaattcatctttgtatcttccgtcactcctaacatcatgcgttgtccctagtaggttcttaataaatgattttatgttgtttgtcaaaatctgttctactcagcagatataggttagcattctgaagttatatggcgtaaatcttaactcttctttcatatgacaatccttcagttgtttaagaaactcatccctagctattttccaggtgaaacatttcctagtgtcttcagtgcttccttgaatgacatgatactcaacttctttacctttgtaccctctccactcttagaaacattcttatttcattgctatctctttgaaaatgcagtgcccagaattgagtattccattaaagtcaaacgcaggcagtgtagattcagtctgtcctttcctttaattgatatcctgtgttgatattactataatacaattaaatgaatgttattaagatattcctaatggtgttttatcaacatgggctaattcagcccacattgtgagttaatatttcaagtctcttccctcaccttaaaaacacatcacttggatgagtacggtggctcacgcctgtaatcccagcactttgggaggccgaggcgggtggatcagctgaggtcaggagttcaagaccaggtggagaaaccctctctctactaaaaatacaaaattagccggacgtggtggtgcatgcctgtaatcccagctactcaggaggctgaggcaggagaatcacttgaactcgggaggcggaggttgcggtgtgccaagattgcgccgctgcactgcagcctgggcaacgagcaaaactctgtctcaaaaaaacaaaaacaaaacaaaacaaaaaaacatcactttacttatctacccatcattttatcatagatccttaaaccctacatatgtcgagtattggttgaaaatataaataaagccaatcctctagcctagaattataattaagaaaaaaatatattaagttacaattagaaacttgttatttaaaaaaagtatttttaaaactcatattattctggcaaggtagaatatgatttcagttccattctctttatttttagtgtacttggacaaatgcatcatagttctctgttgggaaattatggaagagctctcaaactgagtttcttaagtgcagtgagtcatagatcttagtagcagcttggacaatttagtcatattgaggcctattaagtcatccatctattttttacaaagttaataatccctgttcccgaagtgttctctaaggcccactcggattggttactaagaacaaaaagagaatttgggagtcttgtagattttctgttccatctgcctgaacaatttcagtatgtttatcctcctttgagtttacaaacttttatgagggcctactatttactaacaaggatttattgggaatttgccctccttggagtattttgaaatggtgcagaactctattaaacatgggtcttaaggcactcagtcatgtccaagagagacaatcagtcagggttctttgttaccaacaagagaaactaatcatttagtccaaacaaagaaggaatttaaatttgaagaatgtggatggaaaacctaaagagccagccttggaaaaggaatcgagaaatcaagaatagctatttgattagaatagaatatcttctatttgactatctggaatgattgaattcttaccggtttttctagttttgcatcatttggctcacgttttgaagatttaggaggacagttctattggctatgcacctttcctttggttggacagacagtgctgagacaaatgataggacagaagacctctctcttcagccttcatagtgggagggtaggactccttgatttcttctgctaccttgactacacacagcgagggagaaggacttccccaaaaggaaatagaggtgatgttaggaaacaactttatgtggaagaatgcccactacagggacatgtgcttaagctgctgtgatagaagtcaaactgtattaagggctggaacacagaaataaataaggttatggcagcataaccttattatgctgaagagaatttagaaagactcaaaacacatatggtctaccaatttgactttgaaggtcaactaggatttcaacagaaggaagaggcatgaccattcagatgcaggaaagagcataatgataggaacggtgcattacactggttctgaaagcaagctttatcgttaggtgtttaaaagctagatatgtcacctgatggctattacagccttagacaaattacttaatttctctgaatcttagtttctacatcagtaaaatgaggaaattaatacctaccttatagtattagggctgccaaattaaatacaatgttcccaattaaatttaaatttcagataaacaagtatttttgaaatacttgtttgaatttttgaatatttgaatattcctaattcaaatatttgaaattcaaatatttgaaaattcctaaatattgcatacgacacacataataaaaaattatatcgtttgaaattcagatttagcaggacatcctgtattgtaatgtattatgtctggcaatcctacatagccttgttatggcaattaaataattggtgtagaatgtccagtttgatttttggcacatacttggtgttcagtaataaatggttgataaataaagaaatcatttttcttgtcaccaacatgataagcaaaattcagaaccctgaaagtacctatgcctcagaatccttgttatctcagttaccacttcatttagcagtttcccagttaacttgtgctagaataccaataagatggtctctcattatgctgtataaatacagaaaccattcatcttcatcttgtatttgtatggtttctctttccttctgattgtttcaattctttctcctgtttatcaatttcattttgaccttatcctttagacactcataattaatgaatattattttctgcttcctttatggaccaaaaatataagtggtaaatggtactaggtttgggactataatttaagactcaagagcatagtaaactgaagcactgattttgatttttttgagtttgaaactataaagcttagtggatatagatcaaattatcccagctaatgactatgccatataaaatagaattggaagctttctgaaatctaaaatacttcttctattgctttttccttatctgttagacccatcatacaatcctagagaagtgtcattaatcacagaatatgtcctttagtctcatttagaatttgtaaaataatgttttgccgatatgtgttattcccaagtaatttctaatacaggttcttttatctcactttttaaaacctatggccctttccacatttatgcatgattattgttccctaagaatctatctagtatttaaatgctaggacataattgattttccaggagagaaacattaggattttcttgtttccaaacagctagaatgattagtactgtctgtatacttaggcattaaatgcatagtttgataataataaaattatagctacaatatattaagccctctaccatattcccaacctcaaaaactgttcaactgttttcattcattatctcatttaattcccataatattctcatgctattttccttatttgatgggtggggaaactaaggcatgaagaagggtaagtaccttgcctaaggttatacagccagtaaatggtgaaggcaagattctagctcaggtattcttattctcttatttaatgtgctattactttcttcttcacacaacttggcagaaacatttctagcaaattatcataaaaaagccttagaaaatttaaattaaaagccctgcagtagctcaaaccttagcgtaagaaaaccatactaaagaagggaccagttaggttctgttgattgcttgtgtaatcgtcttcaaagtttattatttccttcagtgtaagtgatgtccactttgtagcttctctttctggtctactatgctctggacttttgtttttcatcctccattttttgggttctgatataataaaattcattcctatttccctgagtttcaaagatttctttctggaaccaatgtcaaggcctggtctcaaattagggaacagactgtcttctgtttctccctttaaagagcagtaccagaagatgtggggagagggagaggagaggattattaaggagagacttttaaaagaagaaggacagtcaagaaagacttgttcctagttctgccaagagtcaggataaacttatgctttagggaaacaaaaataaggaaaagataaatatatgaccaatctttagaataacgatcataatactgcaaccctacatttacttgatattctgttgtttccaaagggctttcacaaatttttctcctgcatttcatttagtcctcatagcagtctgtgaggtggaattatgcctattttactatggcataggaagtgaagttactagctcaaaagtacaaaattagcaattgacagaccccaactaaaacccaggtatttaatttcttatgtggccgggcgcggtggctcatatacgtaatcctagcactttgggaggctgaggtgggcggatcacctgaggtcaggagttcgagaccagcctggccaacatggggaaatccgtctctactaaaaatacataaattaaccagacattgtagtgcaggcttgtaatcccagctactagggaggctgaggcaggagaatcgcttgaacctgggaggtagaggttgcagtgagccaagatcatgccactgcactccagcccaggtaacagagcaggactctgtcaaaaaaaaaaaaaaaaagaaaaaagaaaaaaaaaaaaaagctgaagcaggagaatcgcttgaatccgggagacagaggtggcagtgagctgagattgtgccactgcactccagcctgggtgacagagcgagactccgtctcaaaaaaaaaacaaaaaaacaaaacttattatgggtgttttttccacggtgtcaactttttatcttgaagatgagcattagttaagagtgaaattttgggggctttctatccccttttctgaaaatagacactttattgagaagtgtggctgaggtttgcttataggatctaaggaacctggctgttctcttgaacagaactgaagcgtggatgagataatcagtcttcctatttgtgaatggatttttggggtggctggaagataaaattgtatggaaaaagcgacaagggctactttggacttctgttttatttctcattgcattgaaggtgaatgtggtgcctttcagaacagttagtgctgtggtttagaaataacactgtaattatccttcatttgaatctcttcctctttaagtgggtttttttagatgtgtgatgtgagtttagtcaataggtgggggtgcttaggaaaacaagctattttggtccttggcaaatgtgggcattggtatctgtgttccttgctatcatttgctgagtaacaacattattttttttctaaaaatatataccacattcttctcttatttgcatttgcttttcattttactgagggacatatacacacacattttgatctataggatgcatttagagggaattttctgaaaaatcattttacaaccttttgagcacagaaagtgaatgaagaagagccataaaaaggcagccacaaagaaaagcaaatggttaatttctggaaaagagcattgcgttttgtggaatttaaaactgcttcttctgcctgaggctatttaaaataattttatattttagaagcttgaagagatttaagtacagcaatgtgccccttatccatagctttgtttttcatcgtttcagttacaataagaattctgagagaaagacagaaattgctctatcattattgttataattgttctattttgttattagttattgttatcaatctcttattgttcctaatttagaaattaagttttatcataggtatgtatgtataggaaaaaaagcatatatatagggttcagtactatccacagtttcagatatccactgggggtcttggaatgtatccgctgaagatagggcgggatgctttaaccatttagctcaggattatacaactataactagtagagctgagatttaaaagtctaagcccttagccatggtggatagtcagttaatagtgagcttttattttgcttgattgtctgagtttgagctgacaggccgatgcacaagaggggcagagtcctagcttttttgaggattgtcatttcgcaagggcaatattccttctcatatttatctcaagcccttcatgtataaagacttattcaagacaaaagggtaaacaacatttagtgaggctgaaaattgcacagtttctgttctgtaacgcctcctaatcctgagtttgtctcttctcctcatctgcaagagccctcgtcatcacaacagacctcagcatctaggagattggaagacaccacagaattctgcctatgtgattcacaaatccttcttgctatttgaagctttgcaattctgacttccaggccctctagggaacttttagtgcagggatgcattataacttaggagatcatgatcttaccaatcctggaaaacatagaagcaattctgctgaaggagagccattactggccgatgcagtagaattattatttccattttagacctgagaaatatctgcctgctgttagccaaatgtggttctcccatcaggacccagtaaagaacttggccattaggactactcagcattaatcatttgagggaatagctttagccttatagtgactagtgtgagtgaatcaatatgtttattcctgctaatatgagccaagctttcttctgtaaaagaatgaacttacaacatcataagatttatggttttacacaatactaataaaatgacatgaatattttttgcacgtatgaagcatcttctattgtgaagcttttttagtttatgccacacacaaaaaaaggattttggtaagtgctacaaataatgttaaaaaaacaagatggaactttttttttcagaaccagtagcatttcctacatgtaaatctatggtttccaatttcatattctccagaagagctgaattcatttcctttctctcttcttcagagacttttcttgaacactggctgatgccaggaaagtctgtaaagacagaatggacctccctcccttcttttttatttttatttttttaagatacaaggactctgttgcccaggctggagtgcagtggcatgatcatagctcacttcagcctcaaactcctgggctcaagtgatccttccgctttagtctcccaagtagacgtgattacaggtatgcaccaatatgcccagctaattttattttatatttttttttagagatggaggtcttgctatattgctcaggtaggtcttgaacttctggtctcaagcagtcctcctggctcagcctcctgcagctctggggttacaggtgtgagccaccacacccagccttcccttctttcttaacaccattctccatctcagtactgtcttaggaacacagaattcacctatggggagttcaatacaaaactcccagtttagaaaatgggttctttggtgcctcttaagtccaaaaatattacatgtgaggatttattttagatatgtagctcaagttttgaaatatcactgctacctattctataaaaaatgctgtgtttgagaatttgtattaagtatacctctcaggacaggaactaccaaataaaaatatttgtagaatataaatagaatgtagacagaagctcagctctagcaacagttattatgaggctatcatagaaaatatcatttgtcctcttaagtctgttttacacactccccatcttttctgtgacatggggagggtaagagctgatttgtcaggctttcctttattttggtttcaatatgaagtaactattccaagtcccaggttacaagatttttaaagtggaattgtttttacttagcctaggccccaaacctggagtaggccctcattttgcagagaatgaatatataaaatttgtagtgaagcacctagatctaacatgatgggccaaattatttatgtataatgtctataatttgtactacagcctccaaaaaattttagtttcccattttttcaatgagaaagataaggcttattattatttaatgagtcaaggtcacataaaagtagcattcaaatccaggttagtttagtgccagtatctcctttttcaatcacttgtgttaatttacatatatgacatatgtctataattgattgaacaaggaaaggaattttaagtgatttatttaaagtaactaaactaaggcaatctaatgaaattactaagaatagtgatttggtgagtgagtggagggcaagtggaaagtggtagtaatgtaacttttacattgttatgtgtcacagcagaaaaaccatatatagtatataaaattggaaaatcatgaaacaatgggacacacacatagaaggatccaacagagactcttaaaagtcctttttccactgaggaagaggacagagattgcaaaaagggtagctattgatttttattgtaagccctttggtactttgatattttgtttattatttgataaaatttaacaagattttactaaaaatcaaaaagttatgatctataatatgtctttcacagtaatctactgataacctatcaagatgctttaaattgtagactaaaaaaaaatcagagcgtcttcttagtttatattcattattgttattcataatgtgaaattgcagtgaaagagcattaactgagcatctaatatgttcaaggccttgttctaggttttataggagataaaagggggatacagtttgatcccaggcttcaatgtgttactgtctagttgaaggtgctctcaatgaggaagaaatctagatatggaaaaactaggaacttaaacattttctttgtctgcttcatactgtgctaggtactctgactcatttttcatagaaaacatatactatagaaaagacaaaatataaagagctatgtgagttcagtggatagaaaaatggtttttacttatcaggatcaagaaatgcttcctgaagcagagaattctaggtgggccttgaaagcaagaagggatttctatggacaaagaatggatgggaaggcattgacatatttgctaatcaagaaacttatgtttgaaactcatttttttgttgctgtttctcttgtataaaagtgctttgatgccctggaagttgaggctgcagtgagctgcgattgcatcattgaactccagtctgggtgacagagtgtgactgtcttaaaaaaaaaaaaaagcctagctgtaagctaggtacagaatgaattttaaaaatattgcttgtccagctaaagactttttattaaatgtaaatgctgttaccaaagttacagaatcacaattaagtattgagtataacttctgtccataaaatgtggggaaacttaaagacaaaatggagatcacatggattttgtagctattcttgatttttttttaattggtcaatgtgtttccacatatttagggatcttcttagcttccctctttaatttatttgtttagtttccttaggattgtacttaattgcatgttaattactgatgcccagtggggctgtattttaaagaatcttcagtttgaatctatagtatctttaccatcttgcctagtttttcaagtctttgtgttctgatccaaaggccaagatatctgtggctatggcaaagaactcagattcttaggtttttagaaattataacaaaaagctatatgaataacaataaataaataaaatcagtagtacgaagtaggcatagtacattttttacattgaagtcatttaatctctctcacttgggcactataagttaaaggtggagattgtcatctttgaagattcattggtacactgatcactctccatttaggaaagcttacaaaagtccttgttttacagctccctctcctttgtagtgttagacttaatgaacggcttattgtcagaagttccagaccattacattatactctatgaaagagtattctgtatttcttctagagcagagacagaaaaatatcttatatttgggggactctatgtgtgatcataatgtttagcatgaagagaatgttgcattttgaagctgtttggtttatacattttaaaaaattacatgaatttagaaaatctgttatattaaattggatatttcacatctatggtttaatatctgcagtctttattttcagtcttaaatcctgaactccaaataattattaatctccacaatcccactcttgaatttttacatgtctttaaagttataaaagtgttttgtgctaagggcagttgcaatggctcacgcctataatcccagcactttggaaggctgaggcaggcagatcacttgtggtcaagagtttaaaatcagcctgtgaaacatggaaataccctttctctatacaaaatacacaaattagccaggcatggtggtgcgcacctgtagcccttggctacttgagaggtgaggtgggagaattgcttgagcctaggaggttgaggttgcagtaagctgtgttcgcaccactgcactccagcctaggtggcaaagtgagactttctctcaaaaaaatatttttattcttattgtgaaaaacataaaaaagataaagtataaaacaaaatctacccatcatttcacagctgagggataacttctgtacctattttgagtattttcttcctgttatatttttctagtcatataaatgggtatgttttttaatatgcagtcatgcaccgcatgatgactttttcatcagtgatggaccacataaaccatggtggtcccattaagattataatggagctgaaaaattcctatcgcctagtgatgttgcaggtgttgtaatgtcatagtgcaatacattactcacgtgtttgtggtgatgccggtgtaaacaaacctactgtgctgccagttgtataaaaatatagcacatacagttatttacagtatataatacttgacaattaaactactatgttactggcttatatactctaccttttattgttgttttaaagtttactccttttactgattaaaaaaaaaagttaactttaagatagcctcaggcaggtcttttaggaggtattccagaagagagcatttatatcatgggaggtgagagctccattcatgttattgcccctaagaccttccagtggaataagtgacattgataatcctgaccttgtataggcctaggctaatgtgtgtgtttgtatcctcattttttacaaaaaaagttttaaaaaagtttttaaatttaaaacatagaaaaatgcttatagaatatggatataaagaaagaaaatatttttatggagctataaaatgtgtttttgttttaggcttagtgttatcacaaaacagtcaaaagttaaaaaaaatctaaaaggttacaaagtaaaaacttaccataagataaatttattattgaagaaagaaacatttttaaataaatttaatgtggcgtaagtatacagtgtttataaagtctaccaatgtgcaatagtattttaggccttcacattcactcaccactcaatgactcattcagagcaactttcattcctgcaagctccattcatggtaaatgccctatacagagagaccattttttatcttttatactcgatttttactgtaccctttctttgtttaggtattcaaataccattgtattacagttactacagtattcagtgcagtaacatgctgtacaggtttgtagcttaggagcaataggctgcaccatgtaacctaggtgtgtggtaggctataccaactatgtttgtgtaagtacactgtatgatctttgcacaatgatgatatctaccaatgcatttctcagaaagtatcccatccttaagtgagacatgactgtacttgggacatgtctctgtgtgtgtgtgtgtgtgtgtgtgtgtgtgtgtgtatgtatgtatgtatgtatgtgtgtatgtatgtatctatctatctatctatctatctatctatctatctatctatctaatctatctgtctatattcttgtattggttttcctcaccttttcattataaacgagcattttcccacatcattaagtattctttgaagacagaatttaatggcctgtatgcttcctttatggtgcttcttttgtgtcttatacttctatactgccctctcacatttaaaaaaattattaaaggtttttggaatctttgttattaaaaattctagttatctagtagtcatagctacttctacctgagtttatgagcccctgcttatgacaaataacaaataaataaattgggcttctatttattagtctatttaggaagtcacttgttttttagcttatgtaatgtgttttgtcttgatctgaagtattagaacacaggatcattttactgggttatgttggatttatttggcaaatccagttctcttatctccaatagcctgtgtttgtgactgcttggatatgggtgattttaaagactagtgaagagcatggattgtgattacatatttacacctcaatagctgtgtgactttgggcaaattactccattgcatcgcaccttcttttcaagattaaagcctaaatgatatcataaagtacatagcccagagccaggctgataattgaatatttttgttatttttctgtcattgttgtaattatgaggtctttggccatcaaatagaacaaagctgactagccttagttgagattgaaaagcatcagaacttttctttacccattagaagtaactggccatggaagaaaaaagcaaataacccattttaattctggaccagcaggaaggcgtctttgtctgtcctgtctaagaaactctcataagtagcttcagactttgcaatgaggcagctgcattagtgcatctgaaaagttcactgctgtggctggaatgttaaatagcagttcttgacagtgaccgaaatgcatacctggggtctcaaggaaaggacttaggacttccttttcgttattcacattgttcaatacctagtctgtctctatataaatgccagtgttgctttaataaattattatggatgatcatagtaatacctgtagctgctatttactgagtgctgactacgtgacaactaaggtttttgtgcattatctcatttaatcctagtggctgctctgtgagtctgttatcatcatccctatttcacaaaggaggaaactaaaatttagagaggttcagcattatctaataagaatttcaacgttggtctctcagactccagaatctgagcttgtagctttgctcttagctctgttgttttggttttataattactgcatagcctcattcattcattcagcctgagaatctactttgttgagaatctacttcatgccagctcctgttctaagtgcttgggttatagcatgcaggcaaagtccctgccctcccaaggcttattttctattaaatataatagaatattaagttaccttcaggtgttttactcctagaataagcgttcctgtgaggctatgagttatcttattcttgagctttaggaacgtaaccgaaattttgtataaggctgagtatacctcctaagcttatgagatttctacagaatttctacaaaatactggaagctagggcatgttccattttatgcatcaggctgtttattttagcattggctttttagccctggcagactcctcaaatcggagacgttcttactgattactttaagaagcttttagaaggtttggaaggtttattgttcgtgataaagctactttttgataccttggtttctttgacttccttaaatgttctataggtgtatggagcagcataaaaactttctttctttagaacatgccaaaaatacatcagacaaacctagaacaagaggcttaattacttcatagaataaattttcaaattcggatacagttgaaaaataaatgatgaatcggggaggtctaattatgagggacctaagtattaataccttgtttccgtaatatcaagaatattaaatccatccttaagaatgaattattataagaagaagatgatatcataaagtgtttgtgttaatgtcacatttaatccatgtggaagctgaaaataattttaaatatccttaggtagaggctatgttatattttttacgtagggaattatcagtaaatactatgaagtgtgtttccttataaaaaagtagttgccttattttgcattggaaatacaagtgaacctttttggtcccataaaatgcaaatggcttgtatatgttcctttttttttttttcttaagtcctttgtctaagaaggaggatcattggcaaaccagctagccattcactttggattttgacatagcttctccttgggaccctaatgacagactctctgataaccagtgcaaactccatgaatatctttcatttctctagaaggaggtgtggatttgcaaggctaccagctggatatgcaaatactacctgacgggccaaagagtgatgtggacttttcagagattcttaatgcaatacaagaaagtaagtttcactcaaattttaaattcgccgtgagagaagaagctattataatacttgggaggggtaataaactagaaaccttagatgtcaagctttaaaaaatattaacaaaatgatgtcttgaaagagatactgtgcaaaataattttgaaactagaagagatagtgaaagaggtttaatttgtgagattaaatcacataatagtggaatttttgaaaaagctataacggaatgatcaattctgtatattgtatttcatgtaataatatttagtaaaccttggagtattgtaaatttttagatttcttgattaatcataatcaaagaaaaacctttaagaaaacaaaatacaattcctctgctcaaatggaagtaataagagggaaatgttagtggagcaaggtgaaatcaggaacttcttctccaaaatgagtatctggagtcattgatgatggactgcatgccagaagtgaaccctcattttctaagcattttgagtaatcaaggtttgctcttcttcgagtattttatttctgttttatagctttcactcagaattttatcagaatcaacacatttactcaagttaaatatttagcattgaggatgggtgatgcggtgtctcatactaagtcattaccattgatatttcattatcagagctctaattctagatgatgaagctcctcttaatatcgaataatttatctcatgttggatttgagggattttgatgtgaagaacattgtataaacaaccattgcaattttttcttacttctagttttgggacattgcattttcttttctttttttattattatactttaagttctagggtacgtgtgaacaacgtacaggtttgatacataggtatacatgtgccatgttggtttgctgcacccatcaactcgtcatttatattagatatgtctcctaatgctatccctcccccagccccccaccctacgacaggccctggtgtgtgatgttccctgccctgtgtccaaatcatctcattgttcatttcccacctatgagtgagaacatgcggtgtttggttttctatccttgtgatcatttgctgagagtgatggtttccagcttcatccatgcccctgcaaagaacatgaactcatccttttttatggctgcatagtattccatggtgtatatgtgccacattttttaaatccagtctatcattgatggacatttgggttggttccaagtctttgctattgtgaatagtgccgcaataaacatacgtgtgcatgtgtctttatagtagcatgatttataatcctttgggtatatgctcagtaatgggattgctgggtcaaatggtatttctagttctacctccttgaggaatcactacactgtcttccacaattgttgaactaatttacactcccaccaacagtgtaaaagcattcctatttcttcacatcctctccagcatctgttgtttcctggctttttaatgatcgccattctaacttgtgttagatggtatctcatggtggttttgatttgcatttctctgatggccagtgatgatgagcattttttcatgtgtctgttggctgtataaatgtcttcttttgagaagtgtctgttcatatcctttgcccactttttgatggggttgtttgttttttttcttgtaaatttatctgagttctttgtagattctggatattagccctttgtcagatgggtagattgtgaaaattttgtcccattctgtaggttgcttattcactctgatggtagtttcttttgctgtgcagaagctctttagtttaattagatcccatttgtcaattttggcgtttgttgccattgcttttgatgttttagtcatgaagtccttgcccatgcctagggacattgcattttcttgttaactttcttatgaataattttatgctttttagttatccccatttatcattataccgtcctcttgaccttatgagatagttattacctccaccttacagatggaacaactgagggtggaagaaattaaatgacaggggaagatgataataatggagaccagactgcaatgatggctgtttgttccttcatttaattccttcatgaatgtgctcagtacaggatttaaacacattgaggtgaaggatcctgaaactgaagattaggctacttttaaaagaaatgtttttagcagagaatataaggggatcagctatttattccggttgaacaatccctttatattacattaatgaataaaagagaaaaaatttccacaagagaataaaaatcagattattagacattggagagaaaataacttttcatggaaagttataaaattatgtaattacttcacttgatttgaaagatgataggttgtacagtgctcaaagagttcaaattttttttcaataaatgataaaagttggcttccatgcaagtgctagaggtgaacttaaatttaaggagtgggggctagaatgaacttgcatcagaatgaactaaaggttagtaaggtactatttttatagtaatttttattaccagatcttagtaaagacgtgtgtatctgatgttaactgttctgtagtttagaagggtgatctttctatgaacaggtagaggagtataaatttatgagtacttaacagaagaaaaaggaaatgttacttgactttaaaatgcaaatccagccctttataagtttatgcattttctattgctttggaactaatttattttcttgttgcaaacaagttttgtgctaattagatttgagaagctgcccacacaggctgggtcatttctggaaggaaagattttgggccattcagtctctatttaggttccaaatatgatcgaaatttttagccagttcatggaaatctccaagcataaaaataggtagcttggtactttaagggactgtagcttagattatcgtttctggaaagctttgcgagaccatcgttaagtgtgtaaagaatatggagttctgcgactggccccagtgtgtgatgttcccctccctgtgtccatatgttctcattgttcaactcccacttataagtgagaacatgcggtgtttggttttctgttcttgtgttagtttgctgaaaatgatggtttccagtgtcatccatgtcctgtcggggggtggggggctagaggagggatagcattaggagaaatacctaatgtagatgacgggttgataggtgcagcaaaccaccatggcacgtgtatacctatgtaacaaacctgcacgttctgcacatgtaccccagaacttaaagtataattaaaaaaaaaagaatacagaattctgaacatcagtataattcctctcctttttgttaagattaacaagatgatggaaaattttcacttttttcttcaaatgttgtgactatttatatatagtatatatatatatatgtatgcatgtatatatgtgtgtatacatacatatacatacatacatatatatacatacatatatatacacacacacatatatatatatatgagaccttcaagatcaagctagaagtgcatatgtgcatgcttacatgtgtgtatttcaaacatttcttgagtgtctggggtaggctggccatgatggtgttttcccaaagtatctcttttcaatcttaaccctaagtaataatagataagattttctccattttaaaggtgaaaaaactgaatatagctccccaaggatatatggttactatgtgatagagtcaatatttaattgtatgttcatccttgttctgctaaatactaaattaaataaaaatgattaggaaaaatgaactactttgcatttttaaagttgtattatattttcacatcttgatgcaagaattttgccaccatgcttctacattgtgaaatacatttacagtattttatcttttagtgtgcataccctaagtatatcctcatctcttctaaagatgtctcagagtggctggccatactcaagtgctttttcagatcctccatattagatgtacagcttataaaaaagaaaagagttattttaaccatccatccatcttgcctgtcatgtgtcaggtactgtgctaggcataataccttaaggcagtggtgaatgtttggtacaaagtctaattcaggaaaaatgaaaacgttttcagatcacgtcttgttttggtgttcaacaggaaaacaacttgattgctttttaggaacaggcatttacatgtgaaagtataacaagggtgtgtttgtgtgtgtgtgtgtgtgtgtgtgtgtttgtttcttttcgttgatgttatttgtcccttcctctctattctcacccttcactctccattccaagatggtagtcaggtaccttgaactcctttgtttcagcagagttttgtgttaactaaagttcctgccttttttttctgaaagcctgagcttccaagactgatgcttgtatggaagaagaaattgcaagagagatgccctgtagagggagccaggcttctggtagggggaatggaaagggagggaatggctatgttgcatgcctgggagactgcaggggagccacctgaactgtcagtcacacagagagttcctggcctgagaaaggaacttaggagtctctgggaagggggcagtctcatcttcctgtttctttgttttatctccagtgccttgaacagagcatggagtgtggtaggtgcttactaatatttgttagtgattgagtgaacgtgtggaatcactggagacttgaaaggtgggcagctcagtagtaaccagtgtgtcttggacacctgactgctctttctaaatgttctgctctttacaaaactcctaggacctttgcacagttctggatacatgaggcaggaaagtgggagtgtcagcaataactgaaattaaattgtccacgaagccggtggaatgggaacttgcagatagatttagtttgatgcaatgataacaacattacagtgcaattcctactcttgagttcatctagtaagattcaaaccctccatccatagtttaaggagtggagtgcctactcaaatcttatgtacagtagcacctattaaaacaaaaataaacaaacaaaaagaaaaacactgcttttttaatcaccaaagttttcaaatccgaacattttaagaggtaagcattttaaaatatttccttctgaaacttgattgagaatcatgtcttaaagctctgcagtccatgaatcaggtgtatgtgtgtgtgtatgtatgtgagcatttattacattagctggctactgtgaagcatgtcattcaaaggttatactgtactttttcattctcactttaaattattttcaatgtccagccctttttagagaccattcatccccctaccatttgttgcccacccctcttgttttgctcctagtttttcctttcatgattcccagcatatctggatatatactgtagggacactcttgaatggcatccataccctgaaacacatgattgtgttgtattccatcaggttctgatgaaggaaagagggcacaagatagtgtttgcagtgagatctgaggagttaaaaggattgtgggatcattgttatcctgcagtctgtttgtgcttgcacgtgtgtctacataatcatatagctgtgcctacattaggggtggtgtatacttttgtggctgaggagactgagtcatttctcagtgacaccgagtgagtcactttgaatctaattctttagccctgatttccaattttatttttaacctgcatggtcatgccatttcagaggagcagatggcagggtatggggtatgggggtgagcggggccgggggggctggcatatattgagcagataatcttgtctggcaattttgtggctgaccttttacctatgttattttatttagtctttaactctctttgccttaatttccacatctgtaaaaggaaaatagtaatagtacatctatgtaaagcctttaacatagtgcctggtacacagtcaggggtgtataagtgttgactgccacctttgtctttattcctcaatcattcattctgtctgggaaattgtatttccatatttagaagataaataaatatttagaaaataaagaaattaaagcttgaataagttaaatatcccaatctaatagctaataagtggaagggctggcatttgaactcaggtctgtctgaatccagagctcatgctctttccaaagaaggtgaaattgtggtcagtagacttggaggctcttttatgcagagcatgaatgacctcactttatgttatggaaaggtcgccaaggctaatgaatgagcaaagattgaattaggcacatagttcttctctaaatgtcattcccagggctgtaagaagtgccatcatcattatttgcctttttatagaagtaaccaaggtgttcaccttttttttacaatgaagtagtagtaagagaagctcttcttagcaaatacgctaaatcagaaacaagttaatgatctcaaccccattgtggagtgctggggttatatacaataccatcatctgtgctgttttataaacattgccattattgagccaggtgatgacaatgacatctttttttattttaatttttaattttggtgggtacatagtaggtgtatatatttatggggtacatgaaatattttgatacaggcatacaatgtttagtaatcacatcagtgtaaatggggtatccaccacctcaaacatccattctttctttgtgttacaaacaatccaattatacttttagttttaaatgtacaataagttattattgactctagttaccctgttgtgctattaaatactagatcttattcattctatctaattatatttttgtacccattaaccatccccacctcccttccgctctactactcttcccagcatatggtaaccaccattctactctctatctccattagttcaattgtttttagtttttagttcccacaaataagaacatgcaaagtttgtctttctgtgcctggctcatttcacttaacataatgacctccagttccatccatattgttgcaaatgacagaatctcatatttttatagctgaatagtactgcattgtgtatatgtaccaccattttctttatctgttcatctgttgatggacacttaggttccttccaaatcttggctattgtgaatagtgctgcagtaaacatgagagtgcagatagctagtatactaatttcctttctttggggtatatacccctaagcagaattgctggatcatatggaagttctatttttaattttttcaggaacctccaaactgtccttcatagtggttgtactgatttacattcccaccagcagtgtatgagggttccctcttctccacatccttgccagcagttgttattgcctgtcttttagataaaagccattttaactgaggtgagccctgatttccaactttattttacaatgaaattatatctcattatgaaatctgaacattttacaatgagatttctcattgtagtttttatttgcatttctctgatgatcagtggtgttgagcaccttttcatgtgcctgtttgccatttctgtgtctccttctgagaaatgtcttattcagacatcttgcccatttttatttggattattagatgtttttcctctagagttgtttgagctccatatatattttggttattaatcccttctcagatggatagtttgcaaatattttctcccattctgtgggttgtctcttcactttgttgattgtttcctttgctgcgcagaagctttttaacttgatgtgatcccatttgtccatttttgctttggttgcctgtgcttgtgaggtattactcaagaaatctttgcccagtccaatgttctggagagtttctctaatgtttccttttagaagtttcttagtgtgaggccttagatttaagtctttaatccattttggtttgatttttgtatatggtgagagataggggtctagtttcattcttctgtgtatggatatccagttttcccagcatcacttattgaagagactgtcctttctccaatgtatgttcttggcaccattgtcaaaaatgaatttactatagatgtatggatttgtttttgggttctctgttctgttccactaatctatgtgtctgtttttatgccagttccatacagaaattagttttaaatgaatattttttttaaatctcatgactttttgtttgtttgcaaaggcatattttaaatctcaataactttctgtggcagaaggaaggttcctgctgtcatatctgtaataactagaaccgcaggttctttagggagatgtcaacacaaccatttaattgttgccagaacacactagcagaagtttctaaacttttgtaaaagcagtaaaatgtatttttccccaatatatgatcaacatataacttcaatatacaaaacagaaactgagttgtttggtataggtaggggtagaaggtgagccttgcccgctcagttgtctctttgtctgctccatggcccctgaaactcctcaaaagggctgtagggttccagagaacagagattgaaaactgctggcctattagaagggagtaaaatcggctaaggaagcattatgtcctttctaattgctttatttatttattttgagtttttaaacttaaacctccttttttcttattggtaaaccaggcagcctttgccttagggatgctgtcaagatacatttgaagaataatgagcatctagagagtcttgggcttgctcgtgtcatatacatgctaaatagtgtttagttcttaaaatcccagcctaaggtgttcaaagctgtattgtgtctttgtatttccgtgaatttttaagacaataatggatctatttgttaaattttagaaagttgtcagagctgtcagactacagatgtaaagtctagctttattcagataaatgttgaaatggcaacaagataattgcttggtggttaaatgacttccattcttgaaagccaaacatgatttaagaacagtaaaatgcttcccacaaaaacaaaagccagctagaaatggtatggatttggggtctgaattgaatgaaaattcatctttgtcacttactagctgcatggccacacttagcatttctgaacctggcttctttataataatacttgtctcataggttgttttgagaatgaaatgagaaaatagacctgaaaatcattaacacacagcaggctgtcagtaaactgtaattcctatctttgtctcctttcccacttccttcatgtttaatctctgtgattctaagagagaagtagacattttcaagccatcttactaaggtaatcagaataagaaaaaactgaaaattgatgtcatcctacaattagcttttatttatcttaaaatgcatattgagtgtctcctacttggtagcccttaagccgaattggagctaccttagctcttcaccttaaagggaccttagtctaaagacatagagatggacttattataaaacaatctggtaagtgttaaaattgagatataaacattttttgcattctaaaatattcccggaggtgttctttttttttttttttaagtgatactttgaggtcagtatgtaatcccttgagaattctgagtatcagatgcaataacttggaacttaggacaaaaatagtataatgaactggcgctctagagaatgaatatagatacttggattatgctgcaaagccctcttctgtcttcttcaatgacctgtaatttcaccttcttttctctgcatctgaaatttatatatctgaaacttctatactgtaatatcaaggtggggttattttgctgcatttggaaaatagagaagtaaagaaaagagcaatgaatcaaagtctttgatttttttgattgtatttcttactgtcttctaggctatttctaaaatacacttgctggtttttttttttcattgcctttatagcattgattcccaaactttgttctcttgcctggaagtgtgagggcttcccactcatgtcatgtccagcacttaactctaaatctttgttcaatgaacaaatggcagaaaataattcattaattagttcgtccatttatttgagtccttgaaatatatttgtgatctcttatccatagggtattaacaatagctaacatctcaaatgattttcactggaggaataattgaaataattgcaaatagttgatttgattagtagatttagtattaccaaagtaaattcaccttttcatcatgtaaagatcaccatgatctgcctgcctgctggtcctctcctgacttttctgctctgcctccatcctgggatgatgtaaaccaagccagctgtcataaatctctgagtttaatgctttactcagactctttagctgatttttcgtctcccaggcaatttaaggtccttgatcctcgttgttcagttataatatgtgagtccttgctgttttgttcccaagtcattttttaggctgagcttctaatctttgcaatagggaatcatttgagtatcccccttgccttcccaaatgcatggtatacacctaccctgaccaatctgtgctgcctaattctgttcacacagcccttcctgggtctgaatgaaatgcagatctattacttgagttgcatggtagttttgcattttctctccttcttgtcattctttttttttttgcatttttttaaaattatattttaagttctagggtacatgtgtacaacgtgcaggtttgatacataggtatacatgtgccatgttggtttgttgcacccatcaactcatcatttacattaggtatttctcctaatgatatccctccccgagccccccatcccacaacaggccccggtgtgtgatgttccccgtcctgtgtccaggtgatatcattgttcagttcccacctatgagtgagagcatgcggtgtttggctttctgtccttgtgatagtttgccaagaatgatggtttccagcttcatccatgtccctgcaaaggacgtgaactcatccttttttatggctgcatagtattccgtggtgtatatgtgccacattttcttaatccagtctatcattgatggacatttgggttggttccaagtttttgctattgcaaatagtgccacaataaacatacatgagcatgtgtctttatagtagcatgatttataatcctttaggtgtatacccagtaatgggattgctggaatggtatttctaattctagatccttaaggaattgccacactgtcttccacaatggttgaactaatttacactcccaccaacaatgtaaaagcattcctatttctccacatcctctccagcatctgttgtttcctgccattctaactggcgtgagatggtatctcattgtggttttgatttgcatttctctgatgaccagtgatgatgagcattttttcatgtgtctgttggctgcctagatgtcttcttttgagaagtgtctgttcatatcctttgcccactttttgatggggttgtttttttcttgtaaatttgtttgaattctttctagattctggttattagccctttgtcagatgggtagattgcaaaatttttctcccattctgtagatttcctgttcactctgatggtagtttcttttgccgtgcagaacctctttagtttaattacatcccatttgtctattttggtttttgttgccattgcttttggtgttttaatcatgaagtccttgcccatgcctttgtcctgaatagtattgcctaggttttcttctagggtttttatggttttaggtctaacatttcaatctttaatccatcttgaattaatttttgtataaggtgtaaggaagggatccagtttcagctttctacatatgactagccagttttcccagcaccatttattaaatagggaatcctttctgcgtttcttgtttttgtcaggtttgtcaaagatcagatggttgtagatgtgtggtgttatttctgaggactctgttccgttccattggtctatattttggttttggtaccagtaccatgctgttttggtacttgtagtatagtttgaagtcaggtagcatgatgccttcagttttgtttttttttgcttaggattgtcttggcaatgtgggctcttttttggttccatatgaactttaaagtagttttttccaattctgtgaagaaagtcattggcagcttgatggggattgcattaaatctataaattaccttgggcagtatggccattttcatgatattgactcttcctatccatgagcatggaatattcttccatttgtttgtgtcctcttttacttcattgagcagtggtttgtagttctccttgaagaggtccttcacatcccttgtaagttgtattcctaggtattttattctctttgtagcaattgtgaatgggagttcagtcacgatttggctctctgtttgtctgttaatggtgtataggaatgcttgtgatttttgcacattgattttgtatcctgaggctttgctgaagttgcttatcagcttaaggagattttgggctgagatgatggggttttctaaatatacagtcatgtcatctgcaaacagggacaatgtgacttcctcatttcctaattgaatatcctttatttctttctcctgcctgattgccctggccagaacttccaatacaatgttgaataggagtggtgagagagggcatccttgtcttgtgctggttttcaaaggaaatgcttccagtttttgcccattcagtatgatattggctgtgggtttgtcataaatagctcttattattttgagatacattccatcaatacctaatttattgagagtttttagcatgaagggctgttgaattttgttgaaggccttttctgcatttattgagataatcatgtgttttttgtcgttgattctgtttatgtgatggattaagtttattgttttgcatatgttgaaccagccttgcctcccatccttcctgtcattcttaatggacttctcagagtatttgactctctttctcatttaatgaacctaacagcaatattctaccaggcagataattatcaaacatttttctatttaggagaagaagtctaaggaaggtgatgggattcattcacaaatgaccctgtttggatgaacagcatctttgtgatgttcgtgcccatggatagaaaggcctcactcccactctgactggacagtgagctctgagagcagggccatgcctgggctctccagtacttcagccccggttcctagctcagctcagtgtctgcccgtggtaggcactgaatatacttattgattaaaatttattttaaaaattggttagtgttggaagttgagagttgcttttttcttcttagagaatcaatgtaagtttgaatcaaagattttattttgtttctaaaacttaccttgtagttatagctgataatatcagaaacagtgatgaaatatggatgaagtgcacatactttttatgcctgtggagtgtttatatggtctacagtcttcttactgaccacgggttcagctggacattctctcacagcagactttctaatctctgctgaagatactgagaggctggcaagtgataaggttggcttagtatcacctattgtctaacagattgccatgactgactgatttccctgagctcaagtggcagtagccccatgacttccagacagtgattctgatgggaaagaaagagctctcttcctttcccaagttagctgctccttctagaatcaaatcccttgggcttttcatgaagagtaggaattctcaacttcagcaccaattaatattctaggctggatcactctgtggtaggggctgtcctgtgcattgtaggatgtatagcggcatccctggcctctactcactgaataccactttcactgtccccctctccccagtaatgacaataaatatatctccaaacaatgtcaaatatggtctgggagacaaaactggtcccagttgagaaccacggacatagagggcattgttgaactgattgtgccagtgccagaaagtaatattgatagaagatgacctgatattttctatccttgggaaaagcctaaggggatacatacatatatcaagagtttctccttagtatgagccagtcacctagacatgaacctcagtgtccttgttccccctttatctcacaccccgtcctaaaccatttctcataacaaccattccaacttgtaaatatctcttctgccttctcatattgataagaccaaaatactcactttaagctcccagagtctagctagaatcgacaaatcagcatttgttgtgggtctgccatgtgtcagtcaccctgctaatatgcacattgatgtaatcctcttcgccaccctgagagagaagtttgctattcctgtctcaccagtgaggaaacagaagcacatatttacacagctaagtggcagagttcagaatagcgagcaggtcctctgacttggttaaacgatacttttatcttattgttcaaatatcatcaacatcgacttgaaatttaatttaatcactgtctgcttgaaaatttaatcacattacttgaaaccatggaatcctggcttgtgaataagaatcatgttaggaaaaccatatgccaagtcccagaaccatagaatgttagaggaaaagggctctcagatatcgttacattgtgaccatcttcaggtcatcattctgtcatttaacaaatatgtgttgaaggcttacctgtgccagagcctctgtacatcagtcaagacagacaaggtccttgccctatggaacttacattgtaataaggtaaacatccaataaacaagtctaataaataaatgaacaaataagataattaaggattgtgttaagtgctggaaatgaaatgaacaatgagaggacaacaattatgggagggagatctttttacatccagtggtcagggaagttgtctttgatcttgacagctcccaaaacactggacatattagtcttcctcaaaaagtgttagttcctctccataagcacctagcacagtacctggcacaatgtaggtgctacaacccttggctgtatgaaaagaccatggttttttttctttgtagccttataggtctaaaatcctataatatattgttttagtttccttttggtgctatagcaaatgactacaagcttagtggcctcaaacaatatgtttattatcttatacttctggaggtcagaagtcccaaaatcaagactctcctctctggaggctccaggggagaatctgcttttttgtcttttctgtcttctaaaagccacccgcgtttcttggctcgtggccgcatcctgtatcctcaaagccagcagcatagcatcttccaatctttctctctgattctggccttcttgcctccctcttcttaagacccttgtaattacatcaggcctacctatatactctaagacaatgtccccattttaagatcctttgtttcacacatctataaaatcctttcggtgataaaaaggtaagatattaacacgttctaggaatcagatcacctttgggggggtcataattcaccctctcgtagttagcaataaatgttaactttattcctatgcccattatattttacagatgaaaaacttggaaagctaaaagtgttgcctaaaatcacatgcttggatatagctttatacctggtcatctcatctacgtagatcatctctattctctctatatccaaactctgctcttttcattagagaattcaccacaagttacgtgtctttgttttcttcagttattgccacaagggcaggaagccaggtcacttttattcaccaaggtgcaatcatcacacagctctatgcctgacacacaatgtgcacatctctaaaatgtttttgaatgaaagaatgaatactgtattacgtgcttgggtaagaagaacccaatccctcatgaattattttgtgcagtggcttctgacaggttataaaccctcagccatttttaaagcatcaaaagaaaaagtgaactgcaatgctggcccataattgaagtggataaaacagaagggactcaacccatatctttcctctgctggtgatgaacttaaatttctggcgtgctgtaaggcactctgcatttgaacgtggtagcctgtacctagaaccgtgatatacagcactttatatattgacatgttattaacgtcaacagtcttttgagagagcttctgaatggctcacttcattatttcaattcaggataagaggaagaaaaaaggccaaaaatctaagtgcatgctttattgttgcattaggttttctctgttctgtcttagagaagtaacaaaggaggaaaaaaatcacagttcttactgaatagttcaagtggcacgtttatgggttcacttggcaagctatacgacacttaaatgaaaaaattaaatttaatttaaaagtataggtcatctccaacccttttccaacctagaagtcttaaatcaaagtaccttatgccaaacaactatgtgaaggaaagcgaaacaaatataacacctcctgctatcatggaagacaaattatatttacattacggatgtactttgctttttattttccttaatcttgcctaatgaatacactgtttggtcaaacatgttttatgtctgacatacttttcttttaggaaataatatgcttgtcactcaaggagttaatgaaatgatgagaaaatatgaacccaaagggagatgttttctcttttagcattgctttcaagatcccagatttttacccaccttataatgtatttactttggttctagtggccaaggatgtcaatattctttttgatgaattagaagctgtcagcagtccttgcaaagatgacgattctcttcttcaccctggaaacctgactagtacttcagatgatgccagcagattggaagccgggggagaggtaagagtatatgatttcttacaaatgtaattcgtgatccaggcaggaacctgtgaagcatgttccaatggactgtttaaagtcataatctcattgaactgtaggctcttgtaaaacaagggacaggttttatattcctttgacatcccccatgtctaagcatatttcaaggatcctaaatctacctatacacaaaacaaagtttcagtttttcttaaacctatcatttttttaaactgtccgtcattttaagatagcctacattcttgagtgtctcccactggtacaaaataaactttacagggatgggcttccttgtatagatcccccagtgggtagaatagtgacctaaaatgcaccagccttcagttgattgtgttgtctgaagtctctctgagtttccatttgcctctgtaatctggaaacttcattgcaactgtaaatagacctatctatttgtgtgccattttggaaaaattagtattttttttggaggcattcccctttgttcaggttgtgtctcaatagagtttaatatttcctttgtacatgtactgggtacaggtaataggcacaccgaatcagagtaatttatttattgcatattcctaaggtttttatattccagagctagttaactgctaaaaggatgacacctggaacagagaaaattgtttactcttgccaagctttgcagacttcaccccacaaacaccatatgcagctatccaagtttctttttctgttttttttttttctgtttgtttcattaaaaaaaaacactcattctgttattatctgtttacacagatactttggaaaccataatgtggcgtaaagaatggactttgaaagggacctcagacagcaacttgtctcatccctgtaacttacagatgaggaaacagtatcagaaatattagggctttgccaaaggtggcacagctcattgttctgcttggagccaatacccctcctaatgtcttggctgaagccatttttgaaggcagatgctaatatgctgaattcacaggacagccttcttgcttggcaaataagtgttaactaaagtgcttattcaggtagactcctgagtgtctcttaatgtaaaatccaaaacatagtgaggattggtcatcaattgaaaatgtctacatcaagacatggtacatggtcattccatttccccagctgagatgtttttttcgattaaggtttgtgcaagaatgtggtttctagcaatggcccttcaggtctggcatgtttaccttcttcataccaccattggaaaagatagaatccacccatccacttggctgggtttatagacacaattttgaaatctattaggctgagaaatttggctccagcccagtgagcccatacttgatggtctctttcaatgttgtacagcaagcccgaagagcctggatgaaaattcaatccactccttttgttctttactttttaatattactgcaaaataatatttgtaacttctatgtaagttacaaagtatgataataaaatgaacacctggaaccaccatctgatttatgaaccagaatgctatttttcaaattatagtgacaaactaattgtagattactaactccagtttttttttaatggaatggaaaattaatattggagtgtatgaaaacagaaagggtaaacaattgttttgtgaaacttgtctcatattttgtatatgtatgtttacatatatgcacacaaaggtaaaatgtttttcttgttgtgggtaaaaaaaaaaaagagaaacactgaactagaatattcctaaaaccacggaagctactttcaatcccatacctctaccctaccagaggtatcatctttctaaattttattgtgttttattctcttgctctaaagacagttttaccacatagattcgtagtcttaacaacttatatttagatttactttattttatgctttgtaaaaaatggtatcatgtggtatgaagtcttctgagacttgctttttttatcagtgttgtctttaagattcatttttattgttagatgcaactatagtttatgcattttcactgctgtataatattccagtgaatgaactgtctataatttatttatctatttattgtctgttcatggacatttgagttgactccaactttaaacatttttctactattataagtaatgttgccatgaatattcatatacatgtctcctacttgccttatcaagaattttttctctaggcttacatgttatgcacatattcagttttgcaagataatgttaatgtgttttccagagtgagcatatcaattttcactctcatctcacctgcaggatatgaaaatccttagttgcatcacattcttggctacacacggtatttttagatgttttacattttgcgcacttaactcaatgcttcttccaatttttattttgtttcctcttgattacatttttcactaatgaatatgtaattgaacacaatgaaaaaaattattattattattattattattattattattattattttgagatggagtctcactctgttgcccaggctgaagtgcagtggcgcgatctgggctcactgcaacctccacctcccaggttcaagcaattcccctgcctcagcctccagagtagctggaactacaggcacacgccaccatgcccagctaatttttgtatttttaatagagacaaggtttcaccatattggccaggctggtctcgaactcctgacctcgtgatccacccgcctcggcctcccaaagtgctgggattacaggcatgagccaccgcacccgaactgaaaaaagttatttagttttaattgttctttaacattactcacttgaacctcaatttgatgaatgacttaaactggtccctttctctttgtgtgcagacagtgccagaaagaaacaaatcaaatggactttactttcgagatggaaagtgtcgaattgactacatccttgtgtacagaaaatccaacccccagactgaaaagagagaagtatttgaaagaaacattagagcagaaggattgcaaatggagaaagaggtaaatagtttgcttggatgagaaaaaaatatatacatatctattcatatgaagaggcaataagaaataagcaagcagtcttaatgttaaccaaacatttcatttggtcagagttttccagtcttcagagtttggggaatgttccaatatttagactttgacagcacagtttgcttttgagataattttaatgccaaatgattccatgaaaatcaaaatattctattccaattaaatggattgtttcaaagtgtgattccttatctaacttcctacgtctgccatttctctgtatatgtaaatggagggttctgttcgcgtggattaaagaaaactttgagtgaaatccagtcactctctctagaggctctttttacatttcaggaaatatcatgagcttgggcatcctcgtacaccagaggagactgcctggccaatttggccaaaagcagctggaacttacaaaaaagattccagttttaagagacattcaggctatttttttcaggtccccaagctcaagagtgccttaccagtgtttggttcttccccttccttccttctctgcatggggagcttcaaggcagaactaagtaaggaatgtacaagaggccagccaggcctctgatagtaatccatgatgggcttatggtgttctcaggaatactgtgcacatttgtagaacttggcccgttaactgaattatgtaactcttctcggcttctccctaaacattgtgcaaagcttctggagcttttcatagtcaataagaacaacacattggtaatttaagatacttctgattctgttcctcaaggctgaggggatagatctttgaagtcagacatccaggtttttctttgtatgatacagttgcagttcgtacaacctgcgagttgtgccaaggtatcaaatattagaagcataatatgcatatacttgttatctgatcttgggacacttcagataaatgggatttttttcagatctgttaggctgacctcagctcttgaatgtttataacacggaagcagcatttttctggaatgtctccaagagaattggaaaaatggtgagatgaatgtggctgtaaggaaacaggttcttattctcaggaaagaagaaccagctttctcaaagaccatcttaattagaggttccctggtacaacaaacagaattaaaaatgttgtttcttccacctttgtggagttccagaaaatctttcctatacaaactgagtgtatagttgataaatcttactctttaagttctaaattgtctcagacaattgcatttttttcttaacattaatagcacattcatatttttctccttaatcatgccttcttcttttattctcattcctaagtggcagaatttttatatgaagaaataaaagatctgaattgctacttaatctaaaataatggaagtcctccctctgacccattctgactctgtcaaaattctgattcccatcaaaactagatagctttgttcaattaatgcaagatttatattttaagcttcataagtattctctacaggcctagggcttcttctgtatagatcttttcaatgttatttcgtgatttattcgttagaacttaaaaagcctaatgcttttccaaatagcgcacattaaagtgatggaaagtgtcctgttgtgtatcctaaagcatcacctgtactgcagtgtttagctaccagaatttgaggaggatcatgctgcctgttgtacagttgtgctgcacagtacagtgtggagcatgctgtgaagaatggactgcttgtacgattttgtctatatacaagatagttttgtttgttggaatttaaaaaaaaaattttaacaggtatttattttaatgtgtactggaaaaaatagcaattggaaaaagggaattatcactatatggcaaaacatcataaaaacttatctaagcatttcccccctccccactttcccccaaaagttcttctctgggcatcaccttccatatttctcctttcctccacaatcttttagacactacaaacagttaggtcttcccctttctggaaccttcttcacaagtgacctctcccgctgcctggctcgagtcttgccctgactttgcataaatggtgcaatttctctctaatgcagcctcccagctctgctttgcatcttcgtggactcagtcagctcagcaagaaaagggcctttgcaggttctcttatagataaattaatttttccctgccataaataattaaaagaaaatatcccttggctgaacagtaaacaaaccttcatcctttattctcataataagtggcagaatttttatatgaagtatctacattgtattattaaatttagaaaccgttggaagtatttttatttaaatcaagttttttataagcagctacagcagaaagacaattttaatggcgatttcagcttccaggagttaattcaaccttttataggacataaaatgaagaacttagttcagggtggaaaagaagaaacaccctagggacccttgtatatctgaaacgtttgacactatgcacattttatgaattattagtatcttcttaattagctgttgtcatgatgtctaacaattatgaaaaacatgtttcacagacagatgcttatgtttccaaatagacaaagacaggctttctagttcagtttaacatccttatctctttaacattgaatttcaagaaacacaactaggataatctttaattcatgataaaagtgaggacatagtcaagtttaatctttcttaaaacctttgctccaggctgattagtcaacacataagtgcttgctttggtaccctgggtctttaatattctgcaattcaactttcataatagcccagagaaagcaattcacaacaaagttcccaaacaaaatatcattgaagtccaggtgatttacttcttagtatctatccacttaaagtgattcccttcttaaaggtaagctcatatttactaattaacattttctatttctgattttttcatttttaattctatgtccattattgatctttggatacctattttgaaatcattgtcctcaataagacatttatcttttcttttgtataactagtaagaggatgagttaactttgaattatttggaatgtgtgagtaacagttgtactaatggagcaccctcccgcttcagaatcatgtgaaacattggggaagacctttatcattacagtccttacaaaactaatataattaggtaaatcatatcatcttgatgatggttatttcattcaaaaaatatttattgcacactcactctatgccaggcattgctttaaggactaggatctcagcagcaacaaataaaacagaaaaaaaaatccctgctttgttggaacttaaacaaaaaatatgtacaacatatacaaatatcagtaagtgctaaagagaaaaaagtaaagcaggaagtgttgagaggggcttgcaattttataaaagtcagcaagagtgggcctcttttccacagaaagagaatagcaagtgcaaagagaacagctccacaggatggagcatgcctggtgtgttcatggaacagtgaggatgccagtatgactggagttcactgagcaaggtgaagaatagtgagaaattacaccaacaaggcagtggaagccttagtgatcactgggggatgttagcttttctctgagtgacataggaagccactggagagatttgagcagaaatataagatctgttttctgttttaataagggcattcgggttgcctggtaagattagactgtgaggggtggaggtggcaagggcagaagcagggagaataattaggagattcgttgcaagaatccaggaaagagatgatggtagcttggtcaagcacatagaagagaggaagatgagaagagtagaaagtagcactgatgggaattgcagacagattgaatgggcagtgtaaaaaagaagagtcacagactatttgtctgacacatggtatttatctaagcagttgggagaagacagttgccacttacagggatgcggaaaagagtaggtcaaattgtagacttgttaagattgagatatcccaatggagatgttgggtaagatagaagagtctgggattcaaggagagatctggactagagatacacatttgaatgagatctccaaaggagtaactgcaaataaaaatgagaagaggtccaaggattgagccatggggaacactagtgttacaatttggatgataaaaaggaggcagcagaagagactaagaaggagtcaccaaggagctagaaggaaaatctagagtgtgtggttcaggagagatggaggaatcaactgtgtcaaatgctgctgatggggtgtgtacgatcaaagctgaaagttaattattggatttagcaatatggcaggtttgggtggtctgggcaagagaagtttcagtggagaagtcaggggtgaaagcttcattaaagtgtcttcaagaaagaatgggaagagaaaatacagagacaacgaatacaaacagttctttcaatatgtttcactgtaaaggaatggagagaaatagaatgataactggagtatgaagtttggtcaataaagagttctttctattttagatgggagaaataaatacatgtttttatgctaatacaaactatatatttgagatggaaaattgatgttgggaaagagtggaggaagaatttttagagaaatgtccttgaagcaataagaaaagaatgaccacaagtatctcccattgcatggactcacctatctgcctctgtgcccacaaatgccacccttccccagtgctaagggtgtcctgtccatactcattggtaaggccaacccttcactttgcttctaagaccccataccttctcagtcccactcaaatacattgcttccaaaagagataaaatgtagtacgctttaaaaactgaaatgcacaaacaatacaatttgtggaagtagtttgtttctgtttgcactcatctctcagaaggagtgaaaaatccaactgcagtaaacacacacacacatgcatgagcacatgtgggtgcacagtcgaggttgaatatcttggatacttctgtgtaatatgatacaaattacattatcaaaatttttatgctcacatttattaatcacttactattataatttccatttaacagatgagaccattggtaacttgccccagacaacataagtagtaagagataaagccattattaaaacctaagcatacttgctctttgcccttatattgtgttgatttctggtatctaaaggtgaatttcagggttaaagaagttaggagaggcagggcatggtggctcatgcctataatcccagcactttgggaggccaaggcgggcggatcacgaggtcaggagattgagaccatcctggctaacatggtgaaaccctgtctttactaaaaatacaacaacaacaaaaaaaattagccggctgtggtggcggacgcctgtagtcccagctactcgggaggctgagctgagatcatgccactgcactgcagcctgggtgacagagcaagacttcgtctcaaaaaaaaaaaaaaaaaaaaaaaaaaaagttaggagacaggctgagaagacaagtagtgttatgaaaaggaaaaggtaaaggaacaaggaaaattgggatgaataatgaagttgggtgctgcccagactgtggttcttatgcctctagtagccatagacttgaatcttggtacataaccacttacaagctgagtggtcatgggcaatttatcagatttttatggatctctgtttccattgttaatcctgaaggtgatataatttatcgtaaatgatgaagattaagtggacctatatatagtgccaatctttgtttttcctaatttttacttttaaatttcatattattgttttacttccagtgtaagttgttcagctaccttctatttatggcaagtgatatttgttttccctttatgactgatataaaagctttttgtaaaatgattatttaaaaaagggagttatttaaagaaatatacaaaattaagatattgtagatggtattacaaatttgacaaaaattgtgaaggtggcccgcgaatgatagcattctgtgttacttagctagtccttgtggtggacagactctaaagtctgtgatgcctgcttccttttcacaccttcccttccccctgagttcaggtgggacctgtggcttatatttaaccaatagaatatggcttttgctatcatagaatatgacaaatttaatgggatgtcactcctgtgattatcttatatggtgtataagatctcatctcagcagactggcgtcagagagaccctccttgctggctttgaagaagtaagctaccatattgtgagacagcctatgaagagggccacctagcaaagaaaggtggggtggcctctaggagctggcatccagctgacgtccagcaacaagcagggatcttagtcctacaaccacaaggagatgaattctgccaataactgagaatcctggaagcaggtctttcttcagttgagccactgatgagactacagccccaggcaagacctacatcatagcctggtgagaccctaaagcagagaacccagctcagctgtgcctgacttccaccctctagaaactgtgagataattaatatgtgtagttgtaagcctccaagcctatagtaatttattatgcaacaatagataattaatacagtgattaaaagtctgggatcacacattctgagtgttcatttggttctaccattacaagctgtgtgcccttgtaaaagttaacttatctgcaaaatgaggctaataatgggatttatctcatgggttattttaattaagtgagatcatttatatcgagtgcttatctctgtgccttttatatggtaagcatttagtaaacttcattattatcatcattactgttatcataacggctaaatacaacgtgttaacacttttattttggaatagttttcaaggtaaactttaagaaaaattttcatccagtttacaaattctttataacgcaaccattaggaatagcaacatcagtgggtcatatattgttactgtgtatgcattaatgagatttataatttaatgctcttggaagaactcggaatacatttggtaacaagtttagcatgatcaaggttcagatgtttatctgcttggagaggatttggttttagattcatctgggtataaagttatagatcaattcagagctaaacaacaatagtaacaacaacaacaaaaactgtatttgattgtccatcccagtgtttctttacccccattcaaaggaaatcttcacaaagatttccccacttaaagagctaatctcatgcagatggctctgttcccttgtagacttcctgcccaaattaccctaatttcatccccatttatatactgcagccacatccagcttgttgctgtagatgctctctcagcatccagaactccgaggatacaagaacgacaacatcctcccttccttcacagttgaaaacatgatgatgagtgtctcaaataaatgagtgtcaggactatgtgcactacccagatttctgtcctctagggctttctggtcagaaaagaaaaaaaaagaaaaagaaaatcagacttttctccacccaataatctccactttactccactcaatcttcttatatgtcacacacttgtattaccaagggtctcaagttaaggtgacaagaaaggagaatttaggacagtcataaccaaagaaggaagaaagcagattttcttctgaacctcagagccctggcgattccttgagtgtctttcaggagctaccaatgtcagtccacacttgtggtggcttttctgttaacttgagtcttaggctggatttccaaagcataagcagaacttgaggtgagaattcttcctcaagttgttgatgggtggggcaatctcaggagaaaggggcatgagaggagcagaagagaacagctaagccaaaagcatggcctcagctggacactaccttcagcctgatcccacaggggaactcggtaatcagcaggtgcagcacagagctggtctacttttcagacacgggcccccacgtcagtcagtcattggctgaggtctgtgaaggtggtgagaggtaggcactgtccgtttggctgaggatcattctgggtaccagcagcatacattaccactggtattgaattagtagtagagatgctgccaaatctgtggtattcagacagcactttttgagatgccagcaaacatgaaattcatgggggtccttgaccaagtgaagagagaacaagtacacattggaatttcttctgttttaatttgtcaagttgttcttctaattttaggatgctatttctcaaaggtaaagattccatgttgctagtgtaatcactttgagggaggacatacatgtggccaacaagcatattaaaagctcaatatcactaatcattagagaaatgtaaattaaaaccacaatgagataccatctcacaccagtcagaatggctattattaatactaaaaagtcaaaaaataacagatgttggcaaagttgtggagaaaagggaatgtttagacactgctggtgggagtgtcagttcaatcactgtggaaagcagtgtggagattcttcaaagagctaaaaacagaactaccattcaacccagcaatcccattactgtgtatatacccaaaggaatataagtcattctaccatatagacacatacacatgtatgttcgctgcagcactgttcacaatagcaaagacatgtaatccacctaaatgctcatcaatggcagattggataaagaaaacatagtacttacacatcatagaatactatgcagctattaaaaagaacaagatcatgttctttgtagggacatggatggagctggaggccattatccttagcaaactaatgcaggaacagaaaaccaaatactgcatgtttttacttataaatgggagctgaacgatgagaacacatggacatatgtctcttcttttttgagagagagactttgtcttactggtttttgcattccaaagacttattacagtgcttagcttgtggaatcctgagtttgctacaaaagattgtggatagctgattttcacagctgagtctgggtaacaacagtcaattcatctccagggtttttcaacatagaccctattggcatttagggctggataattctttgttgtagagggctattctgtgctttacaggatatttggcagcatctctagcctctacccactagatgccagtagcacctccttcaagtaatgacaaccaaatatatctccaagcattgtcacatgtcctggtgtggggggagggaggaatcatccctagctgagaatccctgggtttgacccttgatccaatattatatggtttgttgtagtgtctagggggtagcgcttccattcttttatccatggtcaaccaacttatttcagcactcttaacatcagactcttgaatcagaaaagaggcctatgtatttgaggggaagaatagagtatgtgaagactggctctcaagccagacagctgggatttagatccacttactacttcaccacttactaagtgaataactgtgtaaagcttttaatctctctgtgccttagtttctttgtttgttaagtgccagataattcctatctcaagggctattatgaggataaaatgagttaataaattacaatatgcttaggaaagagtctggacatattgacagctttaacgcatggctgttgttggcattgatggtactgataaagaagggagtgatttcaaccactggtcatcctgttcctgaagctcaagcattcaatcctgtcacctcttgggctgagagtccttgtgtgtctggggaaagctgaggggacctggtagatggcaagagatataacgataagtcccacctcatcaccaggactcagtccacctaccactgccccatatcagtctgtagaatcagggctgtattcttactggttcatcttgttagggcagttttatcaaattgatgatggtttgagagaaggtgttctccctcctttccctccctcccttagtcttactctaatttctgagaccggtttaaagatctaagggcctcattattgcctcaactgcttttgcttatttaggtagacaaagtttaatcaaaacatttctgttgccaggtcaagatgacctgtacaaagttatcttgatttattcaaaggattattccaaatcaacacgtatttcatataactcacgcatattacttcagtcaagacagaccaactttaagggaaaaaaatacccattatacaaggcacagctgaaaaactcaagtcattttatgaactattgtcatcccacaaaaagaaacttatttaatctaaaagatttctcagcagtctaaatttaacttctctgatataaagcacgttttgcataatcatcattatgtgccacatgtgggcattgtattatatttatgaaaggaattgaagtcctttgtgatacttttgctcctgctgtttttgctatgttatgataaattgctgaaaattatgcaaagtatatatcatgaatatgacactaattattcattaatggcatggagagatttaaaagctttgaagcagcctggagaactgtaaatccatttacaatctccagcttgtaacccttacaagtgaaaaatttgaaaaagatgaagtgtaagctgagtattattaattgaacttgacataccttagttgcaaaaatgatgatgcagcactgcctcttgaggcaagggccctggcttagctcacttcctgttgtatcttaggcatattttaagagcagtctgtggtatctaataactccatttccagatgaagtaattcattcattcattcatcaaatgtctgatgaatatctactactattgaaggaagggaggcattaaataaatatatcagatgtaataggtattgtggagaaatatacaggaatactgggaaggagtcactatttcatttcaggagttcaagaaaaatctctatgataatgggtgaactaagcacaaagagaaattggaatttgcatgtctaaacccaactctctaaagcattgcagaattttcccactgctgggtttcctttgttttgtgcattcctatgcaggctggcatgggtgtaggaagagtaagtggagtaactgaatgggggggtatggtagcagggggaatagctggatttggctgtgggatagaggtaaactctggtgtttgcatctaaatgaacagggaaaaaagtcaagtgcacgagcagtgttgggattttggagaggcccgacctagttgcaaacacctccctaacttgtccttttccattaatcagttgaactctcattctgggtgctacctcttcacttttgcctacccagaaacccaaagtttcttctttaaaattcttccctagtacttataattgcctagcccctctttcattcagggttgtgcgggaaagccactctgtgtcctccaggaatgaagtgttcaataaataattttacagcactgtaagaccacttaaaaggttgggcatgaaggtcagggaatccacctcccatcacttcagcctgaagcaccacagcagcaggtcacaggtgccggcgtggaagccactgggatctcactaatgcccttctgcagcacatgattctcaaaacttacctggagctgcttcaaacctcaaatctgcctgtaactacctgcctgagaaacagcctctcctttcccaccttccatctgagcacccatcattgtacactttaacccagaactttatggagaaggggattctgggaaaccagaaccaagttctggtcgcagcttctcagcaatgcagaggactcagaaggaggtgctaaggtgacaacaaacaatatagtgcagccaccagccctcctaacaggttgttccctgtcccttcatttgaggctatgctagccccatctctgtaatacccagatggtttaaaagttgtaaggtctgaaatctaacacctgcctttgagacagaggagcagctatttctgttttttaacatgggcatggctgagtaaatcacccagtcagagttcctcccagaaacccacatctttgttctgatgctaacgttaggcaactgtcttttttcaaagcatagcagaattcactgggacccaatatttaattggatagtcagcagcagccacaagcctgcctatggaaatgtccttgtgtttgtgatgcaggggagggaaaagaaacaaggaaagacaagctaaaaattccttccaccataactgcccacagaggaattaaagaaggttccctttgtcgtgtccagcccctgcagtgagagtatcaatcctcatgcacacgtgtattgagcgtctattatgttccaggcattgtgccaggcactggagaataaaaaataaatgttctagttatctattattgtataacaaacaactccaaaacttgtatgttaaaataatagtcattctttttgctctcaaatctgcaattgagcaggacttggtagggacagcttccgtctgctccataggacatcagtcggagcagcactactagtgtctggaggaccccccttttaaggtggctgactcacatggctggaatgttggtgttggctgtcagctgaaagctcagtcagggttgtgggctgtgggcctcttcacaggctgcctaggctttctcatgacatcgtggctgggttctaggagaacaaggtaaaagtgaacttttacgacctagccctagaagcatttattctgctgtactccactgggaaaggcagaatgaaggggaagggacatagattccacctcttgatggagagtcataaggttctagaagatgtgtgggatgaacagtaatgttggggccatctttggaaaatataagctgccacaatatgctcagcgtatttgaggagctcactaactagcaatgaaggcagatgtgaaacggatagaatacagtttgaaaagttctatggaagccctggggaatttcatactctgcagagatttcaggaaggttaagagaggtgacctgggacttaaaggatgattagatattcaccaagtcagaaagtagaagggcatggcattccagatgggaaacaacataaacgatggcatgatagactttgaattgaggccttagggctcctctgtgcacctctgcttcccagacagagtgtgaatcccatgaggactgcacggatttctccctagtccacagtgcctggctcatcatgtcatcttgactttcacattatatatgctcgcttagcaatttcccatgaacataattgacatcagatacaattgttctagaccttaatgacagagctagaaagatgtgcattttatagtaatttttttccaaaatgttgcaaccaaatatcatttagcctctttacaaccaaatccatcacactgtacttatatttaaataagaatcatctcaatgccaatttctttcaggccaaggattttactaaacaaactgtaccagccattacctacaaacttagccaagatcatgatggtcttcgaagaaggtggtgttactgctcactagagtactttgtttttcagctccattcttctttctctctgttttctacacatgttgaaattaaaaagagttttctagaagaccaggagtagagcaggcagaaaaatgaaactatactacacatgattttccttgaccttagcagtccagcaggcaggaaagaaaagtacatgtggtgagaccttgtgcccattagagtttcagaagtgcattatgtcgcctcttggggactctcttcctcctcagtctgtaggttcctttcttcagccagaatattcttttggattgtgtagcagtaaatcactttggcattcatctgaggctgccttgattcagtttctcagactctaataagaatcttctgaaatctagtcttttatcagtgactcatggataacatcatatagttataaaagggtaacctgttacaggcgttcgctgttcgctgttgcttctgattgttcaaggggatctcccccaactgcacgtatctgtagaaactccagtcaagtgaaaaactgttagtcttgattccttatgtcacataatgttttacttagttgacagaacacagttaagccatcaattaagtactgaattttagtttgtcatttcctttttttctctggtcccatttgtacatagcaaagctgtaccttaatgcctttttaaaattaactctttttaaggaaagggagttctaaataaactcttaaatacttggaactgaaactttctttgaatgatgtcttagtttattttgtgttgccacaacagaatacctgagatggggtaatttatgaagaaaatattatcatttagttcatggttctacaggctggaaaatacaggaagcacagcgccaacacttgctcggcctctggtgagggcttttgtgcttcgtcacatcatggcagaaggtcaaagtggaagtagacacatgcgaagagaggcaaaacctgggaggtgtcctggcttcataacaacctacttttgtgggactaatccattcctgcaggaacaggtgcagtctcaccagagtgagaccaagcaccaagctacccacaaaggcagcaccctcatgatccaaacacctctcacaaagccccacctctccacactaccacactgggggtgacatttcaacatgagttatggtggagacaaacaaaccatatccaaaccatggccagtgggtttaaattgtccaaaaatgtcattggggagtatattgactgtgataataagcctgctgttgaattatcccaaccattttttaatttattatttttatttcttctgacagagtctgctctgttgcccaggctggagtgcagtggcgcgatctcagctcactgcaaactccacctcccaggttcaagcgattctcacacctcagcctcctgagtagctgggattacaggcgtacaccgccaagcccggctactttcctgtactttccagcctgcagaactatgaactaaatgataatattttcttcataaattaccccatctcaggtattctgttgtggcaacacaaaataaactaagacatcatttttatatattttttttagtagagatggggtttcgccatgttggccaggctggtctcaaacccctggcttcaggtgatctgcccacttcagcctcccaaagtgacagaattacaggcatgagccatgcccagccacaaccatttttttaaatcattatttcatgtccctcattacttagctttgattctgtagttcatcatcatgaccactcacaagcacctgaattctctcactcctttattcctttgacttatttgccgggcaaagccccgaccatggttaaactgcatcttgttcatgcccacccctgagtgatttaatgttgctggaaaaaacatgctgactggttcactttacatcatgaccgcagtctcacacaggtaccagagaatgctcagtgagcctggtacttttgcttcgtcctctctataaaaatcaagtaactttcttcctccctcttttcccatttcactctctctctctttgcttctttctttcattgattcaattttaaaatttcaatcattaaaaaatcatatagtgcctggcacaattcaaggcacttgggatacatcagtgaacaaatcagagagcccctacccttgtgaaactcacattctagtgagggaaaccgtgaacaataaacataataaataagtaaataatacagtatgttagaaggtgataaatagagggccaggtgcagtggctcatgtttgtaatcccagcactttgggaggccaaggtggaaggattacttgagtcccaagttgaagactagcctggacaacatggtgaaaccttgtctctacaaaaaatgcaaaaaattagccaggtgtattggtgcatgcctgtagtccgagctacttgggaggctgaggcaggaggattacttgagactgggaggttgaggctgcagtgagccaagattgcgcccctgcgatccagcctgggcaacaagtgagaacctgtctcaaaaaaacaaacaaacaaacaaaaaagaaggtgataaatgacatggcacaagaaaaaccagagcagagtgtgggtatgagagcactaagggaaaaggatagtcattttaaatagggtgttgggtgggggctcactgaaggtgatgtttgaccaagatctcgaataggtgggggagttggcccactgttacttcacactgccctctctctgcccaatcaaccttctcacctgttttctctgcaccctcatccctctcaacccccctccacagacacacacacacagttctgctgataaccttgcctatactctgatagaaaatgaaaatgctcagacaggatcttctgtgactccccaccctcaaccttccctcccaccaccactctgtgtgtgctgtcgcgggagctctcctattattcgctgaatcccctctcacctcaccttctcaaggactttgctcctgtaattgtcttcctctatctctcctgcatcatcatttttcctctctactcagttgttacaaacatgctcccataactcacaagatgaaaaatctcttgacccctatactctcctctaatgaccactccgtttctcttctacacttcacagaaaacttcttgaaagatttgtctagtgtcctgtctccatctcctcacctaccattctgttttcaaacttctcagtttgggctttctccctcaccatttcacagaaaccccttttataaaggtggcctgtgatcaaatccagcagtcatgccgtctctgttatcttactggcctcaccagcagctttcctccacatggtgagtcattccttccttgagaaaaacatgcttctcttggctttggtgacatctcatgctttcctggattgcttccttcttcattggctctttctcaatcccctttgctcaccttctcttctgtttgatcttcaaatattagtcttttaagacttgatcctgggtccccttttcttctgtatctccatcttcctgtgacttttgtccagttccatagctttatatagcttctgcctgtcactcgaggctttgtcatctcagaggctttaggcagcagggtttagtttttgatctcaggatggcagaagtggaggaggaggaatgctctttgctgcgaccagggacccagataacagaagctgcatccagacacctgcctctggggcagggaaacacaaatcacacaccagacttcaaggctctgctcacagctcaatggctagagctcatgatatggctcctgcctacccaagtgggctaaggagctcagatttccctgtgcctgaaggagaggagaaccgatgccagggacacactagtgacccccacagaaaatgttttcaaatgtactttatatatacatgtacatacatattcacacacacgcacacacacacacacaccctataaagtaggtgagggtagttatatcagcattataccaatgaggaagtgatatgagttgaggtataacctatcagatttctctgttattaaaaatcataagagccccatttattgacagttttgtataacctttaggtaaaaacacttgatagactataccgctgtgtgccctgtaacatcctctaattttgatcagcatttcaccaagacataaatataacagactgaggagggatgtcataacccttcccaagtgcacatgtatacctatgtaacaaacctgcacattctgcacatgtatcctggaacttaaagtaaaataaaaaaaaaaaagacagatagtaaaaaaagaaagtatttccaaagttaaattgcttcctcactagcagaagacaccaaattcttctgtcttttctgggtcttgcttatttcatggctgttaatctctgcagcgtactaagggcatagcgattcatgggttactgattgggtcatagctgtgaatggctgtcagtgggttgatgttttgtgataataaaaagtatactgtgatgataaagttgtccccaagttcagtttatctcatataccatctagaagagtagggaaaacattatgatggtctgtaagaagtgaagggacgtttggaattttatagatcagaactgacattgcttacttctaaggagagatttagtactgggattacctacaaagggagtattttctctcccaatagatagtagaccaacctctgttcatactaattacattatttataattagggtcatcattgctttgctgaattttgagttccctgagatcttgaactatgtcttaaccttctttgtatcccgagggtccaattagggcctatgcactaggcaacacagtgcacagtagttaaatcatctttaggtgtttgctgaatgattttatgagtcattgtgttgtgaggcagataaaacatttgcttttcataatagatctaagaaggtgatggaagaaggttgtctatatcagggtgtattaattagcagtatcagatatactcccactgccggtggtcttgtggatagatgtagccatatgactacttctgttcaatgggctgggcacagaagtgttatgtatccttatgaggccctctgagctctgccttccctctggcagagtgacccatcagcatgaaccactaaatcactgcaacgagctgacctgcagtagacatgtagcatgaacaagaaataaactttatcatggcactagccgatagaaataatgtaatttaaaatattcgggagctacatataaaaggtaaaaataaacagatgaatttaataatagttttgcttatccaatagatctaagatatcatttaaacatatgatcaacatacgaattattgagatattttacattctttttttgtatatatgctaagtcttcaaaatctggtgtgtactttccacagtcagcacatctcaatttgaactagttatattttaagtgtttaatggccccagttgcctactgtactgccagtatagctctgctgtttgaagttactgatatttgggggttattagttgctgcaacataacttagcccatcctgactgctacactaaacattgattttccttggataccctgatgaagtaagtcttccagacttgacatggggatcaccagggttggtacaaagtgacaaagagtatgttgcatcaggggattcactttatggcaacatagagaacctctaatgaaatgtgtgaagatttgtgctcagcccctcagcactgaacatctcctaattgtggcctagaggagagtttactttagtttctcataaatttagccacattgaaacctctgtggtaagaggatgaatttttttctgcctgataatagtgttttaacaaggtaatcaataatgtgagaaagctactcgaagtctcgatcacaagatgttcataaattcatttaggaagcattccttctcaatgactgtgtgctcagtaacatgctgggtgctgggaatacaactgtggagaagtgtacagtctcacaaagacagcaatgaaatctataattagagtattcattagctggaatatgacctgcattagttttatatcgcggctgaagagattacttcaaacttcaaggcttcaagcaacctatgtttatgctcccacagtctctgtgggtcaggagtctgggtacagctcaactgtgtcctctaatcaggatccctccaaggccaccccagggtgtctgccaggttgcattcttttctgcagctcaaggtcctctcgcatagttattggcagaatttagttttccttgtggttgtaggtctgaggtcttcattttcttgttggccttcagccagatatagttctcagcttctagagacccctcagagaccctcacacaacacagtggcttatttcttcaaagcgagcaggagaatctctctgacctctaggctcttttttaaggactcatctaatgcattcggcccaatccacgctgcaatggaaggagcccagccatgaggctgttgcagtattcaagaagagagatgatggttgctcaaaggagggtggtggcagtagagatggagagaagtggatagattagagagaagtttaaaaggtagaatcaataagacttggtgatttgttggatatgacataaggaaaaaagaagttaaagatggctcctggacttgagctactaagaggatgattgtgccatttcctggtctggggacactgagaagaagagcaattttgccagtgaagcagatccattatagacattgatgtgtctgatctgccagtgagacaccaggtaccaggtgccacaatgaccactggctacactgatctggagctcagaagagaggtgtgggccaaagatatgagtcttggagatatcagctaataggtgacatctaaacccattacaagggatgagatcatctagggaggacaggtagaatgagactagagcctggatgaagtcctcagggacctccacttaaaggtctactaagggggagggagtggcaatttcacacacaccaatttcttgttgctgttactaatgtcactttcagggaatgaatattgtaatcatttaggaacatatagtacttcaagaggcttctctccaccaggacactgtgtgtgtgtgtctgtgtgtgtgtgtgtctgtgtgtgtgtgtgtatgtgttgcagagaggaaattgcatccgaatcagctgaagagcatttgtaaactacactcacaaattccaatgtgtccctaagggaaaagaataacagatgcaaaaaatttctttttagagacacgtgccctcattttttagagaaaactggagctcataaaagtacaagtcatttgcccagtgctacacagttggctagatgatagccccactgagaggagttaaaggagccctttaaccctcgaggaatgtacacttatccatcagtttcacaggctagattccagaaacatcaaggaattctagtgtcagctattgggggttacccaaatgtcccccaagcattcagtacctgtgagtggaagaaagaaattctcacttattgaaccagtactatacaaccatgacagctccagaatgatgctgcaaggcagatattattttcctcattttacaaatgaagaaactgaggcttatgaattgagtaatgtgcccacagatggcagaaccaagcttgaaatttgctcttactactggccttacattaatttttaggatgttaaagccaactgtatacattgtgcattgactgtaatatataattaagcattccttcaaaaaaaaattacagtggaattgagttcatgagcaaatacatagtgtgagcctctcagctttcttcttgtgaaacagcagttctgaagccagactgcattgatgagaaccaggctccattccttacttgagtaaacttagccaaggtaccagacttctttgtgctttagttcctcatttgcaataaattagaataataataataccggggttgctgtgaaaattgaatgatttaatgtatgcaaaagctttgaaacaccacctaacgtgtagtggcactatgtagctggtcccgtctctatcattactattcatttgcattcactatgattttttttaatccaagaggcttatctgagtttccaattagaaattaatatctcctcctagccccagaattttagagttttgctttgtcctcttaacagtatagttatgagaaagtgatgcccagatagttacctaaggggatacagagcagatgcaagtggctaacctgatttgatccttcacgctcagtaaattgaaacgtcaagcatatttatgcctcagggcctttgtcttctactcttctcactgactggaatgctctctccctgtgtaatagaacagcctccctgagtaatttcttcaggtctctgttcaaatgtaaccttatcaaaaggcttgtccacaccactctatctaaaatagcatctccttcccaccattactttctattttcttactctatttttcttcaaagcacatcatcagaagtattacacgtctatttattgagggtctgtctccccattagagcttgagttccgcaagagcagggatttggtctgttttgttcacagctgtattcccagcacctaggacaggccctggaacatcacaggccatcagtaaagatttgcagaatagatgagtggatgtgtgagtgaatgctaagttacagttcacacaatgggattcatggctatctgcaaagaccaccatgatttacaggtgcattgtcacctacacaactttgggacaaactggacagctccagcccctcactgcagttaagagtactaccatctgtccagttccccaggccaaataacctcttcatcattctaggcacgggatttttttttcaccctccttatttgttcagtcccaagttctttcaaacctacctccactagatctcaagtccgtctatttctcctttcgttctggttctaaccaccatcttgtctcacctggctactagaataactttcttattgaacttcccactcctatgcttcctgtggaccattctctgcaaaacatgcagcacgcacttttggaaacaagtgatccctgcctgtaactcattagtggcttcctattggccttggaaaataaatccaaacttcttaccacattgtacctggcctggcatgatcattcccagccctcttctctaatcctatcttaggtaactctctccacctcacactttacaatgttcaatcaccccagccttttagttcccggaacaatctctgggcctttgttcttgctgtttcttctgcttggaatgcttctcacttgactcttcctatgcctaacaccgtctcatctttcagatttcaggataaaagtcacctaatcacagatcaaccagcaaatcttaatcaggtgcctccagttcttttctgccacagaactatattcttttcctttttaaatacttttcataattttacatcatgcttatttgttgtctgatgtctgtctcccactctagattgtaaatcctatctactgtggtatatccatcacctggaagagtccctgacacagagtagccacttaatgaacatttttgggtgttattgaatgaatgtcacagacgaacctgcaggaaaccctgaagatactgagggaaaaaagacaggaattgggtgcttggatctcaggatttctggtggttcgggcttgtcatcaaagactgataaatccttccaaaatactggtttcttatttattaccttctcaggttataatttgagtgagtaggaatgctgtgttcttttcaccataccaccaatatgatgtggcccctcttggagataacaacaagcatatttttagatttactatgagcaccttaacggcattatgccatttaatacgattcaataagatatgcattgctatcatttcctattttacatttgaacaaactgaggcacagagaagttaaatagcttgttcaagatcacagggctggtaagaggtagataaatgaatataaatatgtgaaatccaacctcacagtccgaattgctaacctctgaggcacagatgcccacatggcattgtacctatactcccatagtggcctctaccagccctttaaatatcatgtttatcctggacacacttgctttgtatctctggcccagacttctaccctgagctccagactcatttgtctaactacccacaagacatcttctcctgggcatgtcaaacttaacttttccaaaactgagtttatgatctacctctgtacccccatcccccatgcccaaacctggtctgtctctatttcctcttctcaataaatggcaacaggaatcatgagatgtggagatgtgtgtgtttatactatatatatacacacacatgtatatatatacacacacacacatatatatatacacatatatatacacacacacatatacacacatgtatatatatatacacacacacatacacacacacacacacacacatacatatatatatgcatacacactcctttgagagatggactgcttggattagatagtggcatggcatttctcctgccttactgttgcaaggactgtgactgttacataccaaggcatggaccaaaatttattaaatagaaggttttcagtatgttcttgctgaacaaaagaaaaaaaaattttgtgtgtgaatcttatctctttttactccaggtaatttcccatgatactcgttaattttctcagtcatttttctaagaatattttcccaaacttctctaagtggtaatttttctctccccaaggttttattcccaggaatttgtattgcagtatattaatgaaacaactctatgtttcataaaaatcattttcatttcttttcactttggctcttgtgcacttggatttatgtggcaaggaatacttaataataaggaaagacctatctagaaacagcggtgtaatcatttggcagtagagaaaagaatgatttatgggccatataattagcaatcatctgtttctcatttatttctcagggctgaagttcagaaggcattcagtaacaagcagtaggtaatgccttctcagttcttccttgaaaaactgaatataaataataagccccatacactatattttcccttaagtatgtaaagaggacacacacacacacacacacacacacacacacacacagaggactcatagatattcatcgccattcaagagaattcaggtaatattttttctcaagataatcaaaaaaacctttaatagccccaaataaaatcacagttcattagtaacttaagtttgctttacatgaaggaaagcctctttatttttgttgctttgttttctaaaatatgaaattcttttaagatgaatttgtataaactgataaagcaacaattcagtctatgcatcttaaatgcatttgcaaagccatggatttatttaaacttcagaagttatcaggtataattcaaaaggaagttaaaaggtgagggtatggaatcagctctgtctggggtaaacattcagtttggctgtgggtgagccacttgtcacctctctttctcctcctctaagaaactgaaggaaaaccactctcacagggttcatatgggaataagatggggtaacatgtgaatgtgctttgacaattgcaaaacatgaaaaataataaataaataatattgttattatttaaataataagtgatttttatccagctgaataaatcaaaacagctatccttttatgcataaaatggttgagatcccacgtcagaattttagttgattcagtatgtgttcagataatgaacttagcttttctacatatagaaatgtatttatattgttctctgagtggaatattttaatatatttttaatgtttacatacatttatgaaaagtcttcaaatgattattttcccactagattgtttattttctgtaagacctaacacttacagtaaatctatggagagagtatactctaagcgctatattctgctctaaatcatttgtttaattcagtgactctatcacatttccatatagtgtcttcggtgttgcccaattttactctttctctcataggaagatgagtgaatatagaaccttataggaaagctaagtgaatttaaagaaatcccattatcatgattaaaatttccaacttaggaagccacaaagccttcccagatctgaagtatatcttcatataaagaaaaagaactatttttaggaaatacagtctttcttctgctttataacttggaaaactgtactatgtattgaaaagcaagcggcaatcttttctgaagtccaacaaatgctcagctgaaaagctgtgagaccatttcagatccccaaggcatcattgcgtccacaggcatgaaatggggcaggactgactgtgtgtgtgtgatgtttctgtatgttctctatgggcatcgcagcctgtgagctcattcacatacccctaactacttagctctgatctaagcagctgtgccgggaggactgaccataataggttactcaacagaagaaaacagtgtttacaaagagacaaagcattggccatcaaattttcagttgttactggtttgtccactccctggacaggcacctcatttgcagtaacctgcagtgttcactctaagagtcacttcattgacagtcacttcctgcttcacaggaatcacaatatccacctaggccaggtctaacggcccacatttcactaatcatgttcatggattagataaatattgtgtgtgtggtccctccatgccaagcactgtgctaggcccaaaagatccaactatgaataacagaaatattccttgttctcaggagggttatactcagggcactacttgtcccaagccagaagataaaacctcatttcagcctgaactgccagaaagttagacttttcagaccaatattagagagtgcctcccactactgatgggccctggccttcctacccttaggaaattcagcatcacaccagtctctgagaacactgcagttgatgccagtttgattttcataatatcttgatgagttgatttgtgtagagtatttataacccttgaatgtttataattcaggtcaaaaagactctgaattaaagtatcataaatgaattacaactttacatccatctgcaatttgaaaacaatttcccggagtgcaaatttaccccagctagaggaaaaagttgagcttctatttttgtcagttgtgcaaaaacaacaagaagaaacaacaaaggattgttatacaatactagtataaggaaagtctagccacaaagcacaaagtcctaacatatctgtcaacattcctaaactataaaaacttaaatgccatgcagtccagatcaatcctatatgagaaagatggggataagtaattggccactttactaatttaaactagcttggctcatattttctcactttccttctacaactgatccctccttgtggaaagtgacttccaaagagaaatctcctaattggtttttcatgtccttttgtccagaggcatagaccaaaatctgttggatggttactggggtgtgaagtcctaattttacttccctatgttctgggttgataaaaagccctgaaggaggcaaaggtctttgtccaaagaacacagctctttcaaaaagctttgccagtcacccacccagattgcaatctcacatcttttggctcccttcatctccaccaccaccaacttttgcttttgcctggatgactgagaacattccttcttctccctcatcatttattctctatgaaacagccacagtgacctttgacaacctaaatcaaagtggtttcccagtgttcctagaataaagtgcgctgcacgtcctgtcttctgctcactttctcagcctcttctgatgccactcttccctccttagtacgccttagccctttgctcttctttctctccctcaacataccaggaagcttcccagctcagggcctttgcacccagagcgctcatcccatgctctttccccagctggtgccttctcctccttaggtctcagctcacatgtcacttccacagaggagactttccttgaccccttgtccagatgagtatgtagccccctcccataactgtttctgtcattactttatcttcagaacactcaatattatctgagtcttccctccctcccttcctccctccctccctccctctccttccttccttccttccttccttccttccttccttccttccttccttccttccttccttccttctttctttcgacagagactccctcttgttgcccagattagagtgcagtggcacaatctcagctcactgcaacctccacctttcgggttcaagcgattctcccgcctcagcctccccagtacctggggttacaggcacctgccaccatgcctagctaatgtttgtatttttagtagagacggggtttcaccatgttgtccagtctggtctcgaactcctgacctcaggtgatctgcctcagcctcccaaactgctgggattaaaggcgtgagccaccacgcctggcctatccttgcttttcaacttgtttttgcctatcttctttaacatttttgtagaatgtaaatgttattcatacctcccttgtttacagctgggtctccagctgacatgagtgccacacacacagtgggatgtttgttaaatgaatacttgcacttgtaagggtctggcctattggtgaggaatgccccaaatcataaactctgtccaggtccatgcattctaagttccaactcaacttaaactgtgggagccttgaatatacttttcaatttagtttcttttttctgtttcagtcctctctaataaatagtgacattatctttgtgaagttgcatgccccatgggaagtccttggaagatatgcagaacaaatgaatgtaagaatgcctttcaggtaggtggaaatgtattttattccactctctctgctgcttcactgtaaatctaatgttctcctctctcagaacaaataaaactgaaatgcagattggaaggccattagaggagggaatctttcaaatgtttaggatatgcaaataagccttcatggccaataatgatttcatggctttttgtgaaaaattctggctaatttagttcttagcaggtagatatttccagtgcctgtaataaagaagcattttccaagtggcatttttatttccaaagtgccatttttagaagtcctgtgtactgctgctttgaacagccagaccacaggcagcagttgcacaggggcatgttttcatgttctttactgactagtctcttccagaaaaacattaaaatgtatttctgtagatacaagtgcaagaaatttcatgacagtgtgatcttctttttaaaaaaaaaacaaaaaaaaccactttttttaattttaaaaagtcataaatactttgcaaacacgaatattgatatttgttccaaggggaatagaaaatactttgtattccttagttatttaaaaggattaatttaccttcatttcacaatgaatatttttattttccctatggattatggaaaagtgatctgcatttgctatacagaaataaaatattaaacctcaaattagaaatgccaagatatgtgggtcttttgtaatggaatctgctaaaaagatggatggatgtagtcccaaggacagttctgaggggactcgaagaataacgtacttttggtttgcaatttgccagtaagaccacattaggtgacagaaatgaggcaaattggtaccaactctacagtctgtctcttaatgagctgtggaaagttgtggagacaaagaacatttatagagacagagagaagggttagggactcatttagagaaaggcaatttccattcacaggcttgtaatgtatctccctggtgcatcttatcttctttgttcattggcctgtatgtcctaataccaagtcaaaatagaggctatgatttctagcatctgttttcctggaggcaaaattctcaaaatggataataaatatagttctgatcttatgatttatttttgtatttaactgttaaaaagaaaatctgagaactcaaggattaaaaaaaggaatacatatatatatccactagggagagataaggaatgtcaatttagattccactgaaaatttttatactataatagttaaagccaaatatgtatcaatgatataataagtgtctaatgtggattaataccatattatacctaagaaccgaaagagaaagaaagaaaaccctacaaaatatgtctagatagaaatttatacacccctctccagtataaataaatctcataaaaccttctgccagaacacacttctgtaacaaagaacccagggagatgatagaaacttgagcaatggtaatgcaaagccaattctcttactacctgcaaaggattttgtatctgaagggcctggccacatcatgaataacacttctgcatgcctactacacagcagaaatgtgctgcctccaagcagcattaatactgttttaatgcagcattgagagaatgtgaaccaagcaatgaaatgaaaatgaacatgaacaattatcttctttttagatataggaattcctgcaggacaattttagaagaaaatattgttaatgtgtgacactaattgacctcattaatattgatgtaggtttacctactaaacatggcttcacttgttgtaacctgatggattaaaaacttttgctattattgtgtccacagtttcagacaaataactctagtctaaggagatacatgcatttccaaaggaggaattctcctactacatcatttcaacaaaatgtacaaacatcattttagctgaattttaatacgcaaagaatcttacctgtattcataattttctgtagattcataattttctgtacttctgaatcccaagtttagtctccatggatttttatccctataatgtttaaaaggaaatataggaatagatttcttatgagaaattacagtaaaacctgcttcttaaatacttatatgtccatggatattttttataactaatagaccttactttttagagaaatttttaggtttatagaaaattgagaagatactagtgttccaatataccccttctcccccagcctacagtttctttattattaacattttgcattagcgtgatatatttgttaaagttggtggaccaatattgataaattcttattaactaaagtccatagtttactctagggttgactctgtgtgtgtggttctgtgggttttgacaaaggcatatcatgtatccaccattgcaggatcatgcagagtagctgcactgccctaaaagtctcctgtgtttcatcaccttccttctcccccgacctgtacctctggcaaccactgatctttttattgtctctatagttttgcctgtgttttaaagctttcacaaatacgcaaaaaaattggtgatatataaacttaccatttacagaagtcagagagttcagtaacagttcgggatatacataaaaagcacctgtttcattattattccattcagtttcggttgaagcctgaaatatggaaagtgaggttgcattttaataaagaatctaatacatgtattctccattcaaactacaccaagaattttcatttttaacatttttaaaagatagatatatagcaatctgacagaataagactgatttttgtatagtttccagaattccttgattttacttatttaattcatctaaagccagggccagtggttagccagtgtgccccggtgtggttatgtacagctgggtgttgatgctgacaagtgagtgtccttcccatactggttgtgaaatacatatatatatatttatttatatttatattactcctgtctataccatgagagacgtgtcttgtgtaaacttaaaatgctatataaatattagttaatataatagcgtgcccactaaattatgtatgttgccctctgatccatctttgcattttcctggggaaaaaagctgacctcagctgaagctgtgcaaataccaatcactccaaattatcatactgcacatgctttgtaggcaaggagcaaccattaaaaaaaaattatggtaatgggtagaggaagaaatatcaatggaaactgtttcataagatttcatgactcaaaaacgcatgccctgtgttcccactgtatttctcactgttaatctctttttagttttttcttcttcacctcttacaggcttctatcttcaatctcctttccttccttgctagttcaaactgtaactgacgatgggttttcttctcgactggcttcatttttgctgttcttccaggagaaaaatctattacctgccccgccgttacaagttcatgagcaggttagtagcacgctctgtcctgacagtgtttgtctttctgttggcccgtgtgctccaacaatgacaaggagctataagctggggaagatgagcctgtgtcacatgggaaagttggctgccatgcacattttaaaatcagctgtgtctgattagcctgaggagaaaaaaagatgaaaacgtccctctccgcgtcttcccagtaacttcttcccacttggggggattgccattcatctgcaagtgtgctggggctattgctttttagcccattcttttttttttttttaatttcaatagtttttgggaaacaggtggattttggttacgtggataagttatttagtggtgatttctgagattttggtgcacccatcacctgagcaatgtatactgtacccaatgtgcaggctttcatccctcgccccctctttttagcccattctattagataaattatcaaaaatcccaatatctttggcctagatgttctcccttcccttccctttctttttcttttttctttttctttctttctttcttttttttttttgagacagagtcttgctctgtcacccaggctggagtgcagtggtaccatctccgctaaccgcaacctccgcctcctgggttcaagcgattctcctgcctccaagcgattctcctgcctcaacctcttgagtagctgggatcacaggcatctaccaccacgcccagctaatttctgtatttttagtagagagagggtttcaccgtgttggccaggctagtctcgaactcctgacctcaggcgatccgcccacctcggcctcccaaagtgctgagattacagggtgagccaccacgcctggccaatgttatttttttctacaaaaattcctccctccactatatgtaatttgaaagcttgaagtgcagatagtcatccttagctgctggctacttgacttcatgagtggggtcctcctatgttagtaatattttgttaataacatatgcagatgtatagcctcactcaggtgcccttcctaccctcttttctgccaaaaaaaaaaaaagaaaaaaaaaacccaccagatgaagattgcatctactatactttgtatcctccgaaagcttgtttttccttgttttttgaggagctagggagaaggggaatgcatcaatgatgatgtcctctaatttgattctgttgtgatcattggagaatctaatttcaaaatcttaattgatcttatgttttcattcaccctgagctgagctgagctgatggttaaactgggaaactagtaaatttctctgaaaatcctagttagttcaactctatgaaatttagaattcaggttccctctgtttatatgctatgttgagtgataaataaaagagtagttggtacattatggtgggtttactcaaatgcatgtttactcagtgaagtacagtgtgagaactgacctccaaagaagtgaaaatgttgtttctcaaaaattgcctgcgagcaagcttattggcagttctttcattaagcagttgacatgacatttggattcaccatgatttagattgctaccttgtcacactgtaatcatctgtacaatcctgatataacagtttagcctatattaatagttctcaaactccagccagcatcagaatcaccttgttaaggcacagatttctaggcctcaaccccagagtgtcttgttcagtagatctgcagtggggatggggaattttcacttctaatggattcccagctgcagctaatgctgctggtcacgggacgatgttttggaaaccattggtctgtatgataggccaagctccatcttctcattaaaatacggatttgactgactatgggacgggaaaacaaaaaccaatatcaaagaaaacctgaaggaaacacagcaaggtgaagagaggtttctcccaactttgagggctaagtggaaatatcaagtttgtacatgatactgtttcagtattctagattctaaaaagaatgtagggttgggagaagtcttattcttgtttggaattgccaagtcagcaaagtcagtatgtgtggaacagagcacattggggtcataaaacctatgttggcactggatgactttgggcaggttacttcacttctctgagcctaagtttttcacatttataaaatgatattaacttctcccctgtatggtttatgtgaggtttagtgcctagtatgtagctgatgtgcacaaatagtatctattaatacttattacatgtaataattaatacatgtaataattaataattacatgtaataattatgtctttgcagaagggtatccttctattctttctgtcgtgcttctgaatttgttatccatctgtaagtctctcctttcttctatcctctagcaactagtccactaactgttctgagtttatctgccaagtagtcattttctccatttatattctctatacaggcattggctctacttcccacacagtcacctaatttaaaacctaagggtccaggtgtggtggcacacacctgtagtcccagatacttgggagtctgaggcagtgggatcacttgagtcaaggtgttcaagcctagcttgggcaacatagtgaggccccatctctaaaaatgtaaataaaaaaaacctaagggtcattttggatgttttgcttgctcatctagtcagtctctcaaattctgcgggtgcagatgaatatttctaaaagtctatatattactcttcattcccactgccattgacttaggctgagctcccatcacctcttgcctaaacatcagtttatcttcctgcctcctttctgaccccttccaaactctcttctattcatctcctgagtagcaaatctgattattgtcacttggtggctaccatagagtgatcacaataaggttaaaagcattagcttaattacagccctttataaactgtcctcgcccatcgcttccctcccaccactctttgctccatccatattgagctcatcgtttccaaacatatgttatgctcacgtgggtttatgtgcttttgcgtatagtggtccttctggaagatcctttcctttattgttcaccaaggtgaggtctactcagtcctcaaaactcagtccacatttttgccttttgcccaggtcaaatgatctcttttctgcttttccattagaatcctatggccccatcaccctgtgctgtaatctatgatgtaggtgtctagctctctacctgggtggtatttgaaggcaaggatgactcattcaattctatatttccagcaccaagcacataggagatggagtgaatgaacaaatgaatctccacatgcgtgtatgaggattggagtagggagaaaggaaatcacgaagaaaagaagcatagaaaaaccaggtctgcctaaagtttcagacacagccttggggtgaaaacatttgctcaaacagtgggggtgggatggacaataagggcttaaaagaaaacagtgataaaaggaactatagaatctcaaggttttatgggatattaaatgccatcaagtccaaccattcatcagatacttaaacttctgctttctggtcagccagtctatgtttgaacatctctggagatagtaaactccctggcccatctgtgggcagctgtgactgttacaaagttcttctttaaaataagctataatctctatctctttagttttcactctttgattggagttctgccccctggatggataaaaaaataatctagagcaaaaaggcaaagcatgtgagaaatattctgaaatataggcaaaagggcttagcacttagcagctatttggaaattcagagttgaggagaatgaggttctgacacctaagggctagggaaaatattgttggaggtaaaagaagactggaaatcgagaggagatacaggtgtggtgaggaagttgactttttaaaattgattctgtattataactcaacagtagatttcttaggtgttggtgtcttaaaggcctttggaactgatggcaaagcagctgaagagagtggtaatgctagagaatccagtgtgggagtcagcatgaccttagcgaggggagtgtatggaatatcccaggaggagatgtaaagggtgaagagaagagcgcctgtggcagttcctttgaaaatctgcattaatgggatgggggagacctgaggagaatgaaaaagaacaattagagaagtagaaggagaatgaagagagggtggtgtcaaaggcaccaagaatgagattccacaaggagggctgtgcttcagcttctgatgatcaatcagagatgagaatcaattttggatatttagaagtttcagtaatctctgtgacagcagtctccatggagtgatggttctcaaacatgtgtcaggatcatctggagggcttttaaaaacacggatcactgggcgcatccccagtgtgtctgatttggtaggtctgaggtggggctcgataatttgcacttccatcaagatcccaagtgatacctgtgctgatgttactgatcctggaccacatgttgagaaccatcactatagagtggaggataatggaaaccaaattacagccagtggtggaaggatgagggctggatgaatcagaggcaatgagggttcactgctactttgataagtttcatggtagaggaaggagaaagaggggacaggatttaaaacaggagccaagaggaggaaggcagaggagactatgaccttgtgacccatcacatgttctccatgtgtgcagaggagaggctttgagtgaataagagcttgagaaataaactcttctttcttttatttatttttttttttgagatggagtctcactgtgttgcccaggctggagtgcagaggcacgatctcggctcactgcaagctccgcctcccgggttcacgccattctcctgcctcagcctcccgagtagctgggactacaggcgcccaccaccacgcccagctgacttttttttttttttttttgtatttttagtagaggcagggtttcactgtgttacccaggatggtctcgatctcttgacctcgtgatcctcccaccttggcctcccaaagtgctgggattacaggcgtgagccaccacgcccggccgagaaatccttctttctaaagctgaaggaatggcttacaaaacactagtctttgggctggaaacattggtgctacttctagcgcacacatcacaactacagaagaatttaggcattggaaggtactggaagactctgggccaagctaaaggaaaaagaaatcccaacgaaggtagttgattcagaatggcctctcaaaataggcttcattgcataccacatagaattaagtctttgatatcactgggatgtgtgactttctgaagcccagtgtatggtgtacatttaaaatccacgttgtcagaaaatgttgcatctaccttaactcttcatttcacatcagaacagactgatttagatgatggagagtgtctttttctttgtagccagctctgatattctaaattgaaggccacatatacaacttgccatctagtagtacatcaataatgcaacactgacctccaatatcctaaaattcccgtcgtatgaaatcttgatatttaagttagcttggagtttcatttatataagtgatattgaattttattaatccatgaaagcatctctgaaacaaacctattccctaagaataaatgaattaatatctctaaggtttctgagcaggcagagaaataaagcacttcttcataatatctttattttaaaaaatcacttgactctcataaagcatactcatgtagttcagacatggatttttggagttaatgctctttttatccatgtacttggtctattaaatgctgctttctttcttatctttggacaggcttatagccattataaattgcctatccaataaaaaggaggaatttatcatcttttggctgccctttttttttgccttcataaaatattgcaaatatagtctgtggaagatatgattacaaaataacaaatctgattattatgggtggcttgtaggtggagtctcattactactccttccttccaccccccatatgcattctgcctgacttgatcctgggtgaggcttgacagtgtgaatgctggactgtattgcattatacattcaatgcagtcacaacttatcagatgagcatacaggcaaaaggacaaaatggcttgtgtattttcatcctcgttttaaaaaactaatacatgtaaatgttccaaagcctttggagtcttctataaggtatttaggctatgctccaaatagtacccctgtgacctaaaagaataacattagctttctaagatctctaaattctatccaggcagaggcttgtaaatctggagacttggctctaagaaaatgaaaaacaaattcatgcctctgctgtctattatcattccaagagggtgtcatttactgtaatgtagagctgtgtgctactgaaagaaagaaaaggagggaaggaaggaaggaaggaaggaagaaaggaagggagggagggaggaaggaagggaaaagaaaagaaaagagaaaagaaaagaaaagaaagctcatctgtaggttccctctaggcatatcatcgctgataatgtaatctgttagaaacatgatgctattattataatattctttactggggaaaagtaggtgtcttcaaagtaggcctgcttcatttaattcagtctgattaggttatcattagtgtacagtccctcctgggttgttagtggctcaagggaaatgacctttcttctacttcctcaggctatgcccacagcatgcaggttggcattctgtacattgtaggcagtttataaaggtctcctgacaggttagcatgttgggagcaagatcctttgcacatatgtggccttttccttaatcatcatctctcctaagttgggtaagattatctcccctttagagctgagggaactgagggtcaaagagatcaaatagaaccttcccaagaccaaacttgggaagccatcgcagagctggcaagtttgtacccatttgcttatactgtattgtcagctcttcccaggtacccggaatctcacctatcatgaatcagcatgaaggaaacctgagcttaccatcagaacaactttctgtaaaaataactcacattgtagtccagatattaacttgacaagttagggccagaaatgcccaagtgtctgatccattttccctttattgatttgcctgtgtagtgtgtaagagggcttttgctcagtaaatagcaaaaatggaacaaagtgacaacatacccaaccaaaatcaatgctaaatcattaagccaatgttttctcttttctattccctattggtggaggcttcattaagtaaagtctatactaaagtccactcctatactgaagagacaaatggggtgctttctggttagttggtttccagactttaacatatctaagtaaatttcagggttaactatttagggatgtttattaggtgggaacacagacatcaatctactagggagattcacagattttgaacttttattgggaaaagagcaatctatgtagaagttcatcattattgtcaccataattttcttcgtcctagaaactatcactcaatcgagccctttgtgcatccaaggcattgtgtaagcacttgatatccatgatcatgtttaatccttaccattgccttgttctatggattctgttggctcatagaggtttaattacttgcccagcaaggtctataaaactggaatgtgaatcatcagcttccagctgactccaaagtccatcattgtatactaaaggttatctaacattgtatactaaaggttatcattaattcaagtttgaattaatcacataagtgacataatcaagatattatcacccaaatcaccaacaacctgtagtatctaaagaatatctggctgatcatcattttagagatgagagcactaaggttaggtgaggataaagggcttgtcccaggccacactgatgtatgaccacagaatcaagagtccaacttgaatcttatgctttccagcctagtggcttttgcattatgtgcttctgtcttgcatgattgaagggggccctaagtgaagtctgagtgtggcaaagtttggagacaggaatgtgtttgtggaagagcagactaggggagcactcactcattatcctgccacagagagatagactcttgttcccagagccacctaactgggaggtgagaacagcatgtggaatggcagccttaacagtgggagcctggctagctgttgccaggtcttgaggagaggatcagaccgagagtgttttaagaggtgtattcatttcctattgctgtcctaacgcattgcgacgaatttaacagcataagactacacaaatgtattagctcacaattctgtaagtcagaggtccaggaagaggaggctcaactggtttgtctgttcagggtttcccaaggctgcaatcaaggtgttggtcaccctgggcttttatctggagactctggggaaaatctgcttctgggttcatttaggttgctggcacaattcagttcatgtaatcataggactgagatctccatttctttattggctgaaagtcttcctcagcttctagaggctgcctgcattccttgcctcctagctcttttcatcttcaaagccagcaatggtgggtcaagtgcttctcaaactttgaatctctctgattctccttctgccacatccctcctgctagagaaagttctgctttcaaaggtctcatgtggttaacttgagcccatctgagtaattcaggatgctccccctatcttaaggtctgtaaccttccttacatctccaaagtcccttttgccatgtaacataacatattcacaggttctggtgtgtacatctttgtgggggcaactctggtaaccagaggaagacacaaactgctgaccatgtttgagtgtttggtttagtcgtagtgaagtgcacacagcatgcacagccgtgtgtaatggaacctggacaacatgccttgtccacctgcttctgctcaggctcctcagtgaaggccagttcacaccctccagcccccatgcccaaccagtgtctcggggattttatttatttatttatgacacggagtcttactctatctcccaggctgaagtacaatggtgcgatctcggctcactgcaacctctacctcccaggttcaagtgattttcctgcctcaacctcctaagtagctgggattacaggtgcacaccaccatgcctggctaatatttgtatttttagtagagatggggtttcactatgttggccaggctggtctcacgcctgtaatcccagcactttgggaggccaaggcaggcagatcacggggattttatttttaagatgttcttttgaatgtgtttcttccaccacagttttttaaaaagcccagttcctttgctttccatcacttttatgttagtcctgtgtggtccttaagaaattattaataatgcttgctatctgtctggcagcttctccaaagcatttcatactcaccatgttttatgagcccactaaccactctgtaaggtcagtaagatgataatgatgataatgatgattattgttactattacctctattttataaccttggaaaagaaggctctgaagggtaaataacttgtggaaggtcatacagctgaggcgcaagagagccaccccagttacaaatctcagcttccttttaccatgccaagcagcatcctcttgcctccttcttgcttcctctttttcacatatttcaattaattaatcattttaattaccctgttctactctcttttcatcatctccacatttcaattaaattgtggtgccacaggctggctgctgaaagctgccatttcactcctatagagtagttatgcctgattttttttttttacagctttatttgtttttatccatgctgagcactgtacccagctggattcaattcatagtcatcgcacacagagcccagattctgtgggaatgtgaattttacaaagtgtgatctgattagtcctgcagactggagatgtgtgggaggtaaaagctctataataaaaaacctttgggccaatggcctctttcttgaatgagttttaaggcaatcaaatgaaataaagccaagagccatggggaaggccaccatcttagctgaggaagtctaatttatgtgtccatataaggactaaatcattgagcatagactagtgatagatgctggtgaaacacaattaactttgaattaaaaagcaaaaaacagaaatgttaagcggcaagctggttgctcaatatttttatttttggaaaaaagagaaaaacagtaataatagccagcatttcctgtataccagacagttctaaagactttatatatgtattaataagttcatcatcacaactctacgaattgggtatcattatcatgcccattttatagataaggaaactgaggctcagcaaagttaaatcacttgcccaaggttttgctgttaatattaacagagccaggatttgaatctaggcattccagccccatagttcatgttgtcaaccactgtgtcatgctgcttctctaaagcccatcatctcactatattttaagtatatttcttttggggcggagggttctcttggggaggagggtcctagagccactgtgagattcttttcagtttgaccctttgggagttctgaagaaggacagccaccaccaagcagagttgggatcatggtgaggctggaacaatgctgagaataaaggagatagtgaaagagaagtttaccattattttttagtttggaattgattggttatataaataatattatcttcagctgagagtttcactgtgatggttaattttatatgttcaacctggctgggctaaaggatgcccagatagctggtaaaacattattttggggtgcatctgtgataatgtttccagaagagattagcattcaaatcagtagacttagtaaagaagctgatcctccccagtgcaggtgggtgccatccaacccattgagtggaactagaagatggaggaatagtgaatttgctgctgcttgagctgggacatctctcttcttctgcccttagacatcagtgctcctggttctctggccttcagacttggatcaggatttgcacggttagctcataagattctggagagcaagaagtcccgcaatctgcagtttttaagaaggaggcctaggaaacctgatggtgtaagtcccatttccagtgtaaaggcctgagaactaggaaggccaatgtccaagggcaggagaagatggatgttccatctcaagcagacagcaaattcaccctgcctccacttttttgtcctattcaggtcctcaatggattagatggtgcccacctgtgttggtgaggaccaacttctttactaagtctacaaactcaaacactgatctcttcaggaaacaaccccacagacacacctcaaaataatgtttaccagctatctggacatcccttaacttagccaagttgacacagtaaattagccataacattcactgaaaagaatacattgccatgtaaatatattgttttaattaggaaaaaaataaagcatgaccaaattccacgtgttttcagttaataaatttagaaggtattttttccagtagtatagacacttgaggtagtgctatcattttaaagtttggtgtggtttttgcgccttctggtgtttttctgtgaacagtgattgggaactgttcacttggaagccagatgttttcatcagcagaagtcagtggaaccgagggaccagggagatagccagagagaaaactgtagctgaaaaccacttttaggatactgttgttttcattgacttggcttcattagagtgacacatgtgtgtcacgatgccctagcaccatgagaaccatggagcctgcttaaaaagagatcaatgaaagccaaaaatccggctgcctgctgagaggctgctcaggggaggtgggagaggcaggaagcaaatcatggcatggagctctctgcacaactcccaggatgtgctgccagcaccccctcccgaaagttaattacagctagagctcttctctgacctcagatgttttccaaacacaaaatgaattttttagaacctacagaatgtaagttaagatctctgctgcttgcttaagggactgttggaatccttttcagagctttccagccttgttaggactgcttggtcatttattattggcatgtgggtggacatctaactcacagctgctatttcacaaacagtaataatattgaggccacttggtgaaatcaaaacaacactagagttctggctgtcttctttccatctataaaacaaggatatcctgagtgcagtgagagggcctggaatgtgtggtatgatagttgtggctctgcggagaccttcctcctgtgtttcagggcattgctgacatgctgtaccctttggtcttgccttccatgtaccacaggatcgataaacaaataagcaggtttcggagatggttacctaagaagccaatgaggctggacaaggagacactgccagacctggaggagaatgactgctacactgcccctttcagccagcaaaggatccatcagtgagtgttccatgttaaagccccatctcactaaggatgtgcagctgtggtagagcctcaccctgcacgcctttgattcctgggcatgaggaaggaacagcatagtgcccttctcccctaaaagtcttgtgagtgttcatatcccttttatttcagtcaggggaagataactgctgtaaccaacaatccctgcatctcagtggcttaagatgatacaatgcttgctcatgtgtgtgttgggtaaatgatcttctccacagaaaggcagtgacccaggctctgtcattctcattgctctgccaactccctgtgcacggagccccctgcaggctcatctgcatctagccagcagacaggaggagtggcctacaccttttcccattgaaaagagggttttttgttttccggtttttgttttatcttggttcacttctcagttcccctttcttcagcagttcactgggttgccttaggaaaagccacatcacctggcagcccacttgctgagtcatctgtcagattgtctcagaatggttatttgtcacttttgacatggggggaggaaaaacaagttggctaagtcactgagcctgtgaggaactgcaaaaatgaaagagaatttactctgaagcttctgagatgacaagaaatgatggctggatgcagggcagggcaggcaggaggacagaaaagcctgccgtgtgctggagactgtaaacaataggagaaacacagcctctcagtggaggcagagatcaggtcagccccacctcccttgcaacaagatcaggaattccaggccctcttgctccagcagtagtgacagcctccataaaaatgacttacctggagggaagaaaagggtgatggatttaaaaaaaaaaaaaaaaaggttgctgattttgtgagaaagtaaaccaggctgagtgctgtggctcacatctgtaatacctgcactttgggaggcagaggcaggcagatcacgaggtcaagagtttgagaccagcctgaccaacatggtgaaaccccgtctctactaaaaacacaaaaattagctgggcatggtggtgcacacctgtaatcccagctactcaggaggctgaggcaggagaatcacttgaacctgggaggcggaggttgcagtgagccaagattgtgccattgcactccagcctgggtgacagagtgagactctgtctcagaaaaaaaaaaaaaaaagaaagaaaaacaaaaaacgaaggtaagccaaatggcagttttcaagaagttgcagggagtgccaggtggggacatatttcagcaacagaaaaacggttaaagtctgtggagctctgcagggcaaaggggaaaagaaaaatcaaagaatagatgttctgaatcaaaaatgtgtaacagtaagagcagtctaatgcaggggaagcaactctgtacgcctctgaaatagccgagctgatccccacaggtcagattaaagccaacccagctgcagtatgtgaacatttgaaagggtcattgaagcaaacatggaattcacagactggcctcaaaatcttagttcgatcctcaagagaaagtgggaactggaagggacataatgttaattcagagatcagggtgttttcttaagagaaaaagacagaaaaaagctgatacgttcccattcttaatttaaacccctaccatgtctctcttgttcatcttggaagttttttagacaatgagttgtttccctaattcttccggaatgatgtctggtttacaggcaggttttccctgtgcttctacctgtttatgatagagttcctagcacagtgcagaagggtatcaccaattttggatgatggatggatggatacattgataggttgctgggtgggtgggtggatggatggatggatggatggatggatggatggatggatacatggataggtcactggatggatggatagatggatggatggatggatggatggatggatggatggatggatggatacatggataagtcactggatggatgagtggatacatggatacatcaccagatggatggatgggtggatagatggatggatatatggatggatggatggatggatggatggatggatggatggatggatggatagatggatggatagtgtatatggataggtcactgaatggatggttgggtatacacatggataggtcaccagatggatggatggatggatgggtggatggatggatggatggatggatagtgtacctggataggtcactgaatgaatggatgggtatatacatggataggtcaccagatggatggatggatggatggatggatggatggatggatggatggatggacagatggatgaatagatacatggatgggtataggagtggttgtgtaggtgtataaatgaatagaggaataaatgaagtaagtggtatacactctgggattttatttcacttcaaagggaggatatatgagatataggtaaatggaagaaaaaaatgaatgaatatatggatagatggatggataaattagtgaagtatgtgatgtgtgctctggtattttgtttcacttcaaagggttataggtgtatggaagaggagggtttcccacctcctcttttcatgctgtttatattctacagtgttcttgctttagaacaatacttctcagcgtgattcttaaagtcagaagcccttggatacccagtagaatttctagggactagaactgagaatcatatttttggaagtatttaaaaatatataataaatgagggatgattagattagggatatttagccaactctctcacatatttgagaagcccttttgacatgctttggtattaatttgtcaaataattgatttattcaatagtcactaatttagtgttcacttcttgccaggcactgtctgggtacagagggtataaagataaacaatactcagtttggaccctggtgtagtaaagatgcagactattttaaataattgtaaacagtatgatgggtgtgacttaagagggggaatactcaattctccagatttggagggaggttggtaagtgatgaggattgatcacaagagaatgcttgatatgggtcttgaaggataagacttgcccaagtggataaggggcgaaaggcatcccaagaggagacagtaacgtgtgtataaatgaacgaaggcgtgaaataggatggagtgttttgaggaaccacaagtagccttctctgagtaagagcataggtttgtgaggaggacctagtgttgtttgaaaaaagagagtgatcaatggaagatgagatatcaagacaggagaaccaaggaagaaaaagcagaggacagctggaatgaatcaaaccgaagaaccagacctcagtgggaccaagagaatagaggcaattttatcgtgtaaataagaggtgaaaaattaaataagtgtcttgaatattatgagtggtgaggatttatttctctttgaaaattgccatgtcacatagatagcatccctcgggtgtataaaagtatgacttgaagaatgctggctgtcaaattggaaacaattgttgggtacaatcagaaaagaattccctaaggatgttttgagagtgacattaatggatttaaattaatcagaagtagctggttaataagctctgggaattatagcatgatattcctggctttccaaatatagtccaaaatcccatgtgacttcttagttttccagaatgtttcatattgtgtttttcttggaatacaagctaataatagaaatgtaagtgtgttcgttagggggtgaggtgggaggagggcatgaaaatagtaaaaaaaaaaaaaaaaaaaaagagaaaaacattgaaagtttaataagtgtttcatcagagacatttcccactgaaaaacctttcgagattttccaacctccacccccaattctggttgagatgtactcatctatgttttagtaatatttttcttttccttaaccaatattaccacccattttaattactttctccaagtctagagactccttgaaagactatgcctttctcactcatttttgaatcccatagtaagtgcttaataatgattttttaaatgaaaaaataaatgaatagatagaaacaaaagtaggagaatcatgtaagtaaagaataaagctgatgtgaagtcagctgactgcacactcatctcaaaccaaatccaagataccttcttttcaaatgtagactacctccattgttccctgtctcagtaaacagcactaatatttgtccagttgctgaaactggagtctggaagctattctagacacctctctcatctctgcttcttacaagttatacatctccacggattgatgattttacatcctaaatatctctatacttcagactttgtcactgtatttcacttgaaattcagaaataatataacaggtctccctggttttactcttgtcaccaccaatccattctctcaggtgcatactgcatggtgtcttcaaaatgtgcatctaatcatgtcacttcattctctttaaaaactttagacaccaaaattattactatgacttacaagctcttaaatgcctacctgcactgccatcccctctccagcctcatctgcctttcttgcctcccactcttcatttgttgtgatccagacacatgcagcctctcctctctcagctctttggatatactctgccccaggacatttgcatatgttgtttcctctcctggaattctcttccgattctttccttcttcatgtagtatgctgttattcatcctccagaactcagctccaaagactcctgctatggaagcctcccctgaccctctccttccccactaatccttccaaagattgggtctctgttctatactgttgtagttaatgtttcctagataacatttttttaacaattgaaatgctataattatttgagtagcatatgattaatgcctgtctctctaggtaaatggtatactctgtggagccataggccatatctgtttttgcccatgattgtatctccaatacctaacacaatacctagcataaaattggcacacaatgctggtcttctaaatgaaggagtgaggattgaagtcagaaagacagcacagaataatctaattgtaaacctttattctttaactgcactgtacaaaaatattaaagttgagaatctattaaaaaacaaatacctgccagccacagtgtctcacccctgtaatcccagcactttgggaggctgaggtgggaggatcacttgagctcaggaattcaagaccagcctaggcaacagagtgacacccatctttacaaaaatttaaaactagcagggcgtggtggtgcatgcctgtagtcccagctacttgggaggttgagctgggaggatcatttgagcccaggaggttgaggctgcagtgagttatgattgtgccaccatactccagcctgggcaacagaatgagaccctatctctcaaagcaaacaaacaagcaaacaaacagcctagcattccatttgaaaatatatctgtatttaaggaggaagaaagcaaacctgtgggtgtacaagtcaacatacaaatgctacttggtcactttatatgagcttaccaaggtgggcctacaggtagaaaaattcttattgtatgccagacactatttaagaactttaatacaatagtttgagggctgaggtattattattatcaccaatttacggatgaggaaagtgaggaacaaaatggtcaaagaacctgctataggtcgtacacctaggcgaggctacctgtctaaacaactcccaaatatcagcagtagaacagcatagaagtttacttgttcacagcactatctagtgtgggtcactctgggggaaggaggcatatgtctctgattcatgtagtcattcaggtacctaggctactgttatcttgttattctgccatcccctaaatcccttacagacaaggaaaaagagagatgagtgattttttaggaaatttttatgggccaggcctaagagtggtatatagcactttcacacacatttcgtagtctagagcttagtcatgtagtaatgctgggataactagtctacctgtgtgcccagaagaaaaaaagaagcagatttgccgaataaataatcgcagtctgtctgagtgatagagcaggaattcaggttcgaacaggaaggctctaggtctcacccttataagcattacgctctattgtgagatttctcagcctcagcactaatggcactggggctgaataactccttgttgtagggaagagtcctgtgcagtgtaggatagtaagcagcatctttagccactagatgctagtagcattccccaaccctttagttgtaagagaatcaaaaatgtttccagacactgccaaatttcccctggtggtagtggtgggatgggtacaaaatcacatccctttcctccagccttgaaaaccatggttctactgtctttcatcacatgacaccctttaggcagggccacccattctctgtgataaattaaactctatttgaatctaatgactatgacagccaagtccatttaagaattaatttatctctcttcacctctgtgcctgtgaatgttgccctgcttaagtatcattgcccttcattcttaaaatggcattagcgatgacacccttgaggcaattactttctaaggtcaatacccataataaaggttttctgctggtagacagaaaaaaggaaatatgcaagaagagtcgtgttactttttataatagatatacaggacattctttcaggaaatagatcaattctgattgtctttcagaaaaatgtgctagatatagacagaaaaatgttctcccctgcattttctgtgtttttattattaccattattttatttttgtaaacacccataaaaattgaggttaaattaaataccagttcttaagagaagaatatgaaatttatgctatgctacgtgcacatatgtttaaatatatattcactcatccacgtattccataccagttgttgctctgggtgcttggagatcaacagtaaacagaaaggcaaaaattcctgccctcctggagcttacattgtagctgggtgtaactggtaataaattataaaccagcagttgtcagtgaggggtaatttgacaacgtctagaaaaatttttggttgtcacaagttaggagtggagattgcgactagtgtctaacgtgtagaggccagggatgctgctgaacatcctgtaatgcacccaacagctccccacaacaaaaaattatccagcctcaaaagtcactattagtgtgctgaggtaaacattttttgaagtcaatttaaaagcaagtgaaaaggggataaatgctatgggaacagagaaaaagagggtggggtgaggggaatggggaggactgcatgggggtgggggtgcaggttgtatttccaaaagacagtgtttcagttcttcaaggcaggcctcctacagaaggtgtgattggaaaaaatcttgcaggaggtgagaagggcagagagagttccaagaggggaacagaaaacaaaaccaaggccctaatctgggagaagctctgattgtgtttggggaagagaacaaagaccttgtggctggagcagaaataccaaggagaacaacaatagtgatgagttagaggcgtgggagggagcctgatcctgtaaggcctgtgggcttttacagaggaatgacgtggtctgacttaacttttgacagtgtcattctgactgctctggcaactgcagtcatccgtgtgaagcatgatgtatttatattttttcaagtttctatcttttcaaaatcaataatgaaaatacatgccacatataactcagcattgacccatttctttgcaaagcttttgtgttgtacacaaaatgttttaactcatgtactgtgcatgtatgaaacagatattattgaaagaccccttgaaataaagtctgcctttaaaaggcacagattttatgtgaaataaaatcacatggctttagactcctactttcatctcctactagaccgtgagctacctgaggacaggagctatgtgcctgggagcaaggggcacccagggaatgtttgtgagaccaaagagaacaggaaaggagcaaggcagaattggcattgttaccgctgggggacagagccagggctctggagccagcttctctgatcttgatgcagcatctaaaaactgtagaatatttagaagagaagtgaaaaatgcggtcaaccacaatggtcaattgtggtttccatgtccaacttgaactttcccttgacttgattcagttttggctttagttctgctaactgataatctatcttctctatcaaacattttacggccattaaattctgttatcaggattcacatctgatactaagatatttaattcatgcatcacactttttaattatgtgtgatgtgtagtatacaaaatgggcattataaaaagaccacctgacacaaaatttgctttcacgcctttttctgcttctatgctgtgagctagggcataagaaaaaagtctagagaataacaaaatgacatagttctttgtgcctaagaaaaagcgctaacaatggaaatgttggtgctggggtcatggagggtttgtaagaatgggaaaatgttggctgggtgcagtggctcatgcctgtaatcccagcactttgggagaccgtagcaggtggatcacctgaggtcaggagtttgagaccagcctgccaacatggtgaaaccctgtctctactaaaaatacaaaaaattagctgggcgtggtgatggatgcctgtaatcccagctactcgggaagctgaggcaggagaatcacttgaacctgggaggcggaggttgcagtgagccgagattgtgccactgcactccagcctgggcaacaagagtgaaactccgtctcaaaaggcagtggggcagggagaagaatgggaaattgttgctggagggacagtgagtgggagattctctgagattctctgtaacatccctttgattgtcttcttatcttttgactgttctcagcagaaaaggcagcaagttaaagccagtagtgatcagccaatcaaacagtggtagcaccaatggcaacaataaaaatgatagcaaccactgtttactaaacaactccttcattccagggttacaccataggtatattacaagtctgtgagggtaagggtagaataatgatggtcagagaggctgagtgacttgctcatggttgctctggtcactgttagatgagtgaacagaaagaagtgtcttttcagctgggtgtggtggctcacgcctgtaatcccagcactttgggaggccgaggcaggcggatcacgaggtcagcagtttgagaccagcctggccaacatggtgaaaccctgcctctactaaaaatacaaaaattagctaggcgtggttgcgcgtgcctttaatcccagctactctggaggctgaggtaggagaatagcttgaaccctggaggcggaggttgcagtgagccgagatcccaccactgcaccccagcctgggacagagcgagactctgtctcaaaaaaaaaaaaaaaaaaaagtgtcttttctccacagtgctgccacctcctgtaggtgccacataaatggagcctaaatacaatttttcaactgccttaccctagggataagcctgtgcatgtgaagacatctgatttcctttggaatttattgttaaagcattcgagatgcattaaacagacatgaaataaaatggtaaaaatataaatgaatattctgaaccaaggagaatataagttaaagtaggcattcaagttcagggaaaaagtaggctcagatttgcaggcctcagtggcctatgtatctgtaatggttgacgaataaactagaaaattggcctttacaccaaaggggccaagcggaagggagaaacgtagtaactcatgtgattctgattgtcagagacgaagaaaaccaataccataggtaatgggttgctttttgactctgaaataaaattcttgcacagggtcattggagtggacagtgaaatagtgatatggtggacagtatccctggtaacctctttatcacaggtgccttgcaggacttttctgaaggctgtttctggtagtcccatcagcatggttctgaagacttaactgctcatggccataactttctgtgagagtttaggcaaggtatccagcaaaatactgcagtatacctgtgatggttaatactgactgtaaacttgattggattgaaggatgcaaagtgttgatcctgggtgtgtctgtgaggccaaaatagattaacatttgagtcagtgggctggggaaggcagacccacccttaatctgggtgggcaccaccaaatcagctgacagtgaacataaagcaggcagaaaaaacgtgaagaggcgagactggcctagtctcctagcctacatctccctcccgtgctggatgcttcctgcccttgaacgtgagactccaagttcttaagtcttgggactcagactggctctccttgctcctcggcttgcaggcagcctattgtgggaccttgtgatcatgtgagttaatacttaataaactcccctttatctatctatctatctatctatctatctatctatccatcctattagttctgtccctctagagaaccctgactaatacaacacccaaactaatctagttgtctttgttgtttgaactgtattctttaaaaactaaatttgaaaactgatcaaaaagcaaataacatcacattctagttgaaaatggttccatgtttgagaaacaatagaagctaaccagtgggtacacatctctatacgtcaatgcataaagcccttcgtcattttatatcttatcacaagagctaggcctacaggctgcccatcagccatgattgtatggccacctaaacatctgaccccacagaaagctctctcacactagccagctatggaaactcaggttgtcaatattagagtcagtcattccaggaggcccctctcaaaactcaatttcagaaaaggtcatttcaatagaaccatatgaaatttattataggaatatgatagctaacattcatatagtgcttagtgggttccaagtacttcacggttataaactcatttagtcctgtgagtaaggtatcgtcattatccccatttttacagaggaggaacctggggcacagaagggttaagtaacttatccaatgtcaaacagttggtaagaggtagggcctggatttcaaggccaagcattctggccccagtcttatctttttaacattgcatgttagttttctatggctgctataacaaattatcactgacttaactgtttaaaacaacaaaatttatcatcttacaattctgaaggctagggtgcaacatgggtgacactgagctaattaaggtatgtcaaggctgcactcctttctggaggagaatctatttctttgccttttctaatttctggaagctactacattccttagcccatggcttcttcctttatctttaaagccagcaacggtagttgagtccttctcacatcacatcactctgactttgcttctgtcttcacatctttttcttctctgactcttttgctttcctcttccatttttagggacccttgtgattatattgtacctatctaaataatccaggtaatctccctgtcttaaggtcagctgattagcaactttaattccatctgcatcattaattcctctttgccatattgcttaacattctgaggatgaggatgtggatatctttggagggccataatattgcctatcacagctgtacaaatttgccaatccaaaaagtgccaagggttgggacagaggacaggaaagttttgatgggaaaaaagaaggaaagaaaagagagagggagagaggaaggtggcaataggatttggggacattaaatgaaatgacatatgtaaaagacttagggcctggcgcgatggctcacacctgtaaccccagcaatttgggaggccaatgcaggcagattgcttgcagccaggagtttgagaccagcctggccaacattgtgaaaccccctctctactaaaaaaaaaaaaaaactttagccaggcatggtggtgcaagactgtagtcccagctactcaggaggatgaggcaggagaatcacttggaccagggaggcagaagttgcagtgagccgagatcatgccactgcactccagtctgggcaacagagcgagactccatcttaaaaaaaaaaaaaaaaaggcttagtccagtacctggcagatagaaagcactcaacaaatcaacaaatgatagttatcattatcattattaccacaaaccagcagtatactgagaatcctttggagaatctgcaaagttgcagttggtgtgtaatgggaaagtttgaggtgacagagactgattttgcaaaggctcataactgacctgaactggaattgctttgcttttaagccaaatgttactcagtgttccagatactttgccatttaacattttatgtgtcagtaacatatgactacttgcttttaaactctcagcatagatatcggaagatagtgattcttctaacctgtgccttttactgtatttttgtttcaaagaactgaagagttttttttattgttttcatcgatctgaaatctttagagaatccttcaggcagaggtaccaagattgatttacgtaggattaaggttcttttagtgcctcaatgacttaaagcagtctctgaacacttattttattgcagttacttattcggcattaggatcctcaatattcaggttgtttgtattgatccttagagtcaggggaaacatatctatgttctggaaagtcttaaactgaaatgaaaatgaaaaaagccacgcatcttgagatttgtgcttctcaagatcatacagctccttttaagtaggacataatttaatgactttaaagggacaaagaggtcacctaatcaggtgggaaaagcatacctctgggtatctggaggcccagtagttagttgggtctgttatcttaatatttgtgagaacatctgtgaataagtcacttggaaatattttattacatttatctatctgtaaatacatagtttgtttttctgcttatcagttcattcatttaacaaacactttcaatgcctattatgtgccacatattgtactataatagaaaaatatatacaatatgttgatgtatatttatgtgtgcatgtatatttatgtgtgcatgtatatttttatttaaaattttaacttcagtatgttaagttcgatagtcaagaggctattttcctcatcagaatggtaaaaggcaatttaaaacacctataggaaagggaaagagttgtcaaatttacgtacagtaaaataaggaggggttaacctaagaggaaggaagggaactaggatcccatctgttgctatagtatacgtatgtagtcacactgtgcattaagtcttaggaaacaacagtggtgagaggagacaaggaagagcagaggtgaggaaaacctagtgcttcacaggcaggtagacactctggtgccccattggtcagtattctgtgccaggctgtgcactgcacgccctccacattatcttttttgacccttgcaaaaaccctgaaacataattttacagaaggaggcgcagaaactcagaaacattaaatactttaagccagggttacccagtaacaaatagacttggagttagaacccaaatctgtctcattgcaaacccatgctccttccataatacaacctgacatatattgactgcccactagacaccgggctacctgggaggctactggtattgttatttccgtttagagaaatggaacacggaggagtaagtcacctacctgagttgcacagttggtcaaagtaggaaaacaccctgagcagctgggggagggtcatttctgggcctgcttctgactcacatccaggagtggcactggggagaaggagttgttaaacctgtaaactgtgaagatggtagtttattcaaataaccactaattcaagaccacgtcttagaaatgtctttgtctgtggggaaaaacctgattcttctcacttcccactttcctcacccctgatacaacacccacaccatcagtttggtgtttcccattctagatgagtgatttcaccactgtgtgttgaccaaccttgacgctcccatcttcctcgctgcccaccatcaccaccaaatcctttcggcccttctcctcctttctaaccccactgccattgccttagtggaagcagccacttagatgaacaattacgacagtctcttcacctctgtctttcctcactcccaaatctgtctatcccactcatgtcacaggacatttgcaaggctgctggcactggttcctacagtacctgtgcacagttagaagaaggacatccttcctctaggaatattcgtagcgcatggattggcaagcagagtatggacagggtcaacccttcatcatgcccttggctgtgcacctgcaggagtgaataatgcacagtagtgccacgtgtagtaacattgcttccttgcttaacagcttttaatgattccccagggcctttgggataaagcttaaatttcttcacatggcatacaaaactgcctttttagcttcttcccttctccccccagccttttgggctggtgctcctgcagcatgggaatggaagtgaccctaaatattccatgactatttttcctcttcccaaggtgtgctctctttcctctcactctttggtaatatcctgttcttccctcagtaacgagttcaggtgtcatcttctttatgaaacatcttatgtctcatgtctcatgcagacagcattagacttctgggcccattagcctctgtaaatgctttaattatggcactgactattatatcacagttacttgttttcatgactgtgttctacacaaagcccaattcagcagccaaaagtaattagaagggagctccagactaagtttctcaaaggacataaagggaaaccatatcctcagcatccatttattatcatcctttcctctccttccttagtcaaaggtcatcctcctactgttgacaaaagcattcctcctctgccctagcctatacggtttttctttcctcttcctatgttgctctcctccccacaaacctcagccctctctcctattgctttcttatatggattgccacagcttctccatcaggaaaaaagaaaacactcatcttcttcaggcgaagccataaattacaggattatcattgttaggttagagactgtgtcagccaggttctgctgggttctgatacaacaaaccctcaaatctcagtggcctgcacaaaggtttatttatagctcacataacatgttagcaacgggtcaactgaggctttgcctcacatgattcctttatcatgggatctggactgaagaagcagtctgtaagacatgcattctcatagcagagggaaaaagtaatggcacaaccacacattgacttttgaaatttctgctcagatgtggcatatatcacatatcctcacactctgtgtgccaaaacaagccttatgaccaagcatagtatcaatgtggtagggaattatatgctttctccaggcagggagaatgtcagtaacatggtaatgagtagagatatattttcaaagcagcaaattgggactaataagacagtatgctcaggaatacctcgtattaatattgttttgttttgtcacattcgcatggcacatcagtctgtgagcttacggggctcagatgatgtctcatacttttttttatgatttacacgtaattgcacatatttatataggaggaataagttctggtgatctattgtatagtaggatgactagaattaacaatcatgtattgtatatttcaaaatatctagaagagaagtttttgaatattctcattagaaggaaatggtaaatgttttgttctgaacacctagcatatttttagaaaaggaattttccatgcaagttaacaaagacctgggcagaagagagatctctgtagggtagaaatcacacttgaaactggaatatttgaaaattccaaatcaaaaatctatctttatacttgggtgatattcctatcagattaccaagcaggataggtagatggctgcttctgtggtgtgtagtttctcagagaaggaggtctcctctccaaagaatgtttctttctctagatccctatactacttaggttccattcaggaaaactgaaacctggcagttatttttttaaaaaaaggatactgtgggggaagtgaagaactatagtgtcgcaaaggaaacactgaagtcaagcagatgataactgcaggaagtgaagcagctactgcctctagagttgggggagcaaaatgaagaggttggggttatcggaaccaagatgctcagagaggccctgtggagctgagcctcggactcctggggaggagattctgcccttgtggtgctgggccctcaaggatatggggcaacggagtgagcctagtttggggagtgttgcttttcagctggaaactggaaccagctgccattgtgaggtcagaggatcattgctgacaggaacaggcaggcaaacaagaaggaccaaggtcctttcacctgttctcccttccagtctccctctcatgccctgtactgacagagcatatcagagagacagacagcaatgcagaaatgtagtttgcagagtctctattctggcattgtattatagaaaagagtaaggaaggggaaatcagagataacttaatagacagcacactccctaatacctggaattttacaatttgaactttaatcctttggctaaagtcatcctcaattaaaataaaaatgtcccttggaaagatgaaaattttaatgtccttctttattgacaccccattatgaatagtttattgaaaataagaagaggaagcaagagatacagatgaggtattttggccgtagcaggggcagatagagaatgccacaaagatggtggagggccaaaaaagagcaatgaaaacagggggatcatggaagataaattttaccaacttccagattttgcagatgcttggcagagtttctaggactttgctgctcccagcaatataaatgaacagcagggacagagatggatctgtccatttggtcaacattcagaacaactcagctcatataaaaatgagacccatgactaagatcagactaagatggagggagccatggttgagtcactgaataataaacttatgcagggacaattgcctaagtaattcaagcaaaaccttactattgactgaattacagtagtgccctaattagtggaacgctgagagcttagcttattctaaattggatttttctggtctgaggattaattaggaaatatttccagacttgttttatagattaaaaaaaatgatttcctctttattctggctcacttttgaatagcaaataaaactaatctctaataaatttgaatattgcattgttttcatttttgagtgtctatctcagttgagtctgcatcaagtaccagttctgtggcaagaactgtgtagagctggacaaagatgaatgaatcattttctgaccttaaggattaatggttgagctcactcaagctctggttggaaacacagggcctgggtgcccaatcccagctctgtaacttgtaaggtatgtgattctgagcttcaacctcttcatctgtaaattggaaataataaaaaatagccatataatattgtgaaaattaacaacacagtatatcagtgcttatggtatatgttcgataaaggtattttatttttgttgataattttgatggaaccttatatataaatagataattttagtatatgtgaattctataaatgctgattttcatgatccagtcttaaaggtagatagtttaagattggtgggaagttttcccaattctaggatattacttttttctcttacttttttcttctcttttctatagcatcctttctcctttcttttcccctatcatttcctcttcctgcctcctcctcttcttccagaattatccagattgctatccacctctccatttctcttggttgtgtatacctagccaatatcaaaggtactgtttggcctactgtgccttaccaataggttttcaacctctggctcaattaatgcatatccttttgttagataactgactctttaaaatatttattgatgcaaccaataaataaaaagaaaaaggctattccccagcctttttctactgtgatactttacttatgcaacatgctccctcatgttttcctgttcctgcagaaagcacgttagaatacctgggagtaaaatgatcctattataaaggtaccttaaatccattctgatttatttttttaatcattcccaagttttggcattctaatcatcattactgtcaaatacacacctcaccattttgtcttattaggatgttgtgacacatgggtgaataagaccccaaaatttgactattgcttctttcttaagacctgtcctattggacatgcacccttagtcctagtaatgctcttcctaaagtaggtacttcctcaaaacacttgcacatgtgcattttgcagaacgttcattagagcattgtttataataataaaactttataaatagcctaagtatccactagcaagacaatgagccagtaaactgtactgtcccatacagtagacttctgagcagcagggaacatgatggactagagctccttgtatgaacatcatgaacctcaatgctgagcaagcaaagcaacttgcaggagagtaattatagcatgataccatttctataaagttctaaaatatgcaatactgtatttttaggaatacctgcatgttgtggattataaaacattcctgatagtggttacctctaggggaggagaatacaattaaaaaggaggacacagagaaacttcaattatatttgcaaacttttgattcttaagtttgttagtgggtatataggtgtttgatgtcgttcaccagtgcatttttgtatgtttaaacatattttattaaaagaaaaagatgttcacaagatcttatttcaaaatagcaggaacttatacactgggggcctgtttgaaccatgagagtcagtaatcttataaaaagtgacaaatagtgggccaggcaccatggttcatgactgtaatcccagcactttaggaggccgaggtgggtgtatcacttgaggtcaagagttcgagagcagcctggccaacgtggcgaaaccctgtctctactaaaaatacaaaaattagctgggtgtgatggcatgcgcctgtaggcctagctacttgggagactgaagcagaattgcttaaatccgagaggcagaggttgcagtgagcggagattgcaccacggccctccagcctgggggagagagtaagactccatctcaaaaacatttaaatgaaaatttttaagtgacaaatagatgataataaaaatcatgaaactaccatttatgagcatcatgtgtatgtaaccacactgcatgcagtatctcttaatcctcaaacatcctctgaagtgggtgttatggttgtccccatttgaaagataagaattctaaggcttagagatgttacttttctaaattcaaacagttagtgcttggcagaaccaagattctaacccaggtttgttttttctttaaccaacaaagtagatattattgtattccttcaagatgttgtcattccaaccaataagatataacctagctatattatttgggggggaaaagagtgacccagaactcagagttttgtttttgtttcatttggagataaggtcttgctctgtcacacgggctggagcacagctgcgtgatcatagcttactgcagccttgaaatcctgggctcaagcagtcctcccatctcagcctcccaggtagctaggactacaagtgtgtgccagcacactcagcttgagtttctaaaaaaaaatattgcgagctgcccacatgtttacaatatcttgggctcacaaaaggtaaattctatctatgaggcgacttccctcaaaagtctaccttcaagctggaacatcagtatttgtcagtctaatctagtgcataaaatactgagccctaaaagcaataagaatcattgtgaagattctgactttatttcaatgtggatgttttatttttgaaaataattcaattttttaaaatgttagttatctttgacaaatatgttattccaaagggttccttccttccttcctttcctaccaccttataaattaaattaaaattagacatgtatacattttaaatagccctacaaggtttgttttgaaaaacagcaatcccatgcttcaaccctttatatttgcccctcccaagaagcagcccctttcaactcttttacctgtttattttggcaattaatgcctcatatctaaataaactattttattattactttgctgtttttcagttatagcagaatctattacttcccccatagagaataagaatttgctgtttgtttcttccctacaattcttactacagtagatacctattcttatcctttcaacgtagttatattacaatttaattacattatcataatgtagatcactatttacataatgactatacaaatgctacccagagctaggtcatatagtacaatatgaatcattttccttttttgcgctatttttgcttgaactggagtaactcattctcttgatttttaattttcaaaattttctatgtacctattactaattccatcttacattctgccagttatttggcagagtttacctaaattgtctaaatttcaagatgttcagatgcatcatacgtaatcaatttcatcttcctgagaaaattactctggagccttctgacaagttccaatctgaactcttgccttccgctcctgttataaattatcatcttggtatcttcctttaccaaggatatcctaggattctctttgtctttcacttttgtggcatcttctgtttcctgtgtatcatttcttacactttttttattgtaccctcattttgcattctctagtgacttcctaataagattacgtggatgatattatttttgcgatcatgcatactgttatgggtcaaattgtgaccttctgaaattcacatgttaatatcctaacccccaatatctcagaatgtggccttaggtggtgatagggtctttaaacaggtaattatgttaaaatgaagttattaggatgggccctaatccattatgactggtgctgttatataagagaaaattaaaacacagacatacacacagagaagatcatgtgaagacatatagagaaaacagctatctacaagtcaaggagagaaaatttagaagaaaaaactctgctgacagcttgatcttggactttcagcctccagaactgtgagaaaacaaatttctgttttttgagccactcagggtatggtactttgttatgacagcccaagcaatgaagtatatgttcattatactgcactcattatgatagttgggctaggtatagaattctgtataaaaccaaaatctgtttttctcacaatttttaagttcttgatcttttaacttctaaaattaatattcaatattcctgctgagaacttcaaaaacattccaattcctaattctctgtgcgtaacctttctcctctatggaaccttatataattgtctctttggcctcagtgttctataatatcataggaatgtatcttgatgtggttctatgtttacttatattactggatgctcagtgaaccctttcaacctgtatagtcttgtctttcggttcagaaaaattttcttgaataattcttgaatgttttagctgatttattccttttttgtctttctggaattcctatttttcagttattggacttcctgggctgatcctctaatgtccttatcttcctctttttttgataatctatatatttttgctctgggagaattcttcaagttattttctggaccttcaccccacttctttaggtcactgtgtgccccagttctaagattttctgggatttcgtagtataaatattattgttcttgggttttccccagaactggtttagcattcagttttttctggttttctaagtctattattacatagatctgtctgcttggcacattccaacattttgatgctgttgttttgtgctatctttgttctatgagtgttcttactgttatttaaacatacacacccactatgcatgttactatcattttcatgggattttgagagagacagaaaaattgtatgcaaatgtttaattttccatctttacttggaagctcaagagcaaatgtttcttaatttgtatttaacacttagataacgaagatgatatcatgaagtacaattagaaatggccatttgaataaggaaaatgactcacagtcctttacatttcagtaacctgtcatcctgatctaaaaaaagaaactttaaaatctttaccaaatagtcagaactttcaatgttatatatttggcctgacaatcttctcatctttttgctcataaaatgtctactcaagattagaagttagatattgtgctgcagttgcctaaggcccagaaaacgctcaaaataggccttgtcacataaaaaattaattggttgctttgttcctacttagattttcattaatttgaggacataatataagtgacagttaactgtatcacctttgcttctccttgttaaaaaagaaatacctatttaaaagtctaattaagaaagtttcctgaaatatttatttttaaggcattaaccttcccttattatattatggaataacacaactttaaacatcagaaaagactggtatgttggttatctattgctacataacaatctactacaaaatttactgacttaaacattttatttgcttattattcttttgttttagcaatttgtgctagattcagctgggaagttcttccactgctttcacctggagtcaacatgtggctgcagttgtccctttgctcaatgagctggacagtccaaaatggtctctgtcattcacatagctgggggatgctgccagctcttggctgcatttctgtctccacatggctcatcttcaaagaggctcgtttgggcttctttaccctggcagccttggggcagcattccaagtgggcaagaatggaagctgcagaacctatgccaaaaaatcatggaaattacttctgctgtatactgtagattaaagccattcacaaatccagctcagtctacctcttgatagaaggagcaagaaattcacatcccaaaggagtgtatatacagacataggaggaatcatggccttttttctttttttttttttttttgcaatctaccacagactgctgtctggctgaaacttattcacattttttccatatagaaaatattctcattcccattccaggatctccatgggtctcatcccaatattgcatcaggttcacagtcttagatctcatgctctgcatcaggtgagttgaggatgaaaacccttggctacaactcctcaggtgtacactctttgtgagccagagacctgtgaatgaaaaagacaagttacctgctccctacaattccaacacatggtgatggaacagaggcagaataattacaataggtactgccattcaacatggggaacaacaagaagactgtagcagtcacttgttcacattaatctgaaacccagctggtcacatgcttcaggctccttcactccagggtcaaaaaacctaccttgattagttatctgtttctgtttcctactttgccacatgccttaaatttttagattcacagaggtcaataatgtgactataattctaaaataattgtacaaaaccatctgtaggtagttaagtgcttcttgacaaagttaccccttcctcctgaagtttttaaccatgcagattttcatacctttgagaatacttgtttgtttgacccacctcagaaatttcataatatatgtaaaaaaaaaatggaaaaaccatcttccttgcctttacttccccaaaagtagtaccacatacaaagcatcattataaaatgatactgattttgagaatcttcaaattacaaaaaaagttaaaatttatctataatataacctgacagtttctggaacacccagtggttctctatgggaatcacatgatttacttatttacttggggcctagagtagagcatgagacagaccaagccctgccctcacagagcttgcagtctgtagggggagaggggcagacaacaaaaatgtagacacatccccacctcatcccagctctatttttaaaaattttagggagtaaaacataagagaataaaacagggtaatggaggagagagaatgagtgacagagtgagagagagagattattggggcaggagagtgactatcttagctaggatgatgaagaggtgacatttaatttgagaacaaaatgttgggaagaaacaagttgtgcaagaatctaagaaaagcatgatcaaaagccctgggcagtaacagtctgggtttgtttgttcagggtcagaaaacaaattcaatgttgcttgtttacaatgagcaaagggaagaaaggagataaggtcattggtatgggcaggaaccatgaaggactgtgtggaaaggtgaagtcattgaagagttttaactggaaaagcataagatcttattcattttttttaaaaaatcattgtggttgctgtgtagaggatggacaaaagagacagtgaaattagatagtacagttaggaagctattgtagtagtcctagaaacaactttgcagtaggagggtgagaaagggtcagattcaggataatatttgggaagaggagcccagagaccttgatggattggatgttgggcataagagagagggtcaaggatgcatctcaagtttgtgacttgtgaaattgggtgcacttcagttccttttttttccacttttattttaggttcaagggtacatctggagaaaagggaactctcatacactgctggtgggaatgtaaattagttcagccattgtataaaacagtttggtgatttctccaagcatttaaaacataactaccatttgacccagcagtgcccttttttaagatggaaaagcctaggggaagaacaggtttttcctttataagggtccagatcaaaagttctgttttggaaatatttggtttgagttttttcttagacatcaagcgagatgtcaaacaggcagttgaatgtgggagttcagtcatttaccagcaagccttgatgacttgcctcatcaatactttatagtctcactttgtgactatctaaccctatccttgggcaactaagacatggggaccctcatttcctgacaagtagagactcaatgaattacccaaggacacacaactaaagtggaagagcagggcttgaaccaggtcttctggcaacctacacatagtcctgtagggcactgctaacccctcctctactctcctgcttattgtaatcaaggggagatgcagggttttaagataccattctggaggcagtgggtgtgccacatcctcaaagtgtcacccatgacttaggcaattgtttatccatgctgttcatatagtatccaccagccacatgtagctacttaaatttaatttttaatcaattaaaattaaactaagttaaaattcactttcttagttttactagtcacagttcaagtgctcaatagttacatgagtaccatattggatagcacagataaagaacattttcatgatctcagaaatttctattaaacagtgctggagtctagattaatctaatgttcccttcagttatattaatttgtgaagaaagtgtagtcttatcctaaaagctgtgatctaagaggaaagtttaggaaaaaaagaaagttacctgctttaaaattagcatattttataataagctgattttagatccagcattaatgagcacctttccccagctcacacccttgaatatttgtgtgtttctcatgttatctatgaaggtgtaggttcctctgaggagagaaactaggtttttttcacctttgcattcccctctcaaaatatataaatatacaacgcccatgcccatatatacacaccctcaatacatattgctttgcacagaacaaacataatatttacttgttaaatgacccagcatatcacagcattttacaacactactgtggacagttggccacaggaagaacctatcaatcagagcaaataaactccaggaggtctgtaactaaaacccgattgcgcagcgtatttatttctcatttctcccttcctagcaaaaggaatattgggacctcaatcttccaccaccccgggtgaaaacgaggttgctcactaccctagaaagcataaaggtcgagcctagaggagagtcagtgggaagttcaggccctggtctgcccattacttcatgagcaggccagcaaggtcttcctcatggggtgtgatggagatatgcagaaagcccttcacacacatgcacacaggcagacctgggcccctcacagttcccttcacaaacgcaggagaaaatttggagcaaaacagatgttttctgaattcctccttgccacttgctgtttgtgtgactttgggcaaattacattagcccgtcaaagtagcaggataaggagatgtgtggatataggccttgatcacagagttgatgctacacccattcagcagtttattcccctcttcaccgaatttcagggggaatgtgagagcaaacctagaacagaaatgtgctttccttttaagttttctttttaaaaatattttcaaatgttttttaagaggcagaatctcactctatcacccagactggagtgttgtgttcatagctcactataccctctaactcctgggcctaagggattgccctgcctcagcctcctgagtagctgggactataggttcacaccaccacacccagctaatttttttttttgtagagatggggtctcactatgttgccctggtcttgaacttctggcttcaagcggtcctcctgcatttgcctcccaaagtgctgggattgcaggcatcagctactgcacccagccaaaaattgcagttttttaaaaaatgtgtaatagtacttacacatggtaaaaatttcctaagtatgtacaatgaagttttcctcctgtctatccagccacccagttctccccagaggcaaccaatgttttccgaggtgtatgtgtcctcccatagtcattctgtgcatgcacaagcaaatatgcctatcaacatattcatatgcatgtacttcctaatatgtgcacattttcctctgacacaaatagctgtgtgactgttttgaaccttttctccttgtcctgtcttggagatttttttagatctacaccaagggcccttaatctatttacaggtgcagaatattccactgtagagttgtaccataattttcttatcctatcccccactgattaataatttaggttatttccaggcttttgctattataacccatgccataatgaacattgttgtacatctgtcactttgcacacgggtaagtatatttgtagaatacatttctaaaaaaagaaatccctagattagatggtatgtagtgaagatatatgcgtagttttgatagacctgaccaaatggcccttaaagagtttgtatgtttgctctccccctagcagtgcatgggagtggatatgagtttacaagccaatgtgaagccctggtcagagactgagccccaagcctcatgtttgccagagttgcttagcttacattgtgtgcatgaggggatgggggatatgtgtgtgtatgagagagagagagagacttcatttggagaaagctgtggctaactgtgagaaccatgatatggggaatcatcactgttccttctcataatcctccagtttgaaagaatgacccagaaaatgaaagtgttccacaccccgcaggaagatccttagacatgcagtgtggaggcagtagttcagctgatagctagaagagatggcaagagcaagagcagaggccaaggtataaggagatgagatttagtttcatagcccctgtgttaggttatttgcattgctataaaggaatacctgagactgggtagcttataaagaaacgaggtctattttggccacagttatataaacctgtacaggaagcatggcaccagaatctgctcctggtgaggacttaggaagcttccaattgtggtggaaggtgaagagagagcaagcatgtcagatggcaagagtgggagcaagggcaaggtggggcagggggaagtggggagccacactcttttaaacaaccagctcttacataaactaccagagtgagaactcactcattaccatgggcgtaacaccaagacattcatgagagatccacccccatgaaccaaacacctcccaccagaccccacctctaacactggggattccatttcaaaattagatttagaggggacaaacatccaaactatatcagccaccaacattagctagtgttcttcagatggtcagctcatttgatccaactttaagtgtttatcatgtgctaagccctttacctgtgctggaaatacagagatgagcatggccggtttctgccctcaagaagctcacccaaggaagtgggccatgtgggcggacagctttcatggaatgtaatagaaactacagcaatgatgacagctaactctgagaacatcttcaatgccagccagtgggctcagcactgcgtgtcatctcacttaattgtacaatagccctgtgaaggtgattacagtgttatccccatttcacagatgaggaaaccaagacccagaaaagttgagggatagccctaaaaccacatcataggtggcactactggagtatatgctgaggtctgtctgactgcagagtattgagataaatcagagtgttcagcatactcagagctaaaagtcgctcctcctcctccatcagtggttctttgcttccttctctctttatagcatcacattagttgttctcacgctgctaataaagacacacccaagactgggtaatttataaaggaaaggaggtttaatggactcacagttccaaatggctgaggaggccttgcaatcatggtggaagatgaaggaggagcaaaggcacatcttacgtgttggcaggcaggagagatcatgtgcaggggaactgccctgtataacaccatcagatctcatgagacttactcactatcacaagaacagcactggaaaaactcacccccatgattcgattacctcccaccaggtccctcccatgacacatggggattatgggaactatgattcaagaagagtgtggggacacagctaaaccatatcaagcaccacactgcatttcagagtgagggcatggaagtcaagccagggcctctggggaagatatggcctgagctgagatttggaaacaaatgaataaaaacctggaaacaagagcaatctggacagaggaactctcagctgacctccaggagactcagcctccaggcctcaggaagtagctggcagacagaggcaagcgagcaaacagagtcaccacaggggtagcctttggagccagactgcctgagttcaaatgctggttcagcccttttttagctcagtgacgttgggtgcatcacttaacctctctgattcttcacctgtaaaatgtggctaataagtactacttcccttatgggttgaaatagggattgaataagttcatgtattgagactgtttagaatagtgtctggcacatgccctgtgtgtgtattcctctacagaacctccaggctccaggtacagcctagatgtaaggaaaagaaaaacaaaaatttgaagcttgtctgtggtgcttattatagagaacatttacatgtgctcagaaaatgtaatgtgatgctataaaaagggaaggaagcagaaaaccatttaatggaggagggacatgggcttttggccttcaattttcttgtcaagcatagttgtgcttctcagctttcagttatcatctagaattgtgaggcaaaatgtgctttttatttattgtctatttctttatgacatctttacttggtgttaaaatataatggcctgtctcaaatcaggtgaaaaagcagaggaagataaaatacaaagaaacacattcagtgagactctcggttttctcctcttcctctttgatgctgtaaaatgttttcagagataaatgtcagataaatgctgcagcatcctcatttacccacacagcgtttatcgctcatccaccaactcaaattacctttctccaagagcggtattcagtaagagaatccaagagaagtaaaagtgagagaaaaatacttcggtaaatcagttctcatgatttactttttgtctccatattccctggcctttctttcctttatctgttatcccaaagtcacatttccagccctgtttccaaaccaaaccccatgcttggactactctttctcgaggccaattttttctcttcctctcattatttgaacaactcctgagaattcatttccttgaagaaaaacatttagcaaattccacatcataaattaccatgaccctcacatacctgtgtaccagccactcaccggatccctgggctacagaagtgatgattcagccctttgtcctgaatgagctcatggtcttacatggaaggaaaggcatgcagaaggaggttgaccttgcctttctctggcatacactcacattcatttccttgatgctcttgcttccccactatactgtaagcttctcaaggacaaggattttatctgttttgtttaccactgtataatttgtaccttaaaagagtatcctcagtaaacatttgacgaacaaatgaaaaaaaaatgacaatatggaatgatcagtaaattgatgtgcttgcaaaataagaaatagcacaaaggaaggagtaactgaatgctttgggggacagaagtgtagttggaggggtggggagacttgctggaggaggtgacttctgagctgagtgttggggaaaatgcctacatttatatgcctttgcatgatgtccagcttataggaggtgcccaaggaaagtttgcagggttgataaactttataatttatgaaggagttacatatacagtatctctaatattctaccattttttgcattcgtaaaaaggggaaacatggccatttcatgctggattatgtaaacctggaagctctatctgctacctagaaaacctcttagtagggtacaagcacctactggaaagccgtgtgtgtgtgtgtgcgcacacacacatacacacacatacctgcacatgcacccttgacaaagtagagactggctagggcacttgctgggaggcaaatcaatcttaagtgtgtgctttagaagaaagatcctattcacgaaagaacatggaaaaggtaaggacagaggtgatttccagagactggcctctcacctcacctgtgagccagaccacagctcattacctaactcctatatccaccacccaagccagttttatatcttaaaatttctgaaaatccattgattatgccatgggagagcctgaggtaggagagaagaggagagaaaaacaaaatgaatttttagttgaattaatataatgagcttactgagaaaaaacaagatacaagacctagacttgctattagtttatttttaggtttcttaactttgtttagctccagctccttcctagcatgaacgatgttgatgctgaaaaccaaaactactcatacctatgagcctactatcctggtgtgatctctggctccctcaggctgttccagacacaccctgtctatgactgactgaagacatctgcatctgagcaacaccaaattataacaaaaattagatccttcacctccgattaattctcaacttgtatttttaatatatgtatgcagcttcatcatacacaacaaagaaacgttcttcaacaatgccacaagaagtagaatcgtgcatcacattttacaaagaataaaatatgaagaaggaaaaaacaagattggtaagtagtatgttagtataacaaactacatttggcatttgggaattacagacttcttcccttggttttattaagtttgtatcaattctagcaatgcttgtcacttataaaacccctaactaatcctttgatgaataattcacaagtgtaaaatcttcgtcgcatccttaaatatcttctttaaatagcatgttgtctcatttgtctaagatcatggagaaattctctcattttagaaaatgttgtgtgccaggcactgaactagatgttggggagatatgcatagttctgatctggagcttgtgttcaagaaattaaaagcagacaataaaccaataagtaaatacaataacatgaagaaattaaactggatgatgatacagagataggctggtaaaaggtgggagtgagttcaagctgagatttgatgatgagggcaagcttcactgagaagctgaaatttgaactgagacctgaatgctggggaaccagtgtgggaagatcgaggggtagggtgttcccatgcagagggagctgtaagcacggagatgagctgtcccacaaaagcaacttctccagtcatctcctccattaaatagcctctaccatatatattttaggcatttttatgagaatgtgtccatattatattacacatttcctgccttattaaacagattattatatatcaggaagggttgggtggctttgttcttatctctttttccagcaagttttttatcaatagttttaataatgacctatatcagtcagggtctaatcaggagacaaaggcacaagtaaattgaacagagaaagttttatataaataattaactgtgacaggggattggagtaatggagggttggctagtcaagggtaagaataactctaaagaatacaggaatagcagatgttaggagcagctaccacctctgagaagactcctcgctacaatgctaagctgcagatcctgctggaagaggtacagccatggcagtgcagtttgctgggggctctagaaatctgccctctggagtactgggggaagctgcctcgagtggctccaaggaagtcattctttgggagttgctacatcagcagcactactctgtgaagccccccaaggggatactgaaaatctgcctttgaggagtaccatgtgtttccagccaccacgcactgcaggagctgggtactgtagaagtatgtgctacagaagcctgctgagatatcatactggtatcaggaagagaaaccccttcctcctccagtgtccctcccagtgtcttctgctggcaaagcttaacattgaatcagctgacaaaggagaaatagttacaatagttacattattgcaaagcaggcaatgaaggtgcatttggagctgaggggaaataagttaatatctggtgcatagcccagatgacctgctcatcaagctttcgggtagggtgaaactagaaggttgcattaaatgacaagactcagtagctggcactcagccaaatccagcaagatgacatttaataattttgcgttgaccatttctaatgtgtattttcttttcctttcagtcttttaaaaaatatttactaattcagtgaaaatgttatttaaacatacatttggttattaatgagatttgagatttttcaaatgcttattttattcatttacatttgttcgaatagaaaaggaagtacataaaattttacattaatatcactgtaaaaaattaaaaaaataatttttaaggtaaagtcttacagtcaaattcagcaaaacaactaccttggtacagtgtgggagaaatgttgctcaacatcataagaggaacagatttgagagttgagctgaatgcaagcttggtgtgagtcactagcataatgactctgccaaaaaaaaaaaaaaaaaaacacctactttgatcccaagctgcataaattaaaatataacatggagaaatagatagctttctagtccagatctgattacaactggaatattatgttttgtgagagtcaatgtatgggggtatggtgaagtcaaacctgatttaggtctttcttaactttgatggattttagttaaacacattcccatttctctgcattagtcatccttccttgaaacacattccttcaataaagtcctctgtgaccattccagcttgaatgaattcttctctcttctgaattcctatggcaactatttttggagtctatttgatagttagtcatatacaactcttcttttgttgtcttgaactacattcaataacattatgaaaatctaccacataaagagaaccactcataacatttgcgtactgaataatttaaatgttaccttagttacttttatatcttaatttcttattcattcatatggtttttagaaacaaacttaggatgtgctatgcatcctttttacgaacttttttcagttaacattgtaccataaacatactagaaagcaagtgagtgaaagtgaagttattattgcagtagctgttctgaatcacttcataaaatgcaaataactccaaatggcatcttcactaataatggtattatcatttgcagtacaacttatgactcttttttttttgttgagacggagtctcggactgtcacccaggctggagtgcaatggcaagatctcagctcactgcaatctctgcctcccaggttcaagtgattctcctgcctcagcctcctgagtaactgggattacaggtgcccgccaccatgcccggctaattttttgtatttttagtggagacggggtttcactatgttggccaggctgatctcaaactcctgatcttgtgatccgcctgcctcggcctctcaaaacgactctttatgagacactagtgtattaagaatctgcagctgaatgctgctcatctggataataagatccttaactgtaaataaactgccttatttatctttatatcatcactgcctagcacagtgcctggcatatagtaggagttcaataaaggcgtgctgaactgaaaagcttttaaattattgtgcctaattttgcgtctcaaaatgtgggatgcttttataagcaaaagaaggacagagacagtgatttttaaatgttctgaagaagcacaggaagtgtagtattgttgctagtcagaaagggtctttataaaagtttctttcatttgatgaaataaggagttttctattcaaagacctccatgtgttgaaaattggtaataggccaggcacattggctcatgcctggaatcccagaactttgggaggctgaggcaggaggattgcttgagcccaagagtctgaaaccagcctgagcataatggtgaaaccccatctctacaaaaaatacaaaaagttacccaggcgtggtggtcagtacctatagtcccagccatcaggaggctgagatgggaggattacttctgggaggtcaaggcggcagtgagctgagattgtgccactgctctccagcctgggcaacagaacaggagtctgtcacaacaaagaaaaagaaaataataaaagaaaattggtaatgatgaactggaatcatatctaattagaaataaccaatcagatagtaaattattaagccacaaccaagcattatgctgaaaaacatggagcaaaactactaatggcctgtagattcaatatttcattatcatctttggttttgtaaataaaagaaataatatgttagaagaaattttaatttcttgatagaactaatgtttatccagtattattttctgcctgaaactctttctgaaagtggcatcttgcatgagccaacatcgattagaaataacatgaaaatactgatttgtagacatgattcataaggatattttagtggaatgtaaactgccactatgtacatttttcaacttcactctgaatttatttcaactgtaaaaatcaaacctggtgaaacccactttcaaaatagagccatttaatagctcaacaaagatttatttaacaatgtgggtgcatacaataaatcttgaaattgatttgtatttttgaatttggtgcttagaggagaaattagtaaagtgaaaaagatttcaaatattggctactttctcactttgcaggactttgataaattatgataaacttataaaagttatcatctgaggccaggcacggtggctcatgcctataatcccagcactttgggaggccaaggcaggtggatcagttgaggtcaggagttcgagatcagcctgaccaacgtggtaaaactccatctctactaaaaatacaaaaattagctgagcatggtggcactcacctgtaatcccagctacttgggaagctgaggcacgagaattgcttgaacccgggaggcagaggttgcagtgagccgagatcgcaccactgcattccagcctgggcaacagagtgagactctgtctcaaaaaaaaaaaaagttatcatgtgagtctcttattaggtccttatgaatcctattttttctaacatctgggatgtttgaaagttattgatgagatatgtagaattcccaatagagactccagggaatcaaagctttctacatagtaattcattacaaaggtatttattgagggcctctggtgcgctagacaaactataaagccttgtgatatttggatttcaaatgtttttcttagatatttagtattaatgtgaagcatcttaaaacatattaatgtgttactatgattaaaagcatctaaatattgattgatcctccatcaatgaaaagtgaatcagtgcatgtgccattttccagttaggctaaacctctagattctggtaaggatctaaagcataggtagcattcctctcaagccacttgagaaattatgataatctcctttgaggtgtattttaggaagtagcagaaatcttgatctgaaaggagctttaaagatcaacatgttaaacttccacttctggccaagatggagcaacaggcacaagatttactctcccacctgaaacaatcacaaaagaaaaaacagacaaaatgtatgaaacaactattttcaagacactgaatattgggcaacccaaaacaaggatctctgagagacagaaaacaaatgaaatgagccctgctgggccctatcttaccaccttgacatagtttctagacagcaccatgaaaagtgagaatgtaggcaggacctgaaagactctctaagttgagaagttgttgctaggagttgggaaacaaaggcagcgagagttcacagaaagaagtaccggaaggcagcgagagttcacagaaggaagtaccagaaagcagagaactgcacagggctagaaccttgaagatctgtagagggtctccctcaagtattcagcaagtgctgatcagtgcatacatgtccggagaatacccaaggccagagaaagaaccatccaaaagaatttccagtaagactggaacacctcataattcacagagcagtgaggagaatactcagaaaagtctttcctcctgcaaacataaagaaaatttagcaaataaagtttaacaatgtataacaagggtaatacatcatgaccaagtagaatttatcctggactgcaaggttggcttagtatatgaaaatcaatcaatataattcaccatagtagcaaactaaaaaagaaaaaccatatgttcatatttatgaacatgggaaaagcatttcacaaagttcaacatccattacagataaaaactcagcaaactactaatagaaattatcttcctcaacctcataaaatacatctatgaaatgcttatagttaaaattatgcttaatgataaaagactgaatattttcctcccaagataatgaacgggacaagtatgtctgcacttgccacttgtattcattttactatccagtgcaataaaataaaaagaattaaaactgtcctaattatcagatgacatgatcacctataaagaaactcacaatggaatccattaaaagggactaataggtgaatgtagctaggttgcaaaaaatgagattgatataaaaactcaattgtatttctctcaatctgcaacaaacagtgagaaactgagattttaaaaaccaaatcacttataattagcccccaaatatgaaatattaaatacttaaggataaatcaaacaaaagatacttaagaattgtacactgaaaactacaaaacattgctgagataaatttaagaagacccaataaatggagacatatactatgtttatgagtcagaagactcaatattgttaagaggtcagtcttaacaaattgatctatagattcagcacaatccagtcaaattcccagaaggtgttttgtgtgtgtatatgtgaaaattgacaaatgaattcaaaaattcatagggaaatgaaaggacctagaatagccaaaacaactctgaaaaagaacaaaaagtcaagtctttgacttgagacaaagggtcgaagtcaattcagtgggtaaagaattgacttttcaacatatgatactgaattcaaacccatatgcaaaaaaatgaatttaggaaaactcgtatacaaaagttaactcaaatggattatagttcaaagtgtaaaatttaaaaccataaaaattctaggagaaaatagaaaatctttgttaccttgggttaaccaagggtttcttaaataaaagcataattcataaaagaagaaaaaaatggataacctagacttcaaaattaaaacttcccttttcaaatgatgttttcaagagaatgaaaagaagggtggggccaagatggctgactagaaacagaagtgatcagaggctcccatcaaaaagaaccatcattaatgtgtgaatccttcattggcaaccaaggtatcttctcatcagaactgactaggtggctagacttgatccacagagaggaaggaagagcagtgtggtgcggcagcccgtctgagagccacacggggcaggggagcccccactccccagccaagggaggcagtgagtgagtgtggtacccagcgtgggaaaccgtgcttttttccatgggactgtgcaacccacggattagaagatcccactcaggaacccacgccactgggacctagaatgccaaccccagagctgcacagattctcaacaacctctcagctggaatctgcctaaccctgcagagctcctgcggggaggggtgaccagtgccacagctgctgctgcctgctgcctaagccatttgagctccttgggggaggggcagcagccagcactgggactcataactgcctgataagctaagctctctgtgggggaaaggatggcatccatctctataactccaggccatgcttttcccctgctggagccagggaggctggatggcttggtccccaagagtggtcccccacagctcaacacactggctgtggcagactgcaacaagagcgcctcttcaggcactgacatatccttcctcacttcctatatggtggggcttccctacaggaactccaataactccagccagagactcagggacagaacctggatctccctgggccttatcccctagtgggaggagtggctgcagtctctgcagaccagcagacttagcccagaatgccacccagcaaggcacactccctccaccaagagacagtgaaaatgcttcattaaatgggtcccatttcccttgtcacccaaataggtaagaccttccaacaggggttgtcagataccctatacaggagtgatcctactggcatcaggttggagcccctccgggttagagatcccagaagaaggagcaggcacccatctttgccttctccagcctgcttgagtgacatctccaggtgcgggagcgaaccagataaatagggcctaaagtgaacccccagcaaaccacagcagccctacagaggagggacctgaccagtgaaagaaaaacaaacagaaagcaacaacaacagcatcaataacaaaagaagtcctcacaaaaaccccatccagtggtcagctgcctcaaagatcgaaactagacaaactcacaaagatgagaaagaatcaatgaaaaaatgctgaaaacccaaaaggacagagtttctcttcccctccaaatgattgcaatgactctctggcaagggcataattgggtgaaggatgagatggacaaattgacataagtaggcttcagaagatgggtaacaaaaaactccactgagctctaggagcatgttctaacccaatgcaaagaagctaagaaccttgaaaaaaggttacaggagctgataactagagagagtttagaggggaacataaatgacccgatggagctgaaaaacacagcacaagaactttgtgaagcatacacaagtatcagtagctgaattgaccaagaggaagaaaggatatcagagtttgaagaccacctcactgaaataaggcatgcagacaagattagagaaaaaagaataaaaaggaacaaacaaaacctccaagaaatatgggacttcataaaaagaccaaacctacaattgattggagtaccacctgaagcagacgtgaagaatggaaacaaactggaaaacaaacttcaggatattatccaggagaatttccctaacctaggaagacaggccaatatgcaaattcagaaaatacagagaacaccactaaagtactccacaagaagatcaaccccaagaaacataatcatcagattgtccaaggccaaaattaaggaaaaagtgttaagggcagccagagaggaaggtcaggtcacctgcaaagaaaagcccatcagactaacaatgcacctctcagcagaaactccacaagtcagaagagattgggggccagtattcaacattcttaaagaaaataattttcaacacagaattttatatccagccaaactaagcatcataagcgaaagagaaataaaatcctttccagacaagcaaatgctgagggattttgttacccccacgctggccttgcaagagctcctgaaagaagcactaaatatgcaaaggaaaaactggtactagccactgcaaaaatacaccaaaatataaagaccaatgacactatgaagaaactgcatcaactagtatgcaaaataaccagatagcatcatgatgacaggatcgaattcacacataacaatactaaccttacatgtaaatgggcaaaatgccccaattaaaagacagacaggaaattggataaagactaaagacccattggtgtgctgtattcaggagacccatctcatgtgcaaagacccccataggctcaaaataaaggatggaggaaaatttaccaagcaaatggaaagcaaaaaaaatgcaggggttgcaaacctcatctctgacaaaacagactttaaaccaatgaagatcaaaaaagacaaggtcattaaataatgataaagagaacaattcaacaagaagaactaactgttggctgggcatggtggctcaaacctataatcccagcactttgggaggatgaggtgggtggatcacgaggtcaggaaatcaagaccatcctggccaacatggtgaaaccccatctctactaaaaatacaaaaattagctgggtatggtggcatgtccctgtaatcccagctactcgggaggctgaggcaggagaattgcttgagcccgggagacagagattgcagtgagcctagatcacaccactgaactccaacctcgtgaaagagcaagtctccgtctaaaaaaaaaaaaaaagagctaactattctaaatttatatgcacccaatacagaagcacccagattcataaaacaagttcttagagacctacaaagagacttagactcccatacaataatagtgggagactttaacactccaccatcaatattagacagatcaacaaggcagaaaattaacaaggatattcaggacttgaactcagctctggatcaagtggacctaatagacatctacagaactctccaccccaaatcaatagaatatacattctcagtgctacatggcacttattctaaaattgaccacataattggaagtaaaacactcctcagcaaatgcaaaaaaactgaaatgataacaaacagtctctcagactacagtgcaatcaaattagaactcaggattaagaaacttattaaaaaccacacaattacatggaaattgaacaactcgctcctgaatgactcctggttaaataatgaaattaaggcagaaataaagaagttctttgaaaccaatgagaacaaagagacaacataccagaatctctgggatacagctaaagcagtgttaagagggaaatgtatagcactaaattgcccacatcagaaagctagaaagatctcaaattgatacactaacatcacaattaaaagagctagagaggcaagagcaaactaatccaaaagctagcaggagacaagcaataactaagatcagagcaaaattgaaggagatagagacacaaaaaccctccaaaaccaggaactgtttttttgaaaaaaataagaaataccactagctagactaataaagaagaaaagagagaagaatcccataaaaaatgataaaggggagatcaccactgacctcacagaaatacaaactactaacacctctatgcaaataaactagaaaatctagaagaaatggataaattcctggacgcagacactctcccaaggctcaaccaggaagaagttgaatccctgaatagaccagtaacaagttctgaaattgaggcagtaattagtagcctacccaccaaaaaaagcccaggaccagacaggttcacagccgaattctaccagaggtacaaagagaagctggtaccattccttctgaaactattccaaacaatagaaaaagagggactcctccctaactcattttatgaggccagatcatcctgataccaaaacctagcagagacacaacaaaaaatagagaatttcaggccaatattcctgatgaatatcgatgcgaaaatcctcaataaaatactggcaaaccgaatacagcagcacatcaaaaagcttagccaccacaatcaagtcagcttcacacctgggatgcaaggctggttcaacatacataaatcaataaatgtaatccctcacataaacggaaccaaagacaaaaagcacgtgattatctcaatagatgcagaaaaggccttcaataaaattcaacagcccttcatgctaaaaactctcaataaactaggtgtcgattgaacatatctcaaaataataaaaactatgacaaacccacagccaatattatattgaatgggcaaaagctggaaacattccctttgaaaaccagtacaagacaaggatgccctctctcaccactcttactcatcatagtattggaagttctggccaggacaatcaggcaagagaaagaaataaagtgtattcaaataggaagagtagaagtcaaactctctctgtttgcagatgacatgattgtatatatagaaaactccatgatctcagccaaaaatttccttaagctgacaagcaacttcagcaaagtctcaggatacaaaatgaatgtgaaaaaatcacaggcattcctttacatcaacagtagacaagcagagagccaaatcatgaattaattcccactcacaatcactacaaagagaataaaatgcctaggaatacagctaacaagggatgtgaaagacttcttcaaggataactacaaaccactgctcaaggaaatcagagaggacacaaacaaatggaaaaacattccatcctcatggacaggaaaaatcaatattgtaaaaatgttcatactgcccaaagtaatttatagattcaatgctattcccatcaaactaccattgacattcttcacagaattagaaaaagctactttaaatttcatatggaatcaaagaagaccgcatacagccaagacaatcgtaaccaaaaagaacaagctggaggcatcatgctacctgacttcaaactatactacaaggctgcagtaaccaaaacagcatgataatggtaccaaaacagacacatagaccaatggaacagaacagagacctcagaaataacaccacacatctacaaccatccgatcttcagcaaacctgacagaaacaagcaatggggaaaggatctcctattcaataaatggtgctgggaaaacgggctagccatatgcagaaaattgaaactggaccgcttgcttacgtcttatacaaaaattaactcaaagcaatggcaacaaaagccacaattaaaaaatgggatctaattaaactaaagagcttctgcacagcaaaagaaactaccatcagagtgaacaggcaacccacaaagtgggagaaaattttctcaacctactcatctgacagagggctaatatccagaatctacaatgaactcaaacaaatttacaaggaaaaaacaaacaaccccatcaaaaagtgggtgaaggacatgaacagacacttctcaaaagaagacatttatgcagccaaaaaacacatgaaaaaatgctcaccatcactggccatcagagaaatgcaaatcaaaaccacaatgagatatcatctcacaccagttagaatggcaatcattaaaaagtcaggaaacaacaggtgctggagaggatgtggagaaataggaacacttttacactgttggtgggactgtaaactagttcaacccttgtggaagtcagtgtggcgattcctcagggatctagaactagaaataccatttgacccagccatcccattactgggtatatacccaaaggactataaatcatgctgctataagacacatgcacacgtatgtttattgcggcactattcacaatagcaaagacttggaaccaacctaaatgtccaacagtggtagactgggttaagaaaatgtggcacatatacaccatggaatactatgcagccataaaaaatgatgagttcatgtcctttgtagggacatgaatgaaattggaaatcatcattctcagtaaactatcgcaagaacaaaaaaccaaacaccgcatattctcactcataggtgggaattgaacaatgagaacacatggactcaggaaggggaacatcacactctggggactgttgtggggtgggggaaggggggagggatagcattgggagatacacctaatgctagatgacgagctagtgggtgcagcacaccagcatgtcacatgtatatatatgtaactgacctgcacaatgtgcacatgtaccctaaaacttaaagtataataataataataataaaaattaactcaagatggattaaagacttaaatgtaaaaccccaaaccataaaaaccctagaagaaaacctaggcaataccattcaggacataggcatgggcaaagtcttcatgacaaaaacgccaaaagcaattgcaagaaaagccaaaactgacaaatgagttctaattaaactaaagagcttctgcacagcaaaagaaactatcatcagagtgaacagacaatctacagagcgggagaaattttttgcaatctagccatctgacagaaatcgaatatccagaatttacaagcaacttaaagaaatttacaagagaaaaaacaaccccatgaaaaagtgggcaaaggatataaacagagacttctcaaaagaagacatacatgcagccaacaaacatatgaagaaagctcaacatcactgattattagagaaatgcaaatcaaaaccgtaatgagataccatctaacaccagtcagaatggcgattatttaaaagtcaagaaacaatagatgctggtgaggctgtggagaaataggaacacttttacactgttcttgggagtgtaaattaccccagccattgtggaagacagtgtggggattcctcaagtatctagaaccagaaataccatttgacccagcaatcccattactgggtgtatacctaaaggaatataaagcattctactgtaaagacacatgcacacatatgtttactgcagcactgttcacaatagcaaagttgtggaacctactcaaatgcccatcaatgatagagtggataaagaaaatgtggtacatatccactatggaatattatacatccataaaaaggaatgagattatgtcctatgcagggacatgtatgaagctggataccatcatcctcagcaaactaagacaggaacagaaaaccaaacactgcatgccctcactcataagcaggaattgaacaatgagaacctatggacacagggatggaaacaacacacaataggcctgttggggagtaggagggtgaggggatggaagttagaggacaggtcaataggagcagcaaaccaccatggcacacgtatacctatgtaacaaacctgcacatctgcacatgtatcccaaaacttaaatacataaatagaatgataagagaagccacacattaggagaaaaaagttttcaaaaaatatggctagtaaaggacatctatatcttgcctctagaatacataaagaacactcaaaactcagtgaatccaaaaatcttattgagcataagatatgaacagacatttcacaagagaagatatacagatggcaaacagcacacaagatgattttaaatattattcattaaaaaatgagaattaaacacgatgagatatcacaacacacccatgagagtggctaaaatttaaaagactgaccataccatgtggaggaccttgaactctcatatgctgctgatggaaatgtaaaattgtacaaccacttaagaaaacagtgtggcagtttttcaaaaagttaaatgttcatctactatatgatctagtggaatcacttctaggtatttgctaagaaagttaaagcatatattgatgcaaagttttgtatatggatgttcataacagcttaatttgtaatagcccccaaactataaaggacccaaatgtctatcatcaggagaatagataaacaaattattacatgtgatggaatactactcagcaataaaaagaaatgagctactgatatttgcaacaacatgaatgaatctcaaattatgttgagtgatgaaaaagagtaaatgttatatgattccatttatataaaactctggaaatttcaaactaattgatagtgacagaaagcagatcagtgtttgccctggagatagcacggggaagggtggcagattagaatgtggcatgataaaactttggaggcaatggatatgtttagattcttagtcgtactgatggtcttatgagtatatacttatgtcgaaacatctaattaaacaacttatgctgtctattgtatgattgttatacctcagtaaagctgtttttaaaaagatctgcgcatcccttcccattttatggatgaggaaattgagtcctgaggacaagagaacttttccaaagtcataccactagtccaatgcagaggcattaggtttgtccataatgaagcttctgaatgaaaatagaagagctcctggtgtaattccagggagctgaaggccattatcctaggtgaattaatgcagtaatagaaaaaccaaacaccacatgttctcacttataagtgggagttaaacattgagtacacatggacaaagaagggaacaggagacactggggcctacttgagggtggagggtgagaggaggatgaggattggaaaactacctgtcagtactatgctcattacctgggtgacataataattacaccaaatcccccaacacacaatttacccatgtcacaaacctgcacgtgtactccctgaacctaaaataaaagttagaaggaaaaaaatgttaaaagttaaaatgggcagagaaactgaatagacatttttccatataaaacacacaaatggccaacaggtatatgaaaaggtgctcaatatcactaatcatcagagatatgcaaatcaaaaccacggtgaagtatcatctcacacccgttagaatggctcttatcaaaaagtggtaagtgttggcaagtgtgtggagaaaaggaaacacttgtgcgctgttagtaggaatgtaaattggttcagctgtgatgaaaaacaatatagaggttctttaaaaaataaaaaatgaactaccgtatgatacagcaatcctacttttgggtacatatcccaaggaattgaaatcagtatcttgaagagatatctgcacgtccatgttcattgcagcattatttacaatagccaagatatgaaaacaacccaagtgtcccctgatggaagaatggataaaggaattgtggtacatatatacaatggaatattgttcaaccataaaaaagaagaaaatcctgccatttgcaacatggatgaacttggaaggcatcatgctaggtgaaataaaccagacacagaaagacaaatactgcatgatctcacttatgtgtagaatcttaaaaagccaaactcttagaaacagagagtagaatagtggttgccaggccctggggatggggaacatggggaggtgttgatcaaagagtataaagtttcatttataaaatgaatgagttctggggatctaatgtacagcatgggtggagatagatgtgttaattaatgtgattgtggtaatcattacataatgtatatgcatatcaagtcatcacattataaactttgaatagattcgatctttatttgacggtcaaatattttaatttttttagtgaatttcccagcccttgatcccaatttcacggcagcagagctttttttctaactcttggtgcccctaagagggttgatagcctagattgtttcctccaaaaagcaccacacttatatttgttttgaacattgtgagtattcaaactctgtattaattcaaatggacttatttgctgttttaggtctgaatcgtttgcttaccaatggctcctatgaagctgcgtttcccctgcatgaggtattgtgctgtctttaatctttatctttctttcaatcgtttgttactaaagtcagcttctagagatagtcaataattgaatttgttgacatttgctcagaatgaatttaatttgttcaatgggtaattagggagggtctacttcaattgttatatctcttcctcagcatagacttatttctatatatcttttcatgtaattgcgagaatacttaaatcaatagtcatgcagcatgaattcataggaatggcttagagactttaagtcttaaaattaaaaaggcattgacaatttgcatgaggcaccaaatccacaagaagaatgttcttgaaatatatagtctttgcaacaaataaatgtatagctattgcttaaaagagtgggaggaagccatcttgaaaagtctctggtaaccaacgggtgacaaataaaaattaataatgttgtactcatcattgttcacctaagatgtataaatactgtgactctatttcctacatagtctccatcatataaattactttcgcaagtgtaactgattaccccagctctactttccacagaattatttaatccagaattcccctacacctgggtttttaggaacataatccctcatgattattgagaaattattgtcattttcatggtgtggcacccctactgtggtcactatatggcacagagaatacaaagataaatgtcatagcctctgtcctctgggacctcacaaagtagccaatgtgcagcaactgttagctgatgttcagtacagcctgttggaaacaatggtaataatttgtcaatagactttggaagacggttccaactctccgtaaatggcaagtctttccaaaacatacttttttttggcttacagtggtacttctcttaattttaaacactaagagggtgcaaaagatgaggtagatttttcagaactttatttattaagaaaaccagaagctgccatctgaaactctgtttagactgccaggaaatgtgtttggaatgctccatttactatgacagaagcaaacattttgacacaaaggtttgctagagccatacgcaggtgtttctgaactctaaagacatactgttccccaaaacatcatgtggcttcatcatgtcattgttagttggcattgcccagaaaagggttttgtgagaactgcatcctccctgctctcagccccagctcatggtatgggctgtgtctgatatggtaagtggcagaagcgtctgtgcaggggagtgggtgggtgggcatgggagtgtctgaggagatgcagctacaaagccccacagagtgactcatgcctttcacaatgactttcctatctcagtaaagccctgtattctatgagaagttccaaattggtaatagcagcagcaatcattgcatcattgcttttctgactttttactctcagtttaacttgattatattatttaacctcagaggcaaaaaggcagaaggtcagatattgctgctcttgtttcacgttaaagatttagatagaggtttagagaaaggtgaaacctccttaagtcacacaatgagttggtggttgatctgagactcacctgagtttctttctcctagccctgtgttctttccattaagaaaggacttcttatcaggtgtggtggctcaggcctgtaaccccagcactttgggaggccaaggtggaagtattgcttgagttcaggagttcgagaccagcctgggcaacatattgagacattgtctctagcaaaaataaataaataaataaataagaaagggcttctccacttaatatgaataattagcttgcctccagaaagtaccgtttctctttgtgaaactatcattgccacaaactaacctcagaaaaacatgcacttctctggccctttgtctcctcacttcttcaatgaggaggttgaattaaatttgaattacaagaattctgaagtgacttccagcttttacattctagaattttcttgtcgataacattgtgacaaggttacaactatggctgtttaccaactatcctatcttgaaagaagtgggaagagaggccaggcacagtggctcacacctgtaatcccagcacattgggaggccgagggggacagatcgcttgagtctaggaattcgagactagcctgggcaatatggcaaaaccccatctctacaaaaaatacaaaagttagccgtgcatggtggcacatgcctatggtcccagctacttgggaggctgaggtgggaggattgcttgagcctgggagtcggaggttgcagtgagctgagattgcgccactgcactccagcctgggcaacagagtgaaacccagtctcaaaaaataaacaaataaataaataaaaagaagtagggaagagaactaataagccttgggcatggcccctgggccagacactttattcattcaaaccacataagaaaccaaatgggacaaatattagttccactatggattaggaaaccaaagctcagagcatttagggaacttgcccaggatcttctagctgaaaagtagcagaattgaatttgaactcagttcaaaccttcctgattatagcaagcacgtgcattttactagatatcagcagtagcaagacaatgtccagaataactcatcaaactgcctgccctttaatagagaggattcatttctttctcataccactcctatcacaacacctgctgtaagacacttacattaccatcagcatttccttgtgacttttgtgagtactacctcactggcagtggtgtttttatcccagggaagttatagaagtaaaaactccattcgaacccatggagcagaaaaccaccgacatctactctatgagtgctgggcctcctggggcgtgtggtataaataccaacctttggatcttgtaaggtgagtttttaatcagctgcaaatataaagcttgcacagaatgattagggcagactgtcagctgggacaagctcccaatgaagcaaaaagagcctgaagtgtacagctctcactcatatctggcttcttcacaagaggaaactcatctgaggacatcagctgttcttggtaaacctaccatcgctctgatgaggatggaatttcccccaaaaagagtcttagagaggggcccaggaatgggcatgtgagatcagccaggcctgtcacaagacttcgtaagaagcgagtcacccatgtgagtcttattgacaaaccatcttgtacaaaggtaacactgcttacatatattactgacaaagtaaaatatttactactgttagcaaataggacaaatggagtactgtcattccaatacatttcaggcttagttttcattcagaactaataacctttaaagattgttttaatctgcagatcaaaaagtatatcagcttttaacctatgataattgtgaagtggaaatgtatgtttttttattattattatactttaagttctgggttacatgtgcagaacatgcagttttgttacataggtatacatgtgccatggtggtttgctgcacccatcaacccgtcacctactttaggtatttctcctaatgttatccctcccctagccccccaccccccataggccctggtgtgtgatgttcccctccctgtgtccatgtgttctcattgttcaactcccacttatgagtgagaacatgtggtgtttggttttctgatcttatgatagtttgccgagaatgatggtttccagcttcatccatgtccctgcaaaggacatgaactcatcctttttttggctgcatagtatcccatggtgtatgtgtgtgtaaatatatgtgtgtgtttttttttaactatctatatcttcccaaccttctgccttggcagcattattctctgacatctctatttatttagaggctggttattaagattgggtaataacaacccacatttcctggattccttattaaagagaaagtcatgtctcatttcctagactagctagatgtgttgtttcacttaaataccagggccataaaataaaatgagcccagaggggaggacaaacaaaagacaatgcactttatatttgagcccttatcaccaagtgttccaagggcattgatgaattgtgatccattccttgtgttggtaacagataatccagataatcttagtgaatggaaaatattttctgagataagatcattttcctttggtcagactcagtgtatgataaacagtggggggaaaaacaaaagtaaattctcttcccagcctcggtgccatgttacaggattacattgattagaaatcacagataattgctgtaggcagcacatttcccattcatgacagtattttgattaagattttgcggttttggttagtcaatgcatattaattaactgtctattgtgtatctagtactgtgctaagtactattggcaaagccaaacagacgccaaatggtctctggctctgaaaaactcagttttcctcagcaacacaggccctgcatacttgaaacatcgagaaaagaaaatacaaggccatgcataattaggtaaaatgtgtgacagaggccataagttttacagtaattcagaaaaatggaaagaacggatgtggcagcacccctgtggaagtctctggagagctgagccctgaagaacagtggcatttatgttgggcaaataaagggggatgaaaagcacaaccaagccttgagtagaatgaaagttgtggagcatctagggaatgtcatctcttagacagttcctatcctataggttttacttccaccatatctctcgaatcgggccccacctcagcatctccactgccttcacttgttacctggactatgacagctgtgtgcctggttggtctccctttgcccactccggccccttccagtccattctgtcttctcagaataagcttgtatacaaccatgttattttatggaagggctaattctagttctgctatagagtagtagtagaagaaatgtaagcccagatcctagatttgatgggatgttcttttatcttggcttaccttgcttgcagtttacctcgtaaggccgctacaaagtaaaatgactatacgaagtttcataatgcttaactttacacactgcactgtaatttgcaaggccgttgtgtctttaacaggcggtactttggagagaagattgggttatattttgcctggttgggctggtacaccggcatgctcttcccagctgccttcattggattgtttgtctttttgtatggcgtcaccactctggatcacagccaagtcaggtacggggagctcttggatgagtttgcctttgtttagtacttagaggtggctgtttgcactttgggggtattcacagattgtggagacatttagcttttcactcaaacttcctaccctctcatggaaaaactcaaagtttcagttcactaggacctctccatccattgtccttgctgccatggtcttcagataccatgcaagtaaaagttaccttttcagacatacaagccactatatatccacagaacaagccgccttcattcactggctataagtgctctctttttttactttttcactttttttcttagctgatactgcaaaatagtgaactaacaattctctcttatgaattctgtgtttttacaacttgagccagaaagacatctcaccagcttgctagtatcttgggagcggttcagtgtcgatgaccattatcttggttgtctcaccagaatataggtcaaggtactcacagagatcttgttgcaaggctggacaatgatcttaaattgtaaatatgccttttaaatgtgattgcaaaaataaaagtgagtgattaagccttccacctacgaaaacattttactttctggtgaaattgttaatgtgttagttaaatatagttttcccccaggatagggctagaatctctagtcatttatgttttgttttccatattagttttaacttatcatacacatagagatcaagataagtatctttatatatcttcttactcccttaattcagtatgaaattgcttcagacctttgaaaagtgaaggacatttctataatttgggatataacaatcaatgtttggcttcatgtattttcctgagtttaacttattaatacataaagataaggaacagcctcataagtaggtttaccaaattatttaaatgggcaagaacttgtttacattaataacagataaagctaagatgcttctaagggcaaacatttaacctactggatcttatttactagttgaacattctggtgaagttagaaaaaaatgttccatgtcatcaaaaagcagtcctttctgttctcttttccagtaaagaagtctgccaagctacagatatcatcatgtgtcctgtgtgtgataaatactgtccattcatgaggctgtcagacagctgtgtatatgccaaggtaatttcaaactgtagcattttagatgaattgaatttaacatacaccttcctgagggatggtgggtaactctattctgtcatttccagtctttgattttcaagtgaatgttgtaggatagacttatctccatcattcagtattctaattcccatatctttgttaattgtccatgtatttggaaggcatggctctagacatcatccatggagctgcagcatggcacagtgtgaggagcacggtgctggagtcagagaaagttaggtccaaattttgactctgctgtttaccatttctctatctgggaataagatatttaacttctttgagtctcagttttctcatctgcaaaatggagaccatgatgcttgtttcacacggagttaaggtgtatactgagcatagtgcttggtaaatagacctcagtaaatgacagctatcatcatttgcctcctcttcatcatcattattgtcaaaatgacctccaattaaggctagctcagccacttacctctttagccctgaaatgtgccccctttctaagaaactcttttttcatagaaagaagctcagtcttctgagctttcttgtctctaaaatacaggaaatatgtgtcctctctgtcctaccctattggcatgacgtgaggactaaagaagagaatatatgtgaaagtgctatgagaaaaaaaatacatgacaccactatttctattatgtgttattgcatacctctttctcgtgatatgccttactttatttcttagacatattcctcacattcctagagttttttgatacttaggtggtggtgtccataacacaaaacaatagctgaagtttgagtttgcgaagacttttccaagagctactgccttttggcttgcccagattcagatataaatggcattggcagattttatccagcttttgtaatcactgaagcctggatctatctaattactctcttggcattgcagagttttgttcattttaaacaagggaacatttgataggcaacccaggatcccgcctatctataatgtctttagtactgcaggtggccggtctgtgtaggaggagcccagactgcagcagtgagcagtggttttagaaagatttgagctcttatgttgcaagggacaaaaaaagcacaaaatgctctgagccctatctttaggaaacactcagatagacctgagtggataaggataaatttaacagagtgactttaggacatagagatttggtgagcatcaagagctttgtcagtaatataattttgtttaaaggtcagatataagcctgaatgactcaggttttaaaattctgcttctggggaaaccccaaaatcagaagccaatttttttttttaatgtggaaagatatgcttgagtaaaattctctttttaggagatccttaataattcttttaaagaatcgtcatgaatagtttatgagtgctcagattttataggggcttattttgggagttattctccctaacttaagacctagaacaataataattataatagttacagctataataatagctagacaatctacattgattatttctaattctcacagcaacttcaagataggtgttattatttccattttattcagagactcaaagaggtaaaaattactcatgcatggtcatgcagcaataagtagctgggccttggtttattgcactgcaaaacatgccttctttaccactgtgccctgctgagccacaagatgtttagattctgaatttaacatttggccttgcctagaaacttagtaaaatgaaagataaaaagccttagaatgacagaattggagttatacagggtttcctttagaaatatttattagagatgtcagagtgatttcatgggactgtggatacacagaaatattaaatcagattggcgctgggatctagtccaatcagtggctgttctgctgatagggatgctgtatccttgactcttgtgtttgcaagaatcagaaacccaactcctactggcttagtcagaaagtgatgtaatggtacattttgccagaacagatactggggtggctcacgctgtgggatcatgagggcctcacagcctggaactgttcctccagggaccccggtggccctgcccacatgatcattctgtagactagttctctgtacaatagaaaagatggctaccagctgccttggctccaggcttacgttttccttcccttgtctccttaagtggatttttgtgcttattttaaactcctggtctgctgccacactgtgtctatgggaatcttctttggaggggaggggttgttgtcttccccatatatttcattattttggcctgttgggtacttgtcctctggaggcgtcagccactttgagtaagggtcagaggccaaggccaagtttgtcagtcctagtgagttacagagaggacagcgtgccccaggcacgactgagtgctactgctctatcagaggacttttctggtcagtttcatttttaaacctgcttagaacaaagcagaattgggcactttcccttgattgtaatctgccaatgctggggtttaagaggaggtggactatggagtgaatgccccagggcagctatccaggtagcacctgcttttcacccatgtctaacagagcaggactttgagcattccctgatattgctccaggaataccagcacctgtggtgtggcctgcttagctgatttctgagggaggggaaactaattgtccaatggccatttgagggagagaggctagagtagagcttatgtatttctctaacctgtgctctcactctacctggtatctacaacctacctctccccacacaccaccaccatcacacacataccagttcaagataacctcccatctcccctgaggtttctcagggtctttgttttttgtttttgtgttttgttagttcctggaatctactaccttgcttctccaggactgattttggcagaaggtgtcatcagcttaagctaactgactatctcattgggaaccggagcccctataaccttacccctcctcattcatatattgtcaaattgataactgcagcagaaagctgtctgtctccaaatgtttgtgtatcagccccagggcagtattctgattggttctattttgagccatgtgtcccttgggaccagcaggagttacctggagaaaggagaatggaagacagatgatctgggtagccaaaacaatgataactgcagtccattccagaatggacactgatggtgcaagctacactttctagcaactctcagtaaatactctgatagaggctgggcgcggtggctcacgcctgtaatcccagcactttaggaggccgaggcaggcggatcacctgaggtcaggagtttgagaccagcctggccaacatggtgaaaccccatctctacaaaaatacaaaaattagctgggcatgatggcgggtgcctgtaatcgcagctacttgggaggctgagacaggaaaatcacttgaacccaggaggtggaggttgcagtgagccgagattgcgccattgcactccagcctgggtgacagagtcagaatccatctcaaaaacaaacaaacaaacaaacaacaacaaactctgatagatagcacagtccagtcaaataccgctagaaccttcaaggttggtttgatactgagtgcccaatatacagcttaacattccctctggcatatgaaatagattagcttcagacatttgtctcacagtaggtatttgagtgctgcccatctctcctctattcaaagaaagagaaacttctggaataatctgaaatacttcacgttctgatataacatgaaaaacctctttatatttggtgcattctcgaaggaacaataaagtatactttataggtagctataaagtacccccaaaaaaggttattctttatgaacctatcagtcatcatttcaatttgtcatggacattggtattatttatactagaggcaggaatgagcttggcagttttgcagtaaaaatggatatttttgctttcttctgtggtgtttgcaatagaatatattattctagcaataaagtattgctagttgtctttgtgttatgtgcagtaggtaaatatagtgattacccaaggctttaataagggtagagttggatttagttaatggttctgctcttttttataaggctgaaatccagagggcagcccagaaaatgtttgctcaaaactgcataaacaaaatagccatgttttcaaagtgaataaatgaggcattaaaaacagtgcttgggaagttgaaaacctttaaagcagcactaacaataccttcctggtcctaaatataactatatccatacacatatgtacgtgtataagagttttgttgtgcacaaaaggggattcttagtagcactattggggatgctgataaatgttcaactagatgataaccacataaagagaacaaattgtatcctctatatatgaactaccttgcaattagaggaagccttttcttatttatggttcaaaaggaatattccccctacccaaaacaaagcctgtaaaactcattatataatcacagctatttttacagaacttgaaaaaatttgaattggaatatcatatatgagaaattaactcagcaccgattcttattattcacaggtaacccacctttttgacaatggagccactgtcttctttgctgttttcatggcagtctggggtaagtgttctataaccataaaacttgagttttcctcatatgccctatgatatattcctttagaagtttcactttggatgtgaaagaaagaagcttgagtaaatggaattagctttcctattagtagaaagttggtaaataatttattgggtttattttaaacgatattgtagaagagagacatgtctgatttctcttaaaccttcaacaatgtcattagcactctgttattagagtagaatttactttctgttggacacagaaataaagcttatggtacaactttagtttaggtcaggggagaactgaaacaccatctcagtatatataggactttctattgtaagtggctaatgtgtgagtacccacctttagctttcttctagctctgtacaaaattacccctaaaaacaaggtctattcacaggactgatttgagctttttgatataatttcaagctaacagccccatcacacaaggtgtgatggaaacagtcaaatatttggaagtaacaggacttgattgaaatctcaactccctttacacactaggctgtgtgatttttggcaagttatttaacctacctctttgtaaaatgggttaatatataatagtcaaataattataaagcttcaatttaatgatatagaaaaacatctcacaaattcatggaaagcagttaatggcagttacctttggaaaggaagattcatggaagagtaagtgaacaacgaggagagacaaactttatgctatatatttttagtctggtttgaattttttacaattatacttttctcctataactttaattgccaaaatctgaattttgatgtaacaaaattctactacctttagacttaggctcatcttgttcattatgtctgctatgaatattggaatcttccccatctttcaggccccagctgaaatgtcatctgctccagccaaaagatgtctttctcctttgaatttccatggcattttgttcttagggcacttaaaattattttcacagataacttgtcttgcctagtagatttatggtccttgaggaccattatgattatcagagatctcatattttttttttttttgagatagatggaatcagtaagtttctgttggatggatgggtgggtcaatggatagataggtggatggatggatggatggatggatggaaggaaagaaggaaaaagagaagaagaaagaaaaagaaattaccaaaagtatttatttatgatacagtgaatgtatttaagaggtcttttttgataagtggaaacataaaaccttgttcacttgagggagcttgttcttgatatattgtgtcttttgtacctagagactgtcaaaggaaaattgtcccacccatcacagctctgttgaagggacatgttttgaaccccatgactccagtccctctcagccagtaagcatttgaaccaagatcagtcaaaccacaggttggtgagtggcctgggaaaaggcctgaggttctgcccagacaaggactggtagggccacccagattcttattctccagaatgtggactagaaaatgtaaagggaaatagggagttagcagcaggaatggacactgaaaaatacagagggcaggagggagggagaaaaagaaagattaaaattgaccattgggtagaagtagggaccaggaggaattaggaggctgaagttatgagaatcagaacctagaaatagatagaagcaaagaactagtggaaaaattagagggcgaaaaagccaactgggagaaaatgtaagacaaccagagggaagcaaagagagaatatagccaagtcatgttactagtggagtgtcaggatgaagacccagactctcttgtggctgaggcctctctcaagcttcgggcttccatatcctgtctctgaacaggccatgtattttttcctgtaggattcctgcctcccttggtggaccttgtgaaaagctttcactgttcatgctacccttaatgcttctctgtcccttgcaaacaaactaaccctaacagaattttgattacaggcctgagctctcagataaagaatgcgtatatagttttactagaatctattagtatcatacaccgtgattcggataagccatataatgcttaagctttgccatggtcacaaatgaggggactctggaaatatattcatttcctaaaccagtattataaatactaaatgtattctgtaaaccttaatgtatatagtattctgtaaacgtaaatactaaatgtatattgtaaacctaaatgtattcatttcctaaacttttcaggtcatagcacacataaaaatgaaaatatttacacagcagctgctgtacatggaggagcctcctcatggccatggatagggctgtcccaaacaccccagcctcagaagccacaagggttgaaaggggcattattgttattcctggcataggcatttggaagttctgccttgggctgctaatttactgtgcaatgagttaatgcttctatataagagtggtatcctggtggtatcctggaagaattaaaacacaaaacttccttacccacttcaatatttcaccaatttcaaatatactttgaattaaataatggtttcttctcacagtttacctcctgagactacatagaagtaaatttttgtatgatgacatttgttcataaggcagaggttattactctcccccactacctccattataaaatggattgcataccctctttgcaagttgtgttttatgttatagatgacaaataggttttgttttatccccttgccaacctcagctgattggtgctggctgcctggagcatggagttgagaagtttctgaggttgaaagtgggtggattggagatttaacagcccttgtggtttggagtatactttgtaagactctgatggatgttttataataaactttgggcacagaggaacattttagggccattccaggcaagacatgcctggaataattcaccctctgaattgctttgtcttagatgacaacttattgcttaaatcccacattattcccagaaatgtgctagtttgagaaaaagaatgagttgccccaagtgtttctttgtagatagagataatgccttttgcagaaatctgaaagagtcaacaatattaacagttatattaatagcattcatttccgagggattactatgtactaaatgcagtcctaagcattgcccatgtatcatctcatttaatctctccagcaagcttttaaaaaggtactgttcttatcctcatatgacagataaggaaactgcagcagtagctagaaagtggcaaagccaagagttaaactgggcagtgtgagctcctctgctctactgctagaatcaggtattgtttgttaccatttccttctgttttagagacctgaaccttaaaataaaggactgctatgcctgtcctgagcctcatttatcctgctttgagacagtaatgttctataaaaatgtgtcagttctaatggagctcagtttaatggtctcaggatcatctcttatgatcgacaagttacagcattaaagaaaacaaatgcactctattttcaggaaattgctagatatggagctgatgagaacagatgtaagtggtttacaagacttctgaagggctgggcttgacgtgttcattttgttacctttgctttgtgtgttcaccggaaaaaaataataaggctccatctgtaaccagtttgtagcaactgggagggccttggcattgggttaggaatcctgacagaactctactacctttgttcaggtcacgtctgtgtgagtgcagggctccctcgggatccctgaggtatgctgtgagcctgggtctcggctggaattacagtgtggctcattcctcaatgctcatttttgttcagaaaggtccaagggtcagaatgattatggactaaataactcctctcccgagggaaaaaatgagtcatcagggaactagatgttggcagagacctgtcggggaaacagattatttccctctgttctgtttctggtttggtttgttttttttctctctctcccccttgtttttcattttttacttctaggattgccaaaagttaagttatccccagtaaacacaccaagcaagatccacaaagctctttaatcaaaatgacaagatggtaattatttagtgtgatcctgttagtaattggtgaatgaagtatgtctcatttaaaaaaataaattttgcaagaatcagccttttgtttctagatatttatgctaactttatattttatagtcttatctacatgttccacaaaaaaatggtaattgtatgttgaaaaaggtacacatttactaaaggcctaccatgtttgtatgcacattcacataggatacctcatcaatttctcatcacccattagaaagaaattactaacctcattttatagatgaggatactgaggctcagagaggttatgcaacttgcccaggattccagtagctgataaggtgtggagcctaaactttaaaccagatctggtctgtttcactccagagtcattccaaagtgtgtccaccatgttgtgcatcttctgtgaagtgtgtcaattaagatctcattaactcatacacaaaaatgagttagatgtgatctctgctttcaaaaatctcagtatattaaagaagcgttgataattataatacagggcaagtccaatttacaataggccaatgagggtttatgtagtcaacttcctgaggcaaaaggaaaagcagaaaaggttcacccaagaagagatattggaaagaagtcttagctttgccaggcagagtagtggggttggaaggagacatagataacattcttaggtgacaagagtatttgtaaagctctgaaaaggaagaattggctgttcagagtgatagggaggttgagtgtgtattagtttcctaggactgctgtaacatagtactacaaactgggtagcttaaaacaatagtttattgcataacagttctggaggctcaaagtccaaaatcaaggtgtcagtgggattctgagggctgtgagggaaggatctgttccatgccagtctcctggattctggtgatggctgatggtccttggccttccttggtttgtagatgcatcactcctatctctgcctctgtcttcacctggcatttgccccgtgtctctgtgtcttcacatggctatcttcttctcaagacggtggtcatattggattaagggcccagcctactccagttatgaccccatcttaactaattacatgtgcactgaccctacttccaaataaggtcacattgtgaggtactgggaccttttttgaggggacacagttcaacccatagcagagtacctgttgaaggctgagagctacttatcacagaccacttgagctacaacagaacatggcttcacgctgtaagcaacagaaagccaactggagttataatccgggaagggacatcatcaattgtatttgggaaataactctggcaacagtgcagggagaggtgaaagtggaggccaactggtggcaggcaggccccttagaaggcattctagtactcagtcaaaatattacgcagaacttggcttcagaaaagatccaatttccagaataaaaaccacacgtgtaaaatgttttcctagctttagttatttataatatgcaaaatttgtgaacaacgtaaatgtccaacaatagaagaacggtttggtaaattataagcagctattataaattgctctttcaaagcatgttgataatacaaagcttgtatttaaatttttttaaagtagggtataaagtatacaagtaaaacacgattttgagtatattaaatgtaaatgaaaacagaaagaaatgatgccataatattaatggtggtttgctttatgtggtgggattgtgggaagatttttttcaactttaagtataatttatgtgcaataaaatccagcaactttaagtgaacaattcaacaaattaggtcaaatatatatagtcatggaagcatcaccataatgatgatatataagagaactttttttcttttttttgagacggagtctcgctctgtcccccaggctggagtgcagtggcacaatctcggctcattgcaagctccgcctcccggcttcacgccattctcctgcgtcagcctctcgagtagctgggattacaggcgcccgccaccacgcccagctaatttttttgtatttttagtagagacggggtttcactgtgttagccagaatggtctggatcttctgaccttgtgatccgcccgccttggcctcccaaagtgtgggagccaccgtgcccggcctaagagaacatttttatcctctcaaaagtttcctcatgcctctgcagtcagtcccttggcaacctgaaacctgctttttaccactgtagtttcagctgttctagaatttcatgcagattaaattattcaatatatagcattttgtgtctggctactttcacttcagttaatgctgttgagattcatttatgctgttgcctgtgtcagtagctggtttctttttagtacagagtagtattccagagcctggctatgtcataatttgttcgtctacttaccagttaatgaatatttgggttcagtatggtttttaactactataaataaacctagaaactattggctcttctagttttttgtttttgtaaattttcataaaagcctttgtagccattcatcttggatgaataattaaaagtggcattgctggatcatgtgataagtgaatgcctaacttagtaagaaattgtttcccaaagtggccatatcgttttgtagtcaatatcagcatgatatgagaattccaggtgttccacattctcacaagcacttggaattgtcagtctttataattttagtcattttagtgggtatatggtattatcccattgcagttttaatttgcatttccctaatgagtagcgatgttgaacatcttttcatgagcttatttgcaatctgcacatcttacttggtgaagtgtttgctcagatcatttgtccatttgttattgggttgtctgtcttatttttaagttaaaagagtacttttatatattctaggtagaaatgcttcatcttacaggtgtttgcaaatttttttccctgtctgagtcttgcatttttattttttaatggtgccttttgaaaaccaagagttttttctttttatatagtctaatttaaattttcttctgcactcattttttgttttatttatgaaatctttgccaaactcaaagtttctaagattttcgtctatattgtcttctaaaaagcttatcgttttagctcatatgtttaggtttatgacttatttcaagttggtttttgtatatggcataacgtaaggggcagatttatttctttccatgtagatatccagttttcctagtaccatttgtcaaaaacgccgttcttttcctttttgaattttcttggtacattttggttgaaatcaatgggccatatatgtatgggtctgttttcagaatttttattatgtttgatgtgtatgtgtacacatggcaataatccactgtcttgattattatggcataataactgttaaaatcatatttttcttttcaaaaattgttttgctgttttaggttctttgcatttccaaaaaaattgtagaatcagcacttaaatttcttcaaaaaaagtgttgatattttgattgggattaagttgaatcaatgtcagtttggaaagattgagtgtcatttagctttttgtttatttacatattctgtaatttctctaagcaatgtcttattattttcaatgtacaaggcttccagatattttgttaaatttatgcctatatattggattttttgagttttttacaaatagtatttttctgtaatttcaattgccagttattcattgctactacatagaaatacaattaacttttgtatattgaccatatatcttgtgacttactaaactcagttattagtgcttctagcttttttatagattccttaatattttcaacatagatgattaagaaatttataaaataaataagttttctttctttctaatctatatgagttttatttctttttcttgccttatactggttaggacctccagaataatgctggatacaagttatgtactagacatccttgccttatgcccagtcttaggggaatgtgtttagtctttcaacattaagtatgatagaaaccacaggttttcatatatgtctgttatcaagttgaaggacattccttctattattaggaactgagggttttaaaaatcatgaatgggtatagaattttgccaaaagcttttcctgtattaactaagacaatcctgtttctttctttcttttatttttttatacttcaagttctgggatacatgtgtggaacgtgcaggtttcttacataggtatacatgtgccatcgtggtttgctgcacccttcaaatcgtcatctacattaggtatttctcctaatgctttccctccccgatccccctatcccccaacaggccccagtgtgtgatggtccctgccctgtgtccatgtgttctcattgttcaactcccacttaggagtgagaacatgcagtgtttggttttctcttcctatgttagtttgctgagaatgatggtttccagcttcatccatgtccctgaaaaggacatgaactcattcttttttatggctgcatagtattccatgttgtgtatgtgccacattttctttattcagtctatcattgatgggcatttgggttggttcgaagtctttgctattgtgaatagtgccacaataaatatacgtgtgcatgtgtctttatagtagaatgatttataatcctttgggtgtatactcagtaatgggattgctgggtcaaatggtatttctggttctagatccttgaggagtcaccacattggtttccacaatgattgaactaatttacactcccaccaaaagtgtaattagtgtaaaagcgttcctatttctccacatcctctccagcatctgttgtttcctgactttttagtgattgccattctaactggcatgagatggtatctcattgtggttttgatttgcatttctctaatgaccagtgatgatgagctttttttcatatgtttgttgcctgtgtaaatgtcttcttttgagaagtttctgttcatatcctttgcccactttttatggggttgtttgtattttcctgtaaagttgtttaagttgcttgtagattctggatattagctctttgtcagatggatagattgcaaaaattttctcccattctataggttgcctgttcactctgatgatagtttccattgctgtgcagaagctctttagtttaattagatcccatttgtctattttggcttttgttgtaattggttttggtgttgtagtcatgaagtctttgcccatgcctatgtcctgaatggtattgcctaggttttcctctaggatttttatggttttaggttttacatttaattttttaaccgatcttgaattaatttttgaataaagtgtaaggaaggggtccaatttcaattttctgcatatggctagccagttttcccaacaccatttattaaatagggaatcctttccccattgctgtttttgtcaggtttatcaaagattagatggttgtagaaatgtggcgttatttctgaggcctctgttctgttccattggtctatatgtctgttttggtaccagtaccatgctgttttggttactgtagccttgtagtatagtttgaagtcaggtagcgtgatgcctccagctttgttctttttgcttaggattgtcttggctatatgggctcttttttggttccatatgaaatttaaagtagtgttttctaattctgtgaagaaagtcagtggtagcttgatgtggatagcattgaatctataaattacttggggaagtatggccattttcacaatattgattcttcctatccataagcatggaatatttttccatttgtttgtgtcctctctcatttccttgagcagtggtttgtaattctccttgaagaggcccttcacatcccttgtaagttgtattcctaggtattttattctctttgtagcaattgtgaatgggagttcattcatgatttggctctctgtttatctgttcttggtgtataagaatgcttgtgatttttgcacattgattttgtatcctgagattttgctaaagttgcttaccagcttaaggagatttggggctgagacgatggggttttataaatatacagtcatgtcatctgcaaatagagacaattcgacttcctcttttcctatttgaataccctttatttctttctcttgcctgattgccctgaccagaactttcaatactgtgttgaataggagtggtgagagagggcattcttattttgtgctggtttttgaagggaatgcttccagcttttgccccttcatatgatattggctgtgggtttgtcataaatagctcttattatattgagatacattccatcaatacctagtttactgagagtttttagcatgaagcggtgttgaattttatcgaaggccttttctgtatctattgagataatcatgtggcttttgtcattggttctgtttttgtgatggattatgtttattaatttgcatatgttgaaccagccttgcatcccagggatgaagccaacttgattgtggtggataagctttttgatgtgctgctggattcagttttccagtatttcattgaggattttcgcatagatgttcatcagtgatattggcctgaaattttctttttttgttgtgtctctgctaggttttggtatcaggatgatctggcctcataaaatgagttagggagaagtccctcattttctattgtttggaatagtttcagaaggaatggtaccatctcctctttttacctgtggtagaattcagctgtgaatccttctggtcctggcctttgtttggttggtaggctattaattactgcctcaatttcagaacttgttattgggctattcaggggttcgacatcttccttcttctttttcttcttcctggtttagccttgggagggtgtatgtgtccaggaatttatccatttcttctagattttctagtttctttgtgtagaggtgtttatagtattctctgatggtagattgtatttctgtgggatcagtggttatatcccctttatcattttttattgtgcctatttgattcttctctcttgtcttctttattagtctggctagtggtctatgtattttttaatcttttttaaaaaacaattcttggattatttgatattttgaagggtttttcatgtctgtctccttcagttctgctctgatcttagtcagccttcttgtcttctgctagcttttgaatgtgttttctcttgcttctctagttcttttaattgtgatgttaggatgtcaattatagatctttcccgctttctcctgtgggcatttagtgctataaatttccctgcaaacactgcttccgcagtttcccagagattctggtacgttgtgcctttgttcccattagtttcaaataacttatttatttctgccttaatttcgttatttacccagtagtcattcaggagcaggttgttcagtttccatgtagttgtgcagctctgagtgagtttcttaatcctgagttctaatttgattgcactgtggtctgaaagactgtttgttatgatttccgttcttttgcatttgctgaggagtgttttacttccaattatgtggtcaattttagaataagtgcaatgtagtgctgagaagaatgtatattctgttgatttgcagtggggagttctgtagatgtctattaggttcgcttggtccagagcagagttcaagttctgaatatctttgttaattttgtgtctcattgatctgtccaatattgacagtggggtattaaatctcccattattattgtgtgggagtctaagtctttttgtaggtctctaagaacttgctttatgaatctgggtgctcctgtattgggtgcatatatatttaggacagttagctcttcttgttgcattgatccctttaccattatgtaatgcgcttctctgtcttttttgacctttgttggtttaggtctgttttatcagagactatgattgcaatccttgctttttttttctttccatttgcttggtaaatattctccatccctttattttgagcgcatgtatgtctttgcatggagatggatctcctgaatacagcacacagatgggtggtcttgactctttatccagtttgccaacctgtgtcttttaattgaggcatttagcccatttacatttaaggataatattgttatgtgtgaatttgatcctatcgttaggatgctagctggttgttttgcctgttagttgaggtagtttcttcatagcgtcaatagtcttgacaatttggtatgtttttgcagtggctggtcccagtttttcctttccatatttagtgcttccttcaggagctcttgtaaggccagcctggtggtgacaaaatctctcagcatttgcttgtctgtaaaggattttatttctcctacgcttacgaagcttagtttggctggatatgaaattcagcgttgaaaattcttttttttaagaatgttgaatattggcccccactctcttctggcttgtagggtttctgcagagagatctgctgttagtctgatgggcttccctttgtgggtaacccaaccctttctctctggctgcccttaacactttttttttttcattttaaccttggtgaatctgacagttatgtgtcttggggttctcttctcaggagtatctttgtagtgttctctgtatttcctgaatttgaatgttggcctgtctttgtaggctggggaagttctcctggataatatcctgaagagtgttttccaacttggttccattctccccatcactttcaggtacaccaatcaaatgtaggtttggttttttcacatagtcccatatttcttgaaggctttgtttgttccttttcattcttttttctctaatcttgtcttcacactttatttcattaagttgatcttcagtctctgatatcctttcttctgcttgatcgactcgactattgatacttgtatatgcttcacaaagttctcatgctgtgtttttcagctccatcaggtcatttatgtcctctaaactggttattctagttagcaattcctctaaccttttttcaaggttcttagcttccttgcattgggttagaacatgctcctttagcttggaggagtttgttattacccaccttctgaagcctacttctgtcaattcgtcaaactcattctccatccagttttgttcccttgctggcaaggagttatgatcctttggaggagaagaggcattctggtttttggaattttcagcctttttgtgctgttttttcctcatcttcgtggatttatctacctttggtctttgatgttggtgatcttcacctggggtttttgagtggacatcctttttgttgatgttgatgctgttcctttctgtttgttcgttttccttctagcagccagacccctctgctgcaggtctgctggagtttgctggaggtctactccagaccctgtttgcctgggtatcagcagtggaggctgcagaacagcaaagattgctgcctattttttcctctggaagcttgagcccagaggggcaccccccaaatgccagctggagctctcctgtatgaggtgtctgtcgacccctgctgggaggtgtctcccagtcaggaggcatgggcatcagggacccacttgaggaggtagtctgtcccttagcagagctcgagcactgtgctgggagatctgctgctctcttcagagctggcaggcaggaacatttacgtctgctgaagctgccccgacagccactgcttcccccaggtgctctgtcccagagaggtgggagttttatctataagcccctgactggggctgctgcctttctttcagggatgccctgcccagggaggaggaatctagagaggcagtctggctatagtggctttgccaagctgcagtgggctccacccagttctaacttcctggcggctttgtttacactgtgaggggaaaattacctactcaagcctcagcaatggcggacacccctccccccaccaagcttgagcatcccaggtcaacttcagactgctatgctggcagcaagaatttcaagcctgtggctcttagcttgctgggctccgtaggggtgggatccgctgagctagactgcttggctccctggcttcagccccctttccaggggagtgaacagctctgtcttgctggcattccaggcaccactggggtatgaaaaataattcctacaactagcttggtgtctgcccaaaaggctgcccagctttgtgcttgaaacccagggccctggtggcacaggcacctgagggaatctcctggtctgcaggttatgaagactatgggaaaagatactaatctgggccagagtgcaccattcctcacagcacagtccctcagggcttctcttggctaggggagggagttccccgaccccttgtgcttcctgggtgagacagtgccctagcctgctttggcttgccctccgtgggctgtacccactgtctaaccagtcccaatgagatgagctgggtacttcatttggaaatgcagaaatcacccaccttttgcactgatcccacagactgaagctgttcctattcagccatcttctgttctcaatcctgtttcttaaaagctggacaatatattaattaaattgattcattatgaaataataggatgatcttgcattccaaggatcccacttcatcataatatattaccttttatgagtgttgcaatatttgatttgctaaaatactttcaggatttttccatctatcttcatgagggttattggcctgtaactttttacttctagtgtctttttgttattgaggtgatgttggcctcataaagtgagttaggaaacgtactttcttctagaaagtagaaatggtgttatttccatcttgaatgtttggtaaattgtaccagtgatgccacctgggcctggagttttctttgcaggaaggcttttaatgcaatcttagtcatttaatggatggaaggttgtccaggttatctttttttttttttttttttttttttttttttttgcctttgaaagagtcaatttgtgaatttattggcataaatttgtttataatattctcttatcttctttctaattcctataggatgtgttatgatatcatattggtcattcctgaaattggtaattaatgtcttctcttttcctgttcattctgtctaaaagtttatcagttctattgatcttttaaagaaccagcttttggttttaatgatgtttttctattgtttttatgtttcatttttcattgatttttgctgttatctttcattttgttcctcatgcttgctttgcatttaattgctcctttttctaatttcttaaggtaaatgcctaattatttatgtgaggtctttctcattttcaaatatgagtttaatgctataaatttcctctaagcactgcttagctatatcccccaaattgtgtttttatttttaatcagtccaaaatattttctaatttcctttgtgagttcttctgtgatctgtgagttactatgtagaagcgtattgtttaattaccaaatgcttgggagattttctaaatttccacttgctgttagtttctaacttcattcaaaggacatagtttgtgtggtttcagttcttttaaatttactgagaaatgttttatgacccacagtatgatatcttggaaaatgttccaagtacatttgaaaagactagtagttccccacatggacacgcggaggggaacatcacacaccagagactgttgatgggtgggaggctagggaagggatagcattaggagaaatgcctaatgtacatgatgggttattgggtgcaacaaaccaccatggcacatgtatacctgtgtaacaaacctgcacattctgcacatgtatcccagaacttaaagtattataataataataataataataataataataataaaagattagtagttcccctttttccacagttttgctttccacagtttcagtgacccactatcaacaacggtccaaaaatattaaatggaaaattccagaaataaacaattcataagttttaaattgtgcacaaatctgagtagcatgatgaaatctcacattgtcctgctccctcccacatgagatgtgaatcattccttgtttggcatatctacaccgttcacactacctgcccattagtcatttcgtagccgtcttggttatcagatactgccactgtatcacagtacttgtattcaagtaacccttattttacttaattatgtcatcgaagtgcaagagtattgatgctggcaatttgggtatgccaaagagaagctgtaaagtgctttgtttaagtgaaaaggtgaaagttctcaacttaataagtaaagaagaaaagaaaaaatcttacactgaagttgctaagatatacaactgtaagatatattcttacagttggtaagaatcttctatgcatgaaattgtgaagaaggaaacagaaatttgtgcaatatatatataaggttcagtagtatctgtggcatcttctgagggtcttggaatgtattacctgtggataaaaggggactagtgtatattctgctgttgttaattatagtgttatctaaatttcattgattattaagagagaagacccaaataaataaaatcagatatgaaaaaggagacattacaactgataccacagaaattcaaataattattagaggatactatgagcaactatatgccaataaattggaaaatctagaagaaatgcacaaattcttagactcatacaacttaccaagattgaaccatgaggaattccaaaatctgaacagaccaataatgagtaacaagatagaagccatactgaaaagtctctcagtaaagaaaagcccaggacccaattgcttcactgctgaattctaccaaacatttaaagaagatctaatagcaatcctacttgaactgttctaaaaaatggaagaggagggaatatttccaaactcattctatgagtccagtattaccctgataccaaaaccagacaaagacacatcaaaaaaagaaaactacaggccaatatctttgattaatattgaatcaaaaatcctcaacaaaatattggcaatcaaaattcaacaatacatgaaaaagatcattcattataaccaggtgggatttattccagagatgcaaggatggttcaacatatgcaagtcaaccagtgtgatacatcatatcaacagaatgaaggatgaaaaccatatgatcatttcaattgatgacaaagaaagaatttgataaagttcaacatttattcatgataaaaaccctcaaaaaactgggtgtagaaggagaatacttcaacataataaaagccacatatgacagaccaacagctagtatcatactgagtggggaaaagtgaaaacacttcctctaaaatctggagcataataaggatgtccgctttcaccactgttattcaacatagtactggaagtcctagctaaagcaatcaaatatgagaaagaaataaatggcacccaaattggaaaggaagacatcaaattatccttgtttacagatgatatgattttatatttggaaaaaacctaaagactccaccaaaaatctattagagctgatacattcagtgaagttgcaggatacaaagtcaacatacaaaaatcagtagcatttctatatgccagcagtgaacaatctgaaaaagaagtcaagaaagtaatcccatttacaatagctacaaatacaatcaaagaactaggaattaaccaaagaagcaaaagatctccacaatgaaaactatagaacactgacgaaagaaatggaagaggctttttctagagatgccctgctgggagagtatccatggctttgcgtccccatcatggccctgcggtcggcggcctcctcctggagcacagcaaggtcaggtggcacctgcttgagtcctgcgttgccatggccacagttcctgagttgctgcagcagcaggaggaggaccacaggaagctgagatctgtatctgtggacctgaatgttgatccctcacttcagattgacatacctgatgcgctcagtgagagagataaggtcaaatttacagtgcacacaaagaccacactgcccacatttcagaatccagagttttctgttacaaggcaacatgaggactttgtgtgactacatgacactcttcatgtaccctagaacttaaagtataacaaaaaaaaaaaaaaaaaaaagaaagaacagaccatgctgggcttattgtgagtgttttagaaaatcaaataagctagttctttctgccttgctattcatttagtttaaagagacttatatccactttttataatggattgtgaaaattttgatttcatctacctactagagtatttgctaactattgggtaagtggaaaatatgtgaaggaatagtgttacagctttgaggtaatgcatacaggcttacattatttatgttgtaaagtggtataaacagtgtaatgactttagtcttatttacctttaggtttggtttttctctggtatgttctttccaatgtcagtagaattgatttctaggaaacattagtattggtaatagtatgtgataagatttctcaaaagtgctgaaggaggccatgcctgtaatcctaacactttgggaagctgaggtggatggattactgagctcaagatttcaagacctgcctaggcaacatcatgagaccttgtctctactaaaaatataagaaattagctgagcatggtggcacatacctgtagtcccagctactggggaggctgaggcatgagaatcacttgaacctgggaggtagaagttgcagtgagccgaggttgcaccacttcactccagcctgggtgacagagtgagactctgtctcccaaaaacaaaaaagtgctcaaggaggcagttttcagcccttgattgttaattcttggctgcaggaacagaggcttagctgattttaaaggagatttccatgcattttgtcctgccatgcagactgaagaatctgtccaaatgacaatttcttaataattgaacaaaattagtactgaagcttatatttagatatgttctgttcattcaaaatcaaagtccttgattatcctttgggattaggaaaaaaatcctttggaatactggagacttcataatcttgatggctaatcattggtgtttagcatttgttgtactagttttaggccaacattgaagcagtatagacactgttgtgctctgaacgattgtctgtaatggataaactgggcaaatgattgccatcaaagtgaatacaggaagatacctccttttaaatggccagaagaaataaggaaggttaagaaaaaacaggagttgacttttaaatagccccataggagtggagtggttgtctcctgtggaccagcaagagtagaacgaggcaccagctagaaaacatcgcttctgggacaagagactcatgagttcctgcctctgctgcagattccgcctgctcctacgaaggctgacttcaatggtccttgagagaagatgcagaaactgggagaaggtaaagggtctttgaccaaagaagaatttgccaagatgaaataagaactggaagctgagtatctcgctgtttttaagaagactgtgtcctcccatgaagcctttctttagtggctttcttctcaccctgttctcagtaaagatcgcaactttcatattttcctggaatatgatcaggatctaagtgttaggtggaaaaatactaaagagatgtttggtggcttcttcaaaagtgtggtgaaagtgctgatgcagtcctttttactggagttaaggaggtagatgacttctttgagcaagagaatgacttccttattaactattagagtaggatcaaagattcttgtgtgaaagctgacaaaatgaccagatctcataaaaatgttgccgatgactatattcacactgcagcctgcttacatagcctggctttagaagagcccacagtcatcaaaaagtatctattgaaggttgctgagctatttgaaaaacttaggaaagtagagggttgaatctcatcagatgaagatttaaagctaacagagctcctccgatactacatgctcaacatcgaagctgctaaggatctcttacacagatgcaccaaagccctcattgactatgaaaaatcaaacaaagctctggataaggcccagtttaaagagcaaagatgtcaagttggctaaggtacactaggaggagtgctgccagaaatttgaatagctttccaaatctgcaaaggaagaactgataaatttcaaacggaagaaagtggcagcatttagaaagaatctaattgaaatgtctgaactggaaataaaacatgcgaggaacagtgtctcccttttgcagagctgtattgacttgttcaagaataactgatatgccttcactctgaagaaaagaaatgaatgtgaaagaaagccaaacatcacttgcacttaaatcattaccagcggaagatttattgtcttcaactttagtttaaaattatgtgaataaatattttgatttctacaaatcttaacatttaaccatgttggtttaaaaatattgttgcttgctatttggacataactaatttttccttgtgcatttaatacctctgggcagaatctaaatactgagttctcctgtagtatgtctttagttactaagagaggatgtaggagacatatgccttctggaaacaagtagaagcaatcatctggcccatgtcctacaaacccatgaatgtcagggaggtgccagttacagcaggtgattcagcaacttgaggcaggtaacagaccttccattcctcactgaaggtggggtttgtgtttttgttttgccccctgttactcccctggtagtcatctggtgtttgtactataacaacagcaagaaaatctcatttgtctttatgtactcttggcacctcctttttttaaatcgagatataaatatttgaggggagaaaagtatctacgggtatatatggaaactgataatgtggtctactttataagatggccagatctacattaggaaaagtatgagctccttccatagtgtctgtgggaggtgatggggggagaggggacagtgtatgtctttggcgtttgtttttttataaagtatataataaaataatcatgctactaaaaaaaagaaattgaagaggacacaaaaaatggaaaaatagtccatgttcatagattggaagaagcaatattgttaagatgcccacactacccaaagcaatctacagattcaatgcaatccctataaaaataccaattatgtgcttcacagaaatagaaaaaataatcctaaaatttatgtggaatcacaaaagactcagaatagccaaagttatactgagcaaaaacaacaaaactggaggaatcacattacctgacctcaaattatactgtagatctatagtaaccaaaaaggccaagtactagcataaaaaaacagacatatagaccaatgggatagaatagagagccccaaaacaaatccacacacttacagtgaactcatttttgacaaagttgccaagaatatacattggggaaaagtcttttcaataaatggtgctaggaaagctggatatccatatgcagaataaagaaactagacccttatctttccgcatatacaaaaattcaaatcaaaatggattaaagacttgaatataaaacctcgaactatgaaactactaaaaaaaagcattggggaactctccaagacatgagactgggcagagatttcttgattaataccctacaagaacagtcaatcaaagcaaaaatggacaaatgggatcacgtcaagttaaaaatcttctacacagcaaaggaaacaacatgaagagacaacccacagaacccacagaaatgggagaaaatatttgtaaactatccgtctgataagggattaataaccagaatatataagcagctcaaactactttgtaggaaaaagacctaataatactgtttaaaaatagccaaaaatttgaatagacatttctcaaaagaagacctacaagtggccaacaggcatatgaaaaggtgctaatatcattgctcatcataggaatacaactcaaaactacaatgagatatcatctctccacagttaaaatggtttttatccaaaagtctggcaacaacaaattctggcagggatgtggagaagagggaacatttctacactgttggtggggatataaattagtacaaccactatgaagaaaagtttcgaggttcctcacagacaaaaatagtgctactgtatgatccagcaatctcattatcaggtatatattcaaaagaaaggaaatcaatatattgaagagatatctgcactcctatgcttgctctagcactgttcacaatagccaagatttggaggcaacctaagtgtccatcagcagatgtataaataaagaaaacgtggcacttatacacaatgaagtactagtcagccattaaaaaaaaaaaaaagagaatgacatcctgtcatttacaacaacatggagggaactggaagtcattatgttaagcgacataagccaggcacagaaagacaaacttcacatgttgttctcacttatttgtgagatccaaaagtgaaaacaattgaactcatggaggtagagaatagaaagatggttaccagaggctgggaaagatagtgtggttgggggtggagggctgaagaggaggggggatggttaatgagtacaaaaagaaatagaatgaataagacgtagtacttgacagcacaacatggggactatagtcaataataatttaattgtactttttaaaataactaaaataatataactggattgtttgtaacacaaaggataaatgcttgaggggatagatactcgattttccatgatgtgattataatgcattgcatgcctgtagcagaatatctcatgtaccccataaatatatacacctactaagtacccacaaaaattaaaaataaaaaaattaaattaaaaaaggtacagcattttaacccttccttggaacctaagctatgcatctgaaaggggagtttttaactgtataagtctgtctaaatgccttagtaacgtgatgaattatagtaactcagtgttttttcctccctatttgcagaatgttaaccattgctatgttttccagaaaaaccctatattagttaggatgagtaaagttagctgctataatacacaaacatcacaacctggtgtttgatagagcccagtcagatgttcctggttggcagatggttttccttatgatctttcatatgggtggatgagttccttccatcttgtggctgcatccccttctggatcttcagcattctctctcttcattcagctaaagtataaagagagcacagggaagatatacctacttcttaactctttgtccaaaaatgacatatatcacttcttactttctattagcctaaacttggtttgtggacacatctgagataaaggctgcaaaaatataatcaaactatgcctaggaggataagaaatcattttggtaaatgcacagcagcctgccacaaatttatttgaaattgataataattgttctatttaagaaaataccataaaaaccctagaagaaaacctaggcaacatcattcaggtcataggcatgggcaaagacttcatgactaaaacaccaaaagcaatggcaacaaaagccaaaattgacaaatgggatctaattaaacaaaagagcttctgcacagcaaaagaaagtaacatcagagtgaacaggcaacctacagaatgggagaaaatttttgcaatctacccatctgacaaagggctaatatccagaatctacaaagaatttaaacaaacttacaagggaaaaaaaaacatcaaaaagtgggcaaaggatatgaatagacactctcaaaagaagacatttatgcagccaacagacacatgaagaaatgctcatcatcactggccatcagaggaatgcaaatcaaaaccacaatgagatatcatcttgcaccagttagaatggtgatcattaaaaagtcaggaaacaacagatgctggagaggatgtggagaaataggaacgcttttacactgttcatgggagtgtaaaccatttcaaccattgtagaagacagtgtggcaattcctcaaggatctagaactggaaataccatttgacccagcaatcccattactgggtatgtacccaaaggattataaatcatgctactgtaaagacacatgcacacatgtttattgcggcactattcacaatagcaaagacttggaaccaacccaaatgatagactggattaagaaaatgtggcacatatacaccatggcatactatgcagccataaaaaaggatgagttcatgtcctttacaaggacatggatgaagctggaaaccatcattctcagcaaactgtcacaaggacagaaaaccaaacaccgcatgttctcactcgtaagtgggtattgaacagtgagaacacttggacacagagcagggaacatcacaccccaaggcatgtcgtggggtggggggcagggagagggatagcgttaggagaaatacctaatgtaaatgacgagttaatgggtgcagcaaaccaacatggcacatgtatacatatgtaacaaatctgcacgttgtgcacatataccctagaacttaaagtataataataataataataataataataataaaagaaaataatagggtgtggcctgaagaacattcagccctgtcccttttgtgtctgtgatgggccttatgagacacccttctcaacggtctgtgattctgaaccaagagtgtcctggtatctgaacactaacctgcctgaacactacccctgatcctacctttacttagagagtggaatcctcagattttcctaatatgtcgactaacgttgtgagaagattgctatttgggattggcattattaacacctcagatgaactttatttgtgggtatgtttttatttttatttttatttgtgggtagattttatttgtggataggtaggtacatggtggaggtgaaggtagaaaatggagcagaaaaagcatgcaaaactctgtcttgtaaatacaattaatcgagtgtcagatgttgtggcttgagagtgtccttttctaagatctgtgagggaaatggtagacaggttgtttcatcttcatgccttcaatgcaatgtcttagtgaccaggtgacttcatctccattaaggtaaaatgcctatgttcattaagataaggttagatcgctgtagcacaaaggcagtggctttgaaaaacacagaaattaatttctatcacatgtataagtatgaagtgagcattccaggctggcagacagctccactccacatggtcactcagggactcatgttcctacaaaagagctgtttcccataaccccagagcctgtcatcactttcacggtctcactgggtcacctgggttctacccgtccagaaggggaaagtggatacggaaaaagcaccccgcaatgttttaagaagtcaacaggcaagtactacacatcatatcacctgtgctcatatttcactgctgagaactatcctttggtcacatctaatgcaagggtatctggaaaatacaatatatgtaggcaaccatattctcagcaacaatcattttattgtggaggaaagcaagaaagaatcttagaggacagtcagtagtctctgccacagggtccatacaaccaaataatgagagtgatagttagaacagaatcacacttttattgcaagacaaaagagaagcataataagcttcaaacgttgatactattattaagttatttaataggccctggtgtgtaaagcattcagaaagtgtagctgcatattcttcaaattcatatcttaatttcttataagcatatgaaaatatttagaaaattaagaatagttttccacatttgctttcattctcaggacagcatttcatttatgcatttatggagcctctctgcgtgccagttgctgtgctagactctgaaggtataaagacaactaagatacagctctgctctcaagaagtccacaaactagtcatagatatgatctgggtttgggtttttattggttttgtttttacagtgctgaatggtgtgattagcgctgacctagagttgtgtgcacaactcagcatgggtgcacagggatgattcagggggcgtagttacagaacacacggggctaaacctgaaagtgagggtaggagttgaccagatggacccaaatagggaaaaacattactcgctaaggaaatggtgtgggcaaactgagaaagtataaaacagctcatgtgtgaaagtgttagtgagttagcctggagtctgaagtgcaagtcagggcagagcgagttgggcttatgagctttgcatcgtgagctgctaacagattttattctataggtgatgtggctccactgattcccaagacacctggttggatctggatttagagaaatcattagcaatgtaaaatgatagattggaatctaaggagttcaaaatgccagcagtaaggctaaacatgctgatgctttagctgagaaaattcttgtggaaagagttccatgtgccaaaagaaaaaaaaaaaaaacacttgacaaaactcttaggaatttcgtcttttgagaacaaagtcataaaagaaatacactttttaatcaaacttatcatagtgccaggtagtataagagaaatatatatatatacacacacacacatacacatatatctttatataaaacataaagatacatatatctttatataaaacaaatatatatatctttatatatatatatataacaaaaatatgtatagcataaaccacctttgaaggagacaagaaagtgtgagctcatgacataagacagtgtataactaggcacactgaaagtgcaggggctcccaaggctgtgagtattcagaggagggagtttaaaccatggcataatgagggattggaactttgccttgaaaagagacaacctgtcttggtttgactacgtttcataggtacaaatagaggcagattcttcttcctcaaatgaatgggcatttcacccaaacataccgacaagggaatggcagttgcacaagcagctaatttcttcttctcttcctattgagtactataatggaagaaaggagaggattattagccaaaaaagggaatattatagtgtgaatatttatgttcccccaaattcatatgttgaaatcctattctttaaggtgaaggtattagtaaggggggcctctggaaagtgattagggcatgagagcaaagccatcatggttggattattgtacttataaaagagaccccagagagctaactacctctcccaccatgtaagggcacagctggcaggtgccatctaagaaccagaaagcaaccctcaccagacaccaaatctgctggtgccttgatcttatatttcccagtctccagaccagtaagaaataaatttctattgtttagaagctacccagtttatggtattttgttacagcagcctgaacagactaacacagggaattaatggttagaatctctgtttcctccaggcaggattcagcaggaatactgaagaagggtgatggaataattgtgacagccactggctcatcttagaagtcagttccctcagatgagaaccatagagggttggtagggcgtagtgagagcagcagctgccagtaagacagactggatgtgaatcctatggcctgaggctgtcccagaatggtcccccatcaagtgtctttatgctcatggaggtacctttgtgatttttatggaaaatagccacatattcaggggctgggccacttgtctcttcaagaacagggagaccctagagaccaaggagggaaagtctttataaagtggcatttgcttgaggggctagaggacctgataaaggaaatatcccagggactctgtgcaaagacagtttggtgaggcagagggcaagcgtgcagcaaagagttaacacagcaggcctgctttagaaaggcctgcttgcaagggtggcccttggctggtgtctgggaacttggctttcaagacagtttccaccaccctgactgctaagggtaactcgtgatgcataaactacatgtgccaacaatacaatttatgctttctccctgaaactctggaattttagtacatgctaagcagctggtgcctatgtgaccagcccccaataaaaaccctgggcactgagtttctaacgagcttgcctgtcaaacagcatttcacatgtgttgtcacagctcattggggaggaattaagtacatcctgtgtgacttcactgggagacgacttggaagcttgtcctgtttcctccctactttgctccatgcaccttttccctttgcagattttgctttatagtgtttcactgtaataaatcttagccatcagtacaactgtattctgtgtcctgtgaatcttcctagtaaatcaaacctggggatggtcttggggattcctgagacagcaagactcactggaaggactccagtagaaaacagctgctcagcattgacacagataagcacatatatttgttttaatttctatcttccagaataagacatttgattattttaggtgtatcttccttaacaactgtaactactcagaatctttcagattttaggaaggcactgaatataccatatattattaaatgccccaggaggcctggggaatacatactaatgtactcaaatacattagtatggctgcttttaatacatgaaaagtctcactaagaagaataaatagaggttatatgtagcctcacatcagtccaggtcagggctcaccaccagatgagtttctgccaaacttaggggaaaaacacttaaaatttttagagcattttgaattttcgcattgcagataagggattgtggacctgtattaccctccttcttttgcttatccggaaattaaggcttagaaaagttaattgatttgccaacagtagcacagcttgtatctgatctggatttcaaatttaggactgtctaggctacatgcccgagaactcttatctatcactctagactgtctttctagctacttattttaagaatatgtcttcagtgtctgcatactactaaggaggaagtaatgtgtgaacaagggagaatagaaaagaagaaagtaattatatttttttgacatggccatttacataatttactttccttcatgaaatggattcctaatatatatttattgttaccttctgtaagtctaactgcatgacaaggcccaaaagagaaatatccacccattctctctcctagggtatgtctgttatatccttatagtcattctcagagtgtgagtgagagagtgtgtgtgtgtctgtatgcatgtgtgtgtgtgtgtgtgtgcccctgtatttgcattttgccttccaaggcagcaggagtgtgtcttattttctctctgtttctcttttattgcataatgctcaataattcatttaagttgatatgctttcattaaattgagtagaaaattaccttggctgaatgaagataactcccagatttctctgcatggggaggccagccacctcgcacttactggagaaagttcttaatagacttacccacttttaccctcattgtggcaacaaagaaatggtttggagaaaagagaaacaacaggactccttccagtaaaacaggaaaatatattttacataggtatttgctgtgaggaggatttgaagggacaggaaatcactatcaaatacatgtgaactgccaagtttcattttgacttttctgctcctacctgcctctcactttaaaaaataagtgcttgcttacccatgtttaggcaatagaaaaaataaaataaaaaaaaataaatgctgtatcaattagatagatgtcggtaacccagttttctgaatcctgacatcccagaatgtaagaatttgtcattctaataagtctgttctgcctcaacttgtaaatcagcttaattcaattctaagtgaaatctctcgtttttcattatgtctgacacaagcttagtaattctcagaaaatagtccttgtgaaatgaagctcagctggaaattctgatattcgatgatgcttacactaacaactgtcattcttggcaatggcttcattattcagtgacacagttaagagccttgttttacttttattcaaaaatgtctttgtctttctctgcttgttccagcaacagttttcctggagttttggaaaagacggcgagcagtaattgcttatgactgggatttgatagactgggaagaagaggaggtttgtatcatttacctcagaatgttgtaaaaagcaaatcacccagaaccacacgacccccccccaaaattgtcactctctgttctgtgacggaagtcaggtgtactcataaagcattttcaattgccttttcagaaaatttcaagcagtataaaaatggactgacaatttttgtaaatttttgattccttagtggaatcaaatcccttgattaagtggagaattccacttgtaggtagaggcaccagaagaattggtggtgtagctttttttttccattttcttaaaaatcatccttttttctctaacttcagcagaaaaagagcattcatttgacatctccaggtacatggaagcaatccttccaagagaattacccaaaggcagtgtgtctgtgagcagcacccaggaccgtgcccaggtgtgcacaggctctgaagtatgacatcaagtgttccgtgctggggacaatccactctgaagcggccaccttgggagacgtggttaaatggagggccagctctagacaaaactgccaaggagggccagactcagcccaccactgtcccttagcgtcttctaggccagtccgttgttctcctcctgacctgtcttgttctaatagtctcttcttgcccctattcctgtcggaagtctgaagtacccacactaggcgtggtcaccacggtcccctcttggaccctgcttcccttgacagttggtccaggcctcagccccactctcctccctctcgttcattatctcttacccctcctgagtctcatttcctcagagccttgctgtgccagtaaatcagataaaccactcatatgtgtaatagttttttgatcatggctattaatatgtgttttccttgaagggaacacatgtatatattttcatgtataaaaaagaatctttcagaaatatgaacgatgtgaattttagccctgtggtaggcttggtgggggaagtaattctgagaggtatttttgttgttgttgtttgtttccttcacactatgcctcctcaatggctgcctgttccccttctcccatgaacatgtttgggtagttttttggtttggtttggtttggttttgaatgtacttcaggtgtacaacaggaggttttgatacatgacactgagattttcagcaatccttgttctcctgataaggctttctttcatgtttttataaatattctccaggccaggtgcggttgctcacacctgtaatcccagcactttgggaggccaaggaaggggtaccacttcaggccaggaggaggatttgaggatagcttatagatggccatcttctccctgtgtcttcaggccaggagttcgagaccagcctggccaatatggtgaaaccccatcactactaaaaacacaaaaattagctgggtgtggtggcatgcagctgtgatcccagctacttgggaggctgaggcacaagaattgcttgaacccagaaggtggaggttgcagtgagccaagattgcaccactgcactccagcctgagtgacagagtgagaccctgtctcaaataaataatgtgtatatatattttttctaggttctagatatatatatatatatattatatatatatatatatacatacacatatacatatatataaatagattttcttcaagtggccaattttcaaacatatatatatatgtgtatatatatctagaacctagaaaaaaaatatacatatatatatgtatgtgagtgtgtgtatgtgtgtgtgtgtgtgtatacatatatattctaggtttgaagaagcttcccaggctgactatgacatctattggtagcagccggactgcattcagaaattcctcttgtgtggtgccattctgctgtttctggttatatgtgttcatgggaacagttcccagtgggatggaaaatattctttcctgggaatcaccttgggcaatttacttcacctttggactttaaaaatctctaatgaaaagaagtgggactaaattttccccttctatctgtaaagtgtggccctatttgagtaactttgactaaaccagtctacaatcattgttggcgtttgtggtgggcccctgatgtgggcacccttctggggaacgtatgtatcccttataagtgtggagccttctgtcttcccagcccctgataaaaagcgtggagtgctgaattgtcctctcactctgcatacctttgtacaggagcctacatacgtagccattcccagcttgggattccttgtggaaatgcctcacttctagcccatgatttctaccttattgtgcagaaaaacccagactcgctgcagaccttctggggcaacctcgcacattagtttgtcagggctgccataacaaagtaccacagactgggtggcttcaacaatagaaacttacatgctcacagttctggaggctagaagtccaagccaaggtgtcagcagggttggttctttctgagaaccatcagggaaggatctgttctaggcatcttttcttggcttatagatggccatcttctccctgtgtcttcacatcgtcttccccctgggtgtctctgtgtccaaatttcctcttcttataaagacaccagtcatattggagtagggtccaccctaatgacctcatttgaacttaattaccactataaaaaaaacctgtttccacatatggtcacattcagtactgcgggttaggacttcagcagatgaatttgggggaagcaagacacaatttggcctataacacccagcgatatggtttggctgtgtccccacccaaatctcatctttagttgtagctcccataatccccatgtgttgggggttggacctggtgggaggtaattgaatcatgggggtgggtttttcctgtgctgttctcatgatagtgaataagtctcttgagatctgatggttttataaaggggacatcccctgcacatggtctctcttgcctgccaccatgtaagatgtgtctttgctcctccttcaccttccaccatgactgtgaggcctccccagccatgtggaactgtccattaaccctctttttctttataacttacccattcttgggtatttcttcatagcagtatgaaaatggacagatacatccaggaacacagacctgtctccatgattggccttagttctcggatgactagctcaagggctcttgatgacacttatggcccaataaattgaaagtttcccaaagaagcagaagattctaggtctgctatgtttatctcctcaagtataactgcctaaaataaatgaaagacagagcctgctcctaatgtatctcctgctgatcttacccatgacctacccctgagggaagtccagccttgggctaattcagtggcaggagccaggctgagccatgtgaaggccatccttcatgctacatgggcaggctgctgccaaactgggctctctctccatgacctctcttctgtcagctcgttccttgctttctgccagtaccttcatccgaatcttgaccatttctgcctggattaactcaatctccatttcagcagagtttctgctcatttgccatcctctcccaacactctcaaacataatgcatgcttaattaacgggaaccacatcaggttcccttgctgattgccttttcctaatctcataattggtttttagtcagaagcttttcacattcaggaggctcagctaaatgaaataaaatctcagtttgatttagaattggaggaaccttgattttaactggttttgaaaggtgcttaccttgttttcaattaagaattaagaatatacctaaagtctattggttaaagatgaatgactcctataggaacttattaaaaagtagattcaccatgtttttagtgaactaaacctaaaaatgcaaaaaaaaattgctggagaaaactaagaattatattgtcattataacttacaaaatggattttgaacattttcctgtagagaagccttctttgtcctggtgtttcttatcactctctggtaataaaagtaaaagcttattagttgttccaaaccattaggacaggacagcttgtcccttttaaaataccattctcagggtggttttttcttcaaggttagttttataagataacagataaatgtaactgttagtccaaatttctttgcttttgatgatagtaaatcttgatcttcactctttagattttcttcaagtggccaattttcaaacatttaagcctgggcacccaaacccacttcattggttgactaattagtgtggcagctgttgactctgttttatggtggggtaaaatgatatttctttttttattgtgtgagcacctctttagtgcattaaaatgtgtctgcttgtcctttaggaagaaatacgaccccagtttgaagccaagtattccaagaaagagcggatgaatccaatttctggaaagccagaaccttatcaagcatttacagataaatgcagcagacttatcgtttctgcatctggaatattttttatggtttgaaacttttaaaaaaatatttgtttcataaaatacaaacctatagcataataacagtaatcatattgggcatttgcattgttctacaaaatatttttgcactttgttatttattcctcacagtaacttcgtctggtggtcagggatggtattgctatccccatattacagatagaacaactgagactccaacaggttatggggcttgcccgaggtcagccagtaggtagctaagagctgagaccctctaatctgatattctttcctcttgccatattctactgtgtgatgctgaaaggagtcaaaaatgtgagacaggatgtacagtagtgtttttcaaacttttcaccatgcccatacagtaagaaatatattctctgtcataaccccgaatatgccaagcaagtagatgtataaaacagtgtaagtaaaacagtgctcacctttataatatgcataagctctgattttgttttattatagtatatttttaatgacagattagcctcctaaaattaatttcctgactcactaatgatcatgtcagtttgaaaaacagacctcagtttttagcttttcctaaaaagcagtcttagtaattaactttaacactgttaattactgaacaaaacatatgcagatgtttctgaaatgtcattttagaacagtaaaggatgattaggatcctcctttccttttttcaaatgatgagtatataaatatatgcctagaccattagagtaggaaggacaagactatagcaaattcagacaggctactccctttttccagtgaagaaactggggagatgaagggctgggcagcttacccagactccttggctcagaccaagattcaaatccatgcctgtctacagatactgcttttaagcaactgtgtcatgctttgccttctatgtacatattcatatttattgtattgtttcttacaaagacccatagacatagattaagcttttcctgttctatggatggggaacttggaacacaggaggctggagctatggaaaggacaagcttgcccaaggtcacactgctgggtgatagctgagctagggctctaatctctcttctgactttgaatccagccagctgtccatcctacctcattgccatccttgtctgaatttcagcatagattttacctgtctcctgatcaacagcactacaattaagatctggacaggtttttgtttattttattgttattttggccagtctgagctaggacttgtacttgagcttttagaacatatctcccttaaaagtaagcagaaaataaattatgtgcaaaacaggaatacttttgtgaagaaaggaatctctaaatcagcagaggccttcctgaggcctggcttcaaggtctagcctttgataattaagtgggttaaggtctctaagacatgttaatattaggtaatcatctaatgaaagtcacaaaactttttggagtctcagatttgcattaaagtcagccctatgtgtctgtgggttctgcatttatgaattcaaccagccacagatggaaattttttttaaaaaaaggttagttgtagctgtactgaacatgtacagctacatgtcattatttcctaaacaatacagtataactatttacataacatttacattgtatcaggtattataagtaatctagagatgatttaaagtatataggaggttgtgtacaggttatatgcaaatactacactattttatagaatggacttgagcatctgtggattttggtatcatggtgttggggggtggttctgggccaatccgtcatgaggatactgagggacaactgcatttcatagagaaagaagatatgctgtattgttctcaaatgccatgaaatcttcagggaaacatgcttcagtctgtgtgaatatcagattaacaagatatgtacctatcacgtagttggttcactcaacagcaaataactgagcacttactatgcatctgtaattatgctaaggtgctgtagaaaccatgtgagcaaaaaagactccttccctgtccttatggagcttactttctagtaggggagcctgagaatagtcaaacagattgttagaaattataagtagtgtcctgaaaaagatgtaaccatatggtatggctaccacatgacaacacgaaaaacaaatagtctgggagtcatgaagaacttttattatgaagtggtgtttgagctgagaagtgaggaaggatgagtaggtgttaactaggctgtgtgtgtgtgtgtgtgtgtgtgtgtgtgtgtgtgtgtgtgtgttcggcaagagattgggtgggtaggtattacaggcaaaggaaatagtcttggcaattaagggtgcttagcccgtttgatgtaatgagagaagctgtggggaccccagagggaaggaagaatggtgcccaaaggggctagagagagggtcttgcaggctgcgtaagggttttgcttttatcctagaataataggaaactaataaacaattttaaaccgaagagtgacatgataggatttccatatgaatatttgtccatctgctcaatgtatattctgcattaaaaagtgttgtcccatagcttacacagattctcaactttcaagcgtgtagttcttttattttaattaaaaaaaatagaaaaaggcaagagaaagtattaaccacaatgaaaagtatgcatttgattgtgatctcttgagcagtactgccatggtgttacttccttttcccatcagaggatgttccaggaatgtgaatcctcttcctgtaacattccaccaagaggttcaccgggtgtcttgtcttcctgccagatctgcgtggtgattgctgccgtgttcgggatcgtcatttaccgggtggtgactgtcagcactttcgctgcctttaagtgggcgttaatcaggaataactctcaggttgcaaccacagggactgctgtgtgcatcaacttctgtatcattatgttgctgaatgtggtaagtgagctgcagtggctagccaaacggatcaaaatgtgtgggctgcaagtgacagttttcttctgttgctaaggggatctggcctcagagaggtgggccattcacatagcactgatgtcctggcagcgaagtgcctggcatgaagatgcacttgggtctgagtgcttaaaagtcttgattcaaatctagactccgggcttttctgcagtataagattgggcaaagcacataacctctctgaacattagttcccttatttatccaataagattatattgtgaaccccttaagtaaatttagagaaagaatttagaacactcagaacctgtgacacagcattgcaatgttggttcctgtttctttttgattatcaatgataggaagatagacagtatccaaagcattcctggctaggtacaggggctcatgcctataataccagcattttgggatgctgaggccagaggatcgcttgagcccaggagttcaagaccagcctaggtaacatagtgggaccttgtctctacaaaaaaaaaaaaaattaattagctggtcatggtggtgtgcccctgtagtcccagctgctttgtggggctgaggtgggaaggtcacttggttcaggaaagtgaaggcttcagtgagcagtgacagggccactgcactcagcctgggtgacagagggagaccctgtctcaaaaaaacacaaaaacaaacaaaaaccaaagcattccttgatataaccctgcaaggaaaccgccaagctggtacatattgcttttgttgatttccaggctttttcagatagcatatttcagcccagatttctttcctgaatccccaaactcacacgttaaactgcctgcttgaccatctccacctaacactttcaaacccaactcctcatcttccctccagaatcagctcctcccacagccttcctaattgtacttgcccagactaaaagtcgtggcattctactggactcctctatttctctggctgtctaaatgtatccagaatttgatcactttctgcacatcccgaagtcccaccctggtccaagtctgcagtgtctcttgccgagattattgcagcagcttcctaactggtctcccagctttcacattgctcccttcaatctaggctcaacatggaagccagagagagcttcttacatgtaagtcagttcacatggctcctgtgttcacaaggtgtagtggctttcctctctctcacagtaaaagcctgcgaggccacatctacacagtggcctcacgggctttcgctcatctggtctgtgtgacatctctgacctcatcttttcttttactcactgtgattcacctgctccagccgcacttgtccttttgatgctctcaccccaggactttttttatttgctgttctctctgcctggagccttttcctcccacagggtctgcatcgcttagtccctcacctccttccagtctttgttcaaatgtcacttctctagtaaatgcttccctggtcactctgttttaaattgcagcccactcctgctatctgacaatttcccatctgcttgcctgtgttttttctatagcatttatcaccatctaatatgctatatattttacttatttattttgtttatctgccatttcttttggaatgtaggcccataagggcagaagcttttctttattttgtttgtttgtttatttttttttcactgttgttattccctagtgtctggaacagggcctggcacatagtagatgctgtgtaaattgttgttgctattttttgtagaacaaaagtagtgcctgacatggtcggctgctgaggtcaacctatacataaaaatatggccaggcactgtggctcatgcctgtaatcccagcaccccatctctacaaacaaaatttttttttaattagccaggtggcacacctgtagtctcagctacttgggaggctgagatagggggatcacttgagcctaggagttcacgactgcagtgagtcatgattgcaccactgaaccctagcctgggtaacagagcaaggacctgtaaaaaattaaaaaaattttaaaagctgaccttaaaggtttgtagtgtaaataagtaaaacaatgtacatagagtgccaaggacagttgttaggcatggagtagatgttcaattaattatagttcccctatccttatttatactgcgtcttaaatctgggccataatgctgaaatgcttacatctttgaaaaaagattttccaaaggccaactaatttaatactattatccatacaggtttatctatgtagcttatcatttctagttctttaaacaatcctgagttccataaccaataaaacttgagtgattcctaagagaattcaacctacccaataacaaagaacttaatttatgatcactaggttaactagtaatcaatgagctaattaaatgcaggtagctcattattagtattaaaatacataaaacatctttattattttaggaaaaaagtttcaagactcagaagtaataaaaaaaaaagggcagttgctgatcattttgacgtgatgtttgtgcgacagcttagcaagtggagattgaaagtagatggttagcacttcctgtacctcccccttttgaccccccaccaggactcggtctgtgttaactgtggaatacacattgtaggtagagagtgattcctagtgaaattaaccaaacagccataggtgaaatgttttgcatcccattaggatgcaatgaattaatgcctactatattgttatcatctatttcctccaatgtcttaaaatttaatttatacatcttcttaacaaataaatgcctgtgtggcatgggcaaaggcttcatgactaaaacaccaaaagcaatggcaacaaaagccaaaattgacaaatgggatctaattaaactgaagagcttctgcacagcaaaagaaactatcatcagagtgaacaggcaacctacagaatgggagaaaatttttacaatctacccatctgacaaggggctaatatccagaatctacaaagaacttaaataaatttacaagaaaaaaacaaacaaccccatcaaaaagtgagcaaaggatatgaacagacacttctcaaaagaagacatttatgcagccaacagacacatgaaaaaatgctcaccatcactggccatcagagaaatgcaaatcaaaaccacaatgagataccatctcacaccagttagaatggtgatccttaaaaagtcaggaaacaacaggtgctggagaggaggtggagaaataggaaagcttttacactgttgatgggactgtaaactagttcaaccattgtggaagacagtgtggcgattcctcaaggatctagaactagaaataccatttggcccagccatcccattactgggcatatacccaaaggattataaatcatgctgctataaagacacatgcacacatatgtttattgcagcactattcacaatagcaaagacttggaaccaacccaaatctccatcaatggtagactgcattaagaaaatgtggcacatatacaccaaggaatactatgcagccataaaaaaggatgagttcatgtcctttatagggacatggatgaagctggaaaccatcattctgagcaaactatcgcaaggacagaaaaccaaacaccgcatgttctcactcataggtgggaattgaacaataagaacacatggacacagggtggggaacatcacacaccagggcctgccgggggtgtgggtgaggcgggagggatagcattaggagatatacctaatgtaaatgacgagttaacgggtgcagcacaccaacatggcacatgtatatatatgtagcaaacctgcacattgtgcacatgtaccctagaacttaaattaaaaaaaaagaaagaaagaaatgcctatgtacaggaagtgaatctgtaaatacacacttgcccatatgtttcgagcaggtgccagtgttgtcagagtaaaacacttcatttaactggaaatcattgatccagcaatatctatttcaagacacagcctagataagaggaagtaaacaaattcaaaatgaagacgggagcatagggagtggcaaaagtacgtagttgctgatgttacaaagcacctgctatatgctgggagctaggctgctaggcattttacatcttttgtctcccagagtgttttagactagccaacatggatgaggtagagttcacactcgaaagctaacacatattattcttagggatgcccttgtggtttttcatttattttagatataacatgaacatctttggtactctgattttcagccaacatcaaactagaataacataaggttgctaacgcaagaatactgatgagaacagggaatgacaagccatagcaaagagagggaaagaaaagaaaaaatgtacataagaactctaaaagcagcatcaaccaggacctctttgtgcaggggccagttatcttaccctcctcagctatctgtgatgatgtctcatccccgcacacacatttacactcctgtcccctgaggttttgtgggtaccattatgagggcaaccaaatgtgtaatatagttggaatggtttcatcagaacatcttaaaaaaattttaagtcgtttctatcagcataagggatgacagactaaaggttgtaatatagctttgaccagttcagaagtaaactctccagtggcttctgaaattactcaatgtgagatattatcgtgacccaatatagattttttacagctgtctattgttttcaactacttaacatattgaccatacttttcttccaaaggtaatcattatttagacattaattattaataatttttatcaactaaatataaaaaccttgagagctagattaaagactctgattttttaataattattataaatcacatatcccatttctgactttttgctagatttgtccagtgctaactaaaataactaaaatatttttatatagtatttactttaaaatttatattatttttacaaaagccctctaggtcctaatgaaatattatgcctcttaatggctggttaaggggcacttagtagttcacattttattccgtgtcttgaaaaataaatatttcaaagatagagtgaatagaagtgaataggatggaatttcttgttcccgatcatattgtctcaattctgttctgcttcactagtgaccgaaaaacatcccaatatggtggttgcaagccaaataggccaacaaaggctatatcccaggaatagactaaaaagttattatcatcctttttatccagccatgccaatctgaatcagatatttaattatactataaacacatctcatcttccaaaaaaaaaaaagtaaaagtacaccagataatatagcttgcatcagagcaagtccacatttattgatcagcctggcaagataaaagtagaagtacacacagcttccttttggacatatctgtaagatcagaaagctttctgccggttacagatattcacaatgagaatttgcagcatccagtttggaaacttagattttccactgctcttagcagaacaaacttcccgtggtttatctctcaaccgtctaatgagaaatcagacatttttccagaaaccactcatgtggagatctctgagcggctgtgagtccctctgtgtgtgtgcccttccctcctgcatcctgtccaatgtctcacagtccatatccttatatgtatatccttcagcatatatatgaagtagtcacagatgccatggatccctactgtgtccctgtatgctttaccttatttttcacaaggttaatattactcatatgttgactcttatgttgttcctttttttaaaattacaatgttttcagtgttcacacccatgtaacaaaggcatatcctcagctccgagggccttttagacaagtgtgcaaagtgaggtactgtgacctacacatcattgtgaaagacataaaagataaaccagttaatcaagaattgtatttttgagaaaggttgtctcatcagtcaaattaattttccctgataattacataattaaataattgtaatgttataatgccttcgtaatacattgtaatattaaaatatatttgattagaacatctgttcttatctgttgtttactaggattttgtttttatgatcaaatgggtatgactaacctatgtcacaaggtttcttatggaaaatgacaccaatctccattaccactggactccaagagtctgagatttctagacataagatttgttcctatgccatattaatatatcctaatatagcaaaccataattgttgctgaaagtttggagtcatacatacagattatgttgtttatttctgtaattagcagaaatctcagataagagaattcaaaaattaagcaggacaggaaggtcagtaagttcaatacccatcctgcccacatataaagaaaaggatggtctgaagaagagataaggaacttgccaaagtcctgtagcttgctggatggtcaagctgtaattccagcctgggcaattttaaccagtgtgtttttactactttcatctaaatgtgttcttaatcttcatattgttccagtctattaaactacttttccttttcattttcacttaccgtcttttgttttagaaacagcacttgatgtttcaattatacccactctggggaatttcctagagctggatttaccctagactatactctctgctccttggtacacacacgcacacacaaacacacatacacacatgcatacatgtaccccaccctcagaaccatctattgaccagatggctgggtgagttaaggatgcgtgagttaaggaggcatcgggtccaccaatggaaaagtggagtaccataagctctgggaatttccagtaatgtttaatcacttcagtgcttttgaatgctgtaatctagagtttacagcagtccataaagaataggattgcaggatcttaccatcagaagcgggcttagagattttacgttcaagatgcagaggttcagcaatattatgactacccagcactgcctagaaagctggtaatgaatagcagctagccttgttgccataaaattattcgccccaaaataagaagtgagattttataaatagttagataggaccttgtacatttctttcttgccctgaaaattacgctaatctccattaccaatggactccaagagtctgagatttctatacacaatgttttcattggttgagcaatggatgcttaatgaaattattttgactcgtgatttgactccctatttcctttgtgattatagattttataatacgtgcagttcatttattaaatgcatgaaatttattttacagctctatgaaaaagttgccctgcttctgacgaatttaggtgagtggaatcctttctatttcatagaactgtactgtgggctagagagtatggttcaaagattcctttctctaatactgctggaaagaaatagtccctttattttaaaattcatacaacaagttttttctttgccttcaacagaataatttaaatatgtctagtaatttttctatataaatctttaaaatctgtcacaaacattatctgtcatgagctaatgtaatttaaggtagattttctcttcatgcacaaaaaatagcattacaaaagtacatttgtataaagtatccagtataatttaggaaagtgttcatttgctattgcctataatttttgtttaattaaaaatgtatcaagtttttatggtatataaactcacagcaaagttagtttctttgaagactggaaggccaggcatggtggctcacatctgtaatcccagcactttgggaagctttggcaggaggattccttgagtccaggagttcaagaccagcctggataaaataacaagaccctgtctctacaaaaaaattaaaaaattagccaggcatggtggcatgtacctgtagtctcagctactccagaggctgaggcaggaggattgcctgagcccaggaggtcaaggctgcagtgagtcatgatcatgccactgcactccagaacaatctggtaaccagtaataacttgtacatttatcacattttcaaaataaagaaattgtcccaattttattaacaaggtattggtcattgtgctccatgcagtttgagaaaattacatgctcccgtccacaacttgctttaatgcattccataagaagcttgtccagaggagaaaaaactcacaaaagtgttcctatttttattcatcattctgacaacagatagcatttactgaaactttctatgagctggatacagagctaggcactttaccttatctcttttaatgtcattgaaatcttccatcaccaccagttcttgcccaaaaagatagaagaggtttatgtccatggaagaggtaactgcccattggtagacaatgtaccctgtggtagcttgatccaggctagcagaaatgccattggaggtacagtcctggtccatccacggtggggacacctgggaacctagctggtgaccaggagacctttccatgtaaccaggagttcagtagcagaagtgaaaccctttaagaaaaccctttaagaatcctgtgtctttttggccctccgcaacagtatggccttgtcctaaaactgacattttaaaccattttaaatcagatttactttcattctcccttcccttctcagacatgctccctaaaagcattttgagttataatttgtggaaatgaattgattaaatgaagtattaaatgagaaatcagacactcagggaatgtggaagcagacaaaatgctactgtattaaatacatttcattagacattgcttgctcatagaatgtagctcctgtgaaaggataaattcattcgacatgagatctctagctggagatttgatcttaagggcaaatggatccatgttttggttcacaccattatgtccagagaacatttgctttatggaagttgaaatatatggagatgagattggcccctgactgaggtcaggaaattataagacacagatggtgatatgaattaaaacctctaaagatgatgccacctccttgatatttgtccatgagaatggaaaatgggggataagggtaaaagcaaatgagtcaaatgctcttagccttctatgataggcatttgactccctcttaagcagtaggttggtataatatgagaactagaagttgagaccaaggaactctttggagctgggaggaactaagcctgcatagattaagaggaaaagaaaaggctactgcagagagccacgactgggaatgaggcctcgacagcctggctgtctatgctgctggctctccaggtatcctgtaagagtggaacagtctaggtattcaattctatcagattcttccatagccacttctcatgagacccttgttgggtctggtctgtgagcttgaggatcctatgagtggtctgttccaccacacgccatccgtgggtaaactggagtctcctgcagcctcctcaggactcctgcgtccccaccctgtgtgtgtggggagggaaagagagggagttgagaggggatgagattcagcctttcaaactctgctcaccttttgtccacagaacagcctcgcacagagtctgagtgggagaacagcttcaccctgaaaatgtttctttttcagtttgtcaatctgaacagctccacattttacatcgcattcttcctcggaaggtaagaacctgacccctgcacacctccccaagctgaggacagaacacttagaaggcactgactcgtggggacagagaagccctcccttagggtgatttatacaaagtgtaaaaagggaagagcatcctcctcccttctcttcccaaatctcaaaaccacctggcatcccagggaaatcatctccactcaaaactgtctgtgcaccttttgttgctaagataagcagaggaaaatagtttgtgcatgtgagtgatgcattgaaaacttctggcctctgtctgcacctgaatcaggcccctggctttcccacctatgacggcaggtggtacaacggggagggggctgtagcatgtcctggattcctgacttcacttaaaagggaaggacatcctgacaggaaagggggcaaaaatgggatacagaggatgctgggtaacttttaaatccagcagttatgaggatttgggaaagattccctgggtagtggtaatgtcgcatgaattcccttacatctggaggcatttcagaggagatgggaacctgggaaggaccaggtatagggttttggtgagatcaacacagcagtctctccttcatttctagctattccagcagcacaaaattctaggcaaatagttcaataatttttttaacagcatgactattactcagaaaaatcaaatgtgtttaaatccaggagtaaaacttctgcttacacaggtcagagcaattgatatgcagcagaaaatgttgaaagtccacagcaagcagcaagaactggcttctgctttaggcagcctgacagaaaggccagaagagacatgtgccctggagaattccagaagctatggttatgacagatctggagggtttcctaattcccccagacctactacttatagtagcagtcattcacattggagaatgtgctaaactaaatgtaatattcgctgaaagcttggacctagagcactaatggcttgtttttctctgtgtgttgaagatttacaggacacccaggtgcctacttgaggctgataaacaggtggagactagaagaggtctgtattctcccatcattccttgtttccgacagacttgcattaaacagccttagggcaactttgtgtagattataaaccagacaccctttcttcctctccattgattctggaatttctgtgtttgcttaccttgcagtgccaccctagtggatgccttattgatctgtgtatgcaaatgggtattataatggtgctaaagcagacctggaataatttcatggaacttggctacccgtaagtaccttagtatcaataattgagaggcagcattgctcattattggcttttctaggtgtggcaagtaagataagcaatgcagactcagcagttaagccagtgcgtgcacctggaactaagtgctcacatttagacatccaaaggcagccatgaaaatcataaacattggctcttctgggagatttagcacaattcacatgaacaaacgtgaatattctttaaggagactctttaggcccctaaatattggatacttgcttgtgagccactttaaatacctctgacctttcgggctccagcattgcaagtccttagctatgtatgacacattaactacatctccactctcccatcctcatggtaaggctggtgataagatgttgacaacaatgagcaaaaccttgcatcaacttggtaaggatgaccttgaattctgctgtgtttgctcagttatggtcagttaagttttaatggggacataaatcaacaatgcttctattctgctttaattccacacctattggtttccatgtcagctcaatgtctctgtagagacaaagaaaactcaaggtttcagggaggaccactcagccagaacgattagtgggaacttggttcacttcagaaaatcttttcttagctctctgtcagaaccaaagccagtaattttctgttcttagatttatttttagaaatcttgttccaagtatttgatgttttctataaaacttttaaaaaataaaacattaaacaaaaattatcagtgttgtattctactttaagatataaatcacaattaaaatgtcatagacatcaagagaattatattttatcttctgataataaggacatagagcaaaattgtaaagtaggcagtttgtctttgatgttcattcctttatttgcttcatttcccatgtgttttgttttttggcccttctactcctggatatccttcaactttttccttgtcctgtacagaacacagacctgcctccaatctgtcatttcctcaatgctttctcatattacaaaatgcactcctgaacactgctaagggttcctgtgctaaccttaccaatgccgggtgcattttactgggagtcagagtccctgtggagagctcatgccaaaagcaaacaagtccagttgtagaactgcaggtgtttgtgtgccaagagaggaagcattttgtgggtttgcagatctttaggcccctgatgtcagagtatacagctcagcacccatgtagcaagactgctcaagggtcctaaatcaagccacttaagccagatattcctcaagatatcttggtgttgcctttgtactggggtatccatttatagatattctcagtcctctattcaaccctcataggcaatgcccaacatgagacagtttcatgaatgattaaaacaagttcatcaatcattctgtttacttgcaaatataaatacttgaagtatagactccattgttattttcttcctaacctgaggctttatttctttgatagcctgtcctgaattttttcaaactattgtttctgtattcaaactctcctttttcttattacctaagtcatatgatcagttacattttttgtaagaaattgatctttttgcccaggttaattcagaattggtggactagaagaaaagtacgacaagaacatggacctgaaaggaaaataagtttcccacaatgggaaaaggactataaccttcagccgatgaatgcctatggactcttcgatgaatacttagaaatgagtatggaaatattctactttatcttattaattataaattttagatctccaggtatattcaactaaacatatacccgttatcatcaaggtcctcagtgcgtagggattcctaaggcaaacagagaggaaggcatgtcctgcttaaactgtgctacacttacatttaaggaatcagatttctctggaatcaaaccgaagctatttctcttagcacgtatctaagaccatgggctttggaagtaaattatctgggttcaaatcccagccctatcatttattaacggtgaaactttgggcaattacttaatctctctttgtctcagtttcctcatctctaaagtgggaataataataagaggaaccatttcataaagtctttgtgtggattaaatgagttaatgcatgaacatgacttagagcaatgcctagctcactatgtacttggtacatgttacttatatcattattattctcttattctttttgtcttctggagggaaaggcaaataaaatatcttagataaattaagtatgaatatattttctttcattattaaattgaatatgtatatatttcctttcattttaagctctaacataggagtggaaatgagggaagggctgggcaagaaccatttcttctaaaggtagcagttctttctggtcaaattagaaatttaaaggaatagtagaattgatgcttaatgtttcttaaattgcttatgttctaagtatctacttatgtctttagagtttcaattatagaatggaagaatgatataacctagggaagaaatcaatttggacattaaaaataaaacttaataaagagaattcattaagagaactaaccactttgagatccttaatggattcttctcccataaagaagacaatgaacaataatgttggtatattgagtgcttaaaaagaaccttttatgtggctagaatttggtagtgctccaaatcctgaagtatctttgcaacacaaaacaaatctcagaagtatcacaagcagactgatgagttctaactgctcacttctgttcttttgtttttgctattttcttaataacttccccactttgttatgtactttaaaatgtattcactgaagtataatagtggaaaagtgtatataagtgtagagaccaatgagtttttgcaaatttacacacaaatgtaaccaaatatatgtagatgagaggttggcaaactattgcctgcaggtcagattcagcccactgcctgtttttgtaaataaagttttattggaacacagcaactcccatttatttacatattatttgtggctgctttggcactgcaacagtagagttgggtagttgtgtcagaaagtggctggtctgcaaagccttctttatttctagaaaatgttgctacccagtgagctagatcaagaaatagaatattatcaatatcaaagaagacttctttgtcccctcttccatttataacaccctctctaaccactttcctgacttctaacaccatagattaactttacctttgttattctccatttaaatgtaattgtagagtacataccctttgtagttggcttgtttcattcaacatcatctttctaacattctcccattttgctacaggtagtagaacttcattttattgctgtatagtattcctagaatgtagaccaggagccaaattatgaaacaggagtttgtctttgacacccaccctcatctttccttagtcatgtgggtttttctgtttgtttgttttgttttgtttgcatttccactcccagatgagccccaactttgtcccctgctgccctgacacagcacacagacccctataccaccatcaatccctcaaccctccacatatcatgaaatgtactcctgagcactctaaataataatatgctaggtaactgcattttaacaaaagcaaagcctctgccaagcttgagtcaggaaaaaaaaaaaggcaaattcacttgtagaagtgaagacatcagtgagccaaaagatgagctattttgtgagtttgcagatcttctaggctcctgaataataatgtactgttattgaccaggcgtggtggctcacacctgtaatcctagcactttgggaggccaaggcaggtggatcacctgaggtcacgagttcaagaccagcctggccaatgtggtgaaacgccgtctgtactgaaagatacaaaaattagctgggcgcagtggcaggcgtgtgtaatcccagctacttgggaagctgaggcaggagaattgcctgaacctgggaggcagaggttgcagtgagccaagattgcaccattgcactccagcctgggagagagagcaaaactccgtctcaaaaaaaaaagaatgtactattatttatccatccattctactgctgatagacacttgtgttgtttccaaatttaggctcttataaataatacctttacggcatttttgtacatgtattttgattaacatacgtagatgtttttattaagaatttacataagagtggagttaggaggccatagatatgcatttgtttgtctttaataaacacttgaaaacagtcttcaaaactgggctgtgccagtttatactctggctaatagtagaacagttccagttattccacaaacttactaaaacttgcgttcgtattttagccatttgggttggtatgcagcagtatctcatcatgattttaacttgaaattttatgataactaataatgctgagcaccttttcatatgcttatagttatttggataaacttgtgaatttatattcaagcccatgttttttttgtgggtatctgtcttttccttagggatttgttatttatatattctggatatcaattatttgtcagatatatatgttgaaaattaaatatcacttctcagtggttggcttgacttctcattctaatggtgtgtttaaatgaaaagaaatttcagcttcattcttcttcaaaattgttgccatataagttttagaaccagatttctaatttctataaaaatcttactgaaatattagttgggattaaattgaactcctacatcaatttgaagatatttgatgtttccccagtccatgaaaatggtatacctttgcatttatttatgtctttttacatttttctcagcaatactttttgtagattttagtatataggttttgtaaaatttagattagagttgtttctaggcaccttaggaatctttgtgcaactgcaaatgatgtttttattgttttattttctaatgttttgttactaataatatacagaaatattgttgttttgtatgtttgcttatgcaaacttgctagcatctaatgtcaattagagttgcttatatattttttgagattttctaccatatatacataattgtatcatccacatataatgataactttacattttcctttttagtcattttatatatatatatatatatatatatatatatatatatatatatatatctttttgttcttgcctaaatgcactaagaccttttatataatgctggataaaattgatgatactggacatcattgtttctgacctgagggtgaaagtgttcaatatgttaccattaagtgtggtgctagctgtattgttttgtacatactttttattatttccttaaagaagttttcatatatccctaggttgctgagagttattatcatgactagtattacattatatcatgtcatttttctgaatctattgaaatgattatgtgattttttaaaaaattttactaatgtggtggatttcattgattattttttgttgttaaaaagttgttaaactaacctagcaaacttggaaaaaatgcccacttgggtcaccatgcatttttttaattactaagttcaatttgctgatattttgcttatgatatttatatatacattcatggaagatattatagtgtagtttttctttcttgtaacgtttcatttagatttgggtatcatttttatgatagccctttaaaatgattgggtaattatttttctcttaagcagtttacataagattactattatttctttcttacatacttggaagaatttacaatgaagtagcaggacttgaaattttcttcacaggaagaactttaattatagatttattttacttaatagatataggactatttcatttttttgtttcttctagcatctgttttcataagctgtgttttagtcatgtattttttcaagaaacttgttcatttcatctaaattttcaaacttagcagcgtaaaattgtttatatatctccttattaactttttatgtatctagggtgtatagtgatgccctttctttcacttataatttcatagtttgtgcttttctcccttttttaaaacagtaccttagaggtttattaatcttttcaaaagaaaaactaactttggtctttgttgatttttctctactacacatttgccttttggttcattcatttctgctcttatctttatttccctcctttacttcctttgggcttaatttcactttttttctcagcatctcaagatgctgattttcagattttctttttttctaatataggcattcagagctataatgttctctataaatactgctttggctgtatcccacaagtttttatatattgattttattagcaaaacattttccatttcccttgtaatttattttcgactatgcattttgaaggaatgcattagtatcaaaacatctaaagagttttgatatattgctctgtcattgattctaatttaattacactgttatcagagtatattctctacgttatttcaggcttttgataatatatatatgtgtgtgtgtgtgtgtgtgtgtatgtatgtgtgtatatatatatatatatatatatatatatatatatatatatataaataaaaagatttaccttatgctcctttataccatctatgttgatatatgtttcaagtatgttctgcatttagttgtttggtataatggtctacatttttatgtcaattaggcaagattggttaattgtgtttttcaaatcttctaagtccttgttaaatattgtgcctcttatctactagttacatacttgaaatccccaagtatgattgtggatttgtcttattctatttttagttcagtcaacttttgctttatgtattttgaaactgggttattatgtacatacaagttggattattctgacttactgttgaattggtgtttttatcattatgtaaagtaattattgaataatgcaacactttgaggatatgatgggcaggaggctgaagagctaaccttaaaacctttcaaagggcagaagtgagcctcttattgcctctcagagctaaggagatagggacccagcagtttctcaatcacagcaaaggaacaagaacaaatcaaaggtggagtaagctttacaaacactctatgccagcactagcccagcttaatctgtgaccagctttaagtgatttctcttatctgcctaacatcaccaggaggaattctttctttatggtagaaaagaacatcactgaaagcggagtatcacaaatttgttcctaaagaactagatagtaaataattttggctttttgagccaatggcaaaatcaaggctattttgtagacacttttacagccatttaaaatatagccatttaaaatgtaaaaactattcttagctcacagatggttaaaaaagaaaatcagatggttggtcaaatttggccacaggccatagtttgctgacccttgatctagagcctctacatgtgtggcatacaataaaaagattactaggtatgcaaaaaggcaagaaaatgtgactaataatcaagaggaaaaaggagacccaaagatgattcagaaattgggtttagcacacagagactttcaaatagctatgatttacgtataaaaatagaagaaaatactgacaaaaatgattgaaaaattaagacttttgaaagagaattaaaatctataaaataactctagaattgcaaaatataaatctggaattaagaactcatttgatatgtttaatagcagattgaggctgggtacggtggcccacgcctgtcatcccagcactttgggaggccaaggttggtggatcacctgaggtcaggagttcgagaccaacatggcgaaatcctgtctgtactaaaaatacaaaaattagcttggtggtgcgtgcctgtaatcctagctgctctggaggctgatgcagagaatcagttgaactgaggaagtggaggttgcagtgagctgagatcatgccactgcactccagcctgggcgacaagagcgaaactctgtctcaaaaaaaagaaaaagaaaaatgagcagattgacttagcgtaagacagtaaattagtgaacttgaagacaagtcaataaaaagaaaatccaaacaagcccagagaaaagaacagaaaaacagagcagaaaacataagaaacatgcaaaacagccaaaaaggctgaaatatttgtaagagaagtcctagaaagaattaaagaatgagaaaaagtgatatttgaagatgtaatgtctgagaaagggtaaattaaaaggaggtaaacttatatattagaatataaaacagttaaaagttgaactaggtctatatagatcaagataatatctcaaaattatcatgtgatatgaacagggcaaaaaaattgtaaataatgatattatgtaaagtttaggcacaaaaattatttacatgatatatgcactatgtataatttattgatatatggatattcatgtgtgtgtgtgtgtatatatatatatatatatataaatgaactggaaggatgcatgcaaaactcatgtcagcaattgtctctatgaagggagaggaaaccactcaagagcaaaaatagaggagaattcagttttatctatatagtatttattttatttataaaaagatattaagcaggtatgacaaaatgttaccaagagttaatactaactcttccatgggtatatggaagtttgttatatcattctttatgctttccaatatttaaaagttttttcccaaagaatttttaaaaattaatctacctctatgctacaagtctcttcccttgaaaaaaaaaagcagcagttaatgggcattaatcacttcaagaccaatatcatgtgggtcacctttgtgctatgtaaaaatgattggttggtttggttttaggccataatatttaactagataatgaaactcattaggtgtcagataaacaaaaactaccaatgaattaaacacattttctttttaaacttgcagttattttcattataaatataacctgaaagaactaaactctagttgctttttctgtccataacatccattactgttagtgattgtaagaattatctctgtcagttttatttctacctgataggttttctttgtgttctggccttcgttgtaattacatgtcagtcattgaaccagcattatttggtacctgacaagtccttcccatacacaaaacccctgtagtgagtatgtaggaaaaagaaacataaagaagttgctgtttctactttcatgaagctcactgcaaaaggggaaaaaggcaaaacgccgtaaaatcaagacaaagtaagttttatggtggtgagcagagttgtggcagctacagaggaggtagtagttaattacaattatgaaagactcaagagggtatatttgagtactcttgaaggtagaatgactacttcatcaaagtagtcatagcaacactgcatatatgctgtatccccataaaatcagaagactagtgtggccagagtagaggattgtttgggaaacctgttttctgtgtggggtgtatttggacatgaggcttggaagtttgcttggagtcaatttattgagatccttgaatggcatggtgaagtttcggatttattctgcagccagtgagaacctactgaaacattttgtgtagggagatgagtgatggggttgaaccaacattttaggcacactgacagcagaatgatagggaagggagctgaaagtttggaggcaaaaaagtcagttagaaaatcagagtctgaactcaagtggggacagtggagaggagggagaaatgagagacatttttgaagagtaattgtcaggactaggaggctaatggttctgaaggctaagctagcagagacctggtttttatgcaagttgattcagaagggaggaaacgagaagggacataaaaggataaatacgttcaaggatgaggttcagagattggtttggggagtgctgtttctgtagcattacagacaactggaaattccctgaaaagagtcagggttagcgatagagaattgagaacccttatcagagagataataatgaagtcataggagtagatggacttaccaaggaaagagagaaggcaggagaaaaataaaaccaaggttgaaacagaagggaacgcccacatctatttgtgggtaaagagccacctagcacaagcactaagtgtgaatgtgaccaaagacaggggacacctggaggtggcagtgtaaccaagatgaggtagatggactctgcagaactctggagctacaacgctgggattagagtcctttcttacttaacttgttttgggcaagttacctgacctctttgtgcgtcggtttccttacctgtaaaatgaggataatagtagtacccaccacctaaggttgtcatgaaaattaaatgagttagtgtatatgaagtaattagaacaatgcctgtttttacatagaaaatgctatatatgtgtagtcattgttttgttgttgttactttctaaaataaagtttgtaaatatattttttactatttttacagtcatatatgtatatatacatagtcattcaaacagccaaatactttttgtccatgatgcccagtaaattttatttttttattttccattatgatgactggttgttttgcatcagaaaccacctccttttgaaaaaatttttattttgcaagttgcaaaaagagtagtttctataccttacttttgctaatgttaacatcttacatatttattaaaacaagaaaagttaagaatacaatgctattgtctaatccacagaccttatttgaattttgcattttcccagtaataacttttttcttgttcacaatacttccaagatccagcattgcatttagatatgttgtctccttagtttcttttaatcaatgacaattcctcagtctgtctttgtttttcatgatcttgacatatttgcagagtatttgtcagtagttttggaaaagctccttcaattcaggtttgtctcgtgcgtttgcacaattgggttggggttattcatttttggcaagaataccacttaagtgatgttataccctcctcagtgcatcatatcggggtgtgtaacatcattatgtcttgttactggtgatatttactttgatcacttggttaaaattatgttttcggctgggcacggtgactcacacttgtaatcccagcattttgggaggccaaggcaggcggatcacaaggtcaggagtttgataccagcctggtcaacacagtgaaactctgtctctactaaaaatacaaacattagctggttgtgatggcgggcgcctgtaatcccagctactcaggaggctgaggcaggagaatcacttgaacccaggaggcggaggttgcagtgagccgagatcgtgctgctacactccagcctgggggacagagctagactctgtctcaaaaaaaaacaaaaaacaaaacaaacaaaaaagatgttttccaggttcctctgctaaaaagtttctgttttgtaattagtaaaagttatgtgaggagatactctgagaatctacaaatatcctagtttcttcaatacacttccccctactaattttagcattctttgatatttcttgcctacaaaaattattactgtgatgtttgactaatggtgattttttaattttcatagttcctcctatgttgattaattagaattctaccataaggaagagccaccccttatctcccatttatttatttaatcacttatttacgtaagtatatatttacatcagtctggacttagatacttagtctttgggtcataatcccatgctttcattattaatattctttcatacaaattgttccagatttggccgttaggggtgccttcaagtttgttctgtgtcctattggcatgtccccatcatttgttgagcatttccttcctttctggcatcacaagatgtcccaggcttctcttgtattgtccctaccgtagctctggaatcaaaccatcctccaaggaacactgattcctttggttagagaatgatatttaggaaacaagatctggatcctaggtgtgctcatagctcccaggattccgttgcttccaggcccaggaagtgcctctttttccagtctcctggccatctttctggaagagatatcccctgtgcgtctgtattgggaaaaatgggacttaagacaataacatattcagattatgatccctttgaaaatagtaatggaaaaccaatactctctgctctttttccttttttcttttctagttcttcagtttggattcacaactatctttgtggcagcttttcccctagcaccacttctggccttactgaataacataattgaaattcgacttgatgcttacaaatttgtcacacagtggaggagacctttagcttcaagggccaaagacataggtaagttggatttgggtatgtttttaaaaaacatattaaacatctggtggataaaattttaaaagccacaaactttagatttttaattatgttttccatttaatataattcacctaatttttgcaaagaataattatattagttttaaataatattagacaagaagtaaagctacctatttggaagtttataatttccagtgctagagaatttgtgcttaaatagagtctcaatttgattatttctatcttaagattctagaatctaaaatttagatttattatcacttatatcctttttaaaatagatcttccatttgcttaaccttgatttgttctttcctaaatgtttgcctgatttacatgaagtataatccagtttttctaacggcagagatgaactttggtctttgactagagatgctaagttgaatcagatgcagctcgcatgagagctgcctgagatcaaagactgtcttttattcatttctgcattcagtgcttagcacagagcaggcagtcacccagccaatatgtgtggaagagaattgcatgtggatgttattgttaatgacgtcttttaacctccacatgaaacaagcacacattctgtgagcacctaccctgggtcagtgtgttattggcagggcccacaaagatgaacagaagggaccaaatccatacccttaaggagctcccagtctggtggggcttgacattatgtgtgctgatcctatcagatggtattttggtgccttatcattaaccagaattctctgcctcatgtctgatcctgactattaagtcacaagcatatagacactcccatagaaactccctcaatgccaagttgtttgcacaaatctttcctcctggttgcaactgtcagtatttggaaagatgaagaaaggacccatgaaaaggacttttaaaaattaattccattttttcataattatcacctctgttttgtgtatggaactaacacaacacttctatttgaataggaatttggtatggaattcttgaaggcattggaattctctctgttatcacaaatgcatttgtcatagcgataacatctgactttatccctcgcttggtgtatgcttataagtatggaccttgtgcaggccaaggagaagctgggcaaaagtaagtttgctataaaaccactatacagtttctatttcctagccattttttgaggttggacactcagacagaagactgcactggagaatatggaatacatgcccagaaggagaggcctgtgataggggaggtggaattatgatttattataaataataataataacactgtcagccaaagaaaacatgtcctcatctaccaaagagttggaggacatacaagtcagacaggttttagatggaatccaatgtaagagtggcaattaatcattttccccacccctgacctctgcccactatgaatttagaaatgtgtgatatgctaatgtgtataccaaaacagtagcatatgatgtatatatagttatatcattttatgagtttgcaaaaggacagttacaatctgatttacattgtgtcattatgtgtaaactctgcagatcttacataggaaatacggaactaggtactgagtacccagtaggtcctcaataagtattcgtggaataagtaagtgaatgactttttcatgggtattgacctgaccaatgcctatattaccccaagcaagctgagtggactaaactccttgggaggatcaattctatggcattgcctcaatggtttgcaaagccagggcacgctatatatggtcagataaagataagtcaaaattataacatcccctagtttcattcctgtaccttggagaaagggcaagaagtcttaacatgctttaaaaatccctgtttggttaaagccaaaatagttaaactcttattatgggattttgatgtctataggtcagagtgaggtgtgtttggggatcacagggtcttcttaataacccagaaatcaccctacatgggctgctgtctacttatacaagcagccctggtttactagcctgagccagattgattcatcctctacagccattgtagctgatcgaccccaaggagttaagtgccaccaaagcaaatcaactgaactcatgcaaacctggcctgggtccaattcattatgaatcctacataaatgggctaaggtgtggatgattgaggaatgtcataaagctcacaatccagttatttgaaaaggcttctgtaaagttcttgactactataagcatgtggccatgacacactaattatctagcaacttttagtgagcataccatcccattttaagagaaatgtaaagacatgttattttgcccaggcatttctttctaattgcaactatcgttgacattctctgcttggcttagcctgaaaaagcttactttcactcaaaccactttcacatgtgtttttagttgattctcaaaacagccctgggagtgggatgtgcattataatcttcactttgaggagcaggaagagattaaaagaggttaagtccagaatcacaaggcatagtaactctgggagcccatgtgaaggtggagcctcgactcactctccatcccgcacctcacagcccttgaggctgtcccttaacagtaaaccccctggattttccgtcgtaatggtgtttcagttctttcccaaattcaaatatggtgaaatctatcttgttttagggggaaccaaaaacaaaatgggaacctttatgcacaattgatagtgaatcaaagatttagaattttaacaacctggtagatttaagacaatgtccacagtgattaaagtgtatctcatagcctccttgtatcaattttactgggctctttggagcttttcttttctttctttcttttttaacctttctctttgacttaggagccttctgccactttcaatttatggatctgccttttgttttctaatccattagtcatttttcatgttttcaagtagttaaatttatgtatgtttcttcatgaatcttattttctgcctcactggccactctattacttttcagattttttttatttttccaatttagaaatgctttagaaattattgaactcataagagtagcagaattgtcaaggtatagaaagtcataagcctttagggtagtacagtgattgctggctcatccctttcttatgtattaaaggattgaaaattataagtggtgagtggctttcacggtagaattctcacatttaaatgagtgtgtggtcttctcagaagttacatggaagagatatgcatcctaatccaaatggcactaccctgtagaagacattttctagatctttcttggaagtgcctacagaggccatctaccattcctttaagaaaactgactttatattcacaggaaacccttcgtctgttacttttttcttggtacttctcaattctccctgatcatcagtgtagcctcatctccctctgtctcattgagagctggtggtgggtcacagtgagggtatatagcattcctgccagtaaacccagtgatagacatgggctctctactacctgtgaccttcctgctataacaatgggtcagtgagttgacacttgcatgccactagctgaattttatacagcaaaatgtgataaatctcacttgcctgaattgatgacaactttcactatttgatattgacaatagctaacagtctacaaaaggtgaaaggaattagtgaaacgtctagctgtccgtgcatcttttcccccattatggaaatgatatggaaggaagatgtacacagctgataactgtgtgttcctgtactaggtacacatttaatgctttgcactcaggagtaaccaccctctaaagacacattttcaacttggatttatgactgtcattcatgcattaggtccatgaaacaggtgttttatttaaatttaaattttcttaatggagtttttgagcagaacaaccaatggacagtagcgttagtcttgataaagcctcggggctggtctgtgagataagagtgcaggaggggttatgaatattccatttcagtgctgggcctttttttttcaccagttcccagaacacctttcccttcccacagctcagatctctagaaagactctgctaaaacttactccctctctgtgacagctaatcatcctcaaggcactaatttattttcatgtccaggtctagacagttcctaggtaagggagacatcattccaaattaccctttcagtaggggagtcctgctgccagttggattaaggcatgttacacactccctgaccatttgttttcacccacgagtgacttgacaaatgggtccttcagcttggttcattttttttaaggccatgataaagccagtgatttgtcttgagcacgataacatgcagaacccatgtgttctcagaactgtgttcatgtcatcattttggtttagtgttcagcagcttggaataatcatgccagacttgttaatgaagagaatctgaagatcatgatttattcattcaatcagtaattacttattgaccccctgctagatgcaagaaataaataaaatgaataatcaccactcatgtttatcttacttataggctaagatcttatcacatgctatacattcattgtttaatataatcccctcaaggaccctatgaggtgggaacttctgtcactttaagaagttacgtaaatcgggtgtggtgacacatgcctgtagtcccagctattcaggagtctgaggtgggaggatcgtttgagcctgggaggtcaaagctgcagtgagccatgatcataccactgcactccagcaatgagcaacagagcaaggccctgtctcagaaaaaaaaagaagaagtaagaagttatataacgtgccaatattacatgactagaaaccagcagaactaagatttgaccccaaaacccaagcttttgtatgtaaaacactatttaaagaaaaatgtatacaggatgtatctaagtgctaatttcacccaaagtttcaaacattgttatttcagtaagtgcatgtgttaaccacaatgttcaatatgtaaaactgtttagagacttggagaaaagatgtttctaagagtgctacttgctatgatacttttaaaatgggctttttcttgaatggaattattgacagaatgattaaatcttgattttatctacccattcaatctagaatgatcaatagaatctcatactttagtttcctccaatcagatcgattcaatatttatgggattcctacactgcacaagactgtcctaagtcataggatacacaaatacctaagatacctgctctgctcccaaaaaattgcagtccaaaggagagggcatacatatatgctgccaactctagtacaagcgatctggtaatggtgaactaagtaagtatggtggcactacagagagagggaaaggagtgagatgttgtgactggagtgattaggttgtcttcctagtaggagtggtgtttcagttggccgctgaaggataaatactatttccacttgtaaaggaagaggtagggaattctaacagaaaagataacaagcagaggcatgaaaacatcagaagctttcagggaatatagtctaacaggactgtagcatgggatatgagttggggggatcatatgcacaccaatcatatttggaacattttgagaatatctataaatatatatgaaaccattaatgaggaactgtgtttatgtgtatcatcaacaaaagaagctgtggcttacatacaatttatgcccatcatgtaatgctgctttttacctatttcactgaaacattaattggggtagagatgttctatatgatgattctgcagaaaaaggatgagaaccaaaacaagcaacttgttcctgattcaacatgcccagggctttccagcgtatcccaacctgagtcctggttgacaaggaagggccagttaaaggcatttacaattgcagtgacgtctgggaagcagggtcttcagggaactggatacagagaaggtgatgagtgttctaatggtagaatgtgcctcctcttataggtgcatggttggctatgtgaatgccagcttgtctgtatttcgaatttctgactttgagaaccgatctgagcctgaatctgatggcagtgagttctcggggactcctcttaagtactgcaggtgagtgtggcacccagcgtggctctgcctgagctgggctggctccaccgtggggaggttttactctgaaggccccttctggctgagtgtgtttaaagcagtgactgtcaatctcaacagtgcattaaaagcacatgaagaattttcaagccttctcttgcccgggatacaacccaaaccaattaaaacagaatgtcagggagtggaactcagaaaccaggtgcagtcagaattgagaactgctagcttaaagggaaaaactaaaaatatagtagtgaaggttataccgctgctccagggactcagggacagacaatccccaggcgggttgagcgacagctgttgagggcacttgtctttgttctgcttctctctcttgcccagagtatatcacatcacatttctaaatgttaaacaactcagaagcctgtggaaagaggcccagttcatttcaggttccaccacagtagcctctgcaacatgtgctcattctctctttctttctctccctctaaaaggaaatgaattaaactgtgcctcttgatgtgtatctatacaaacgtacatgaaggagaatttgttgagcacctactctgtgccagaaactgttactccatttaatcgtcacatcagccttctaagttaggcaatattatctcatctgacaaatgataaaaccattcactaaaagctcaatgagattacttgtgcacagttcttgaagagtccagatggcacctttttctcttaatactttgacgttataagaattttgtgggctcacacctgtaatcccagcacttgaggaggccaagttgggaggatcacttaagtccaggcagtcaaggctgcagtgagctatgatagcaccactgcattcaaactatggagcaagaccttgtctcaaaaacaaaacaaagaattttggagattccctatcatgacattctatgttctccctgtaatcaaagccacaaggaagaacagccatggagtcctagatgctttgacatagggacttttgtaatgatccacttcagtccctcatcttacagaaggtgaaggtgagagaagccaggggctccccatttctgtgcagtgacagcataccctccacccctttaaacactcatgccaagttcccaggtctcattggctgtcacatctcatcagatggcttatttcctttcccacatggagtaacaagtaagatggggagaaagactggctggaatataatctagtgccgctctctgttggggtctagtggagaagcaagcaattaagcaacaattgatactttcttcagtagatttcccacttgcttgtccagaccatttcgtacatgaaattatttagcaagcattgttagacatatacaggatcctaagtatgaaatgcttcaaaataaaatgccaactattatttggagttaaaaactttgtaatcatttgaaaataagataaaaatacagagtctttctcctcttctgcttcctggctcataattcttcctgcctgtctcacatagtatcataaaagtatattccagaaattattaatgtgaatggaggtattaatgctggcaccattaagttaaattatgattgttttgtttagcatttttcttaaaagtcccccaaagaaaacattttaaaatttctaattaaaatcatgtaaaataatattttcaggtttgttttcagtcatatagcaggtgaggcacccagatcagcttgcgggctgaaaatatctaaacatgtagagaaaaatttaaaaacaccttctcaaatacattaatgacctgggaagaatatttggtattctaaggcagaaagaagtggtacacagagcattgcagccaacttttacccaaagggaatttgctgaagtgagtggactggagctttctttttatttatttatttatctttttatactttaagttctagagtacatgtgcacagcatgcaggtttgttacatatgtatacatgtgccatgttggtgtgctgcacccattaactcatcatttacattaggtatatctcctaatgctatccctcccccctccccccaccccacgacaggccccggtgtgtgatgttccccttcctgtgtccaagtgttctcattgttcagttcccacctatgaatgagaacatgcggtgtttggttttttgtccttgagatagtttgctgagaatgatggtttccagcttcatccatgtccctacaaaggacatgaactcatccttttttatggctgcatagtattccatggtgtatctgtgccacattttcttaatccagtctatcattgatggagctttctttttcaaagctttccatggttagggaaagtgaaagaaaatatagaggccaggtgcagtggctcaccctgtaatcccagcactttgggaggctgaggtgagtagatagcttaaggtcaagagtttgagaccagcctgggcaacatggtaaaaccctgtctctaccaaaaatacaaaaaaattagccaggcatttttgtgcacacctgtagtcccagctacttgggaggtaggagtatcacttgagtctgggaggcagagattgcagtgagccaagatcgcaccactgcactccagcctgggtgacagagcgagattctgtctcaacataaaagaaaagaaaatataggaatgaccagcctgtaagtgtatacttatatgctatataaaacaaccataatatagtcacactagagtctattatacagcaataaaaataaaccacatgcaataatgtgaatgaatcttagtgacataatagtaaaaaaagcaagccccagcaaactacatatagtatagtaccctttctataaagttcaaaaacaaactaaatagtacaatattcagacaaatgcatatacatataagttaaaaataaaaatgaaattcagggtaagggaagcaattgatgtaagttcctggtaatgttttagttcttgggcttcatagtggatttatgagagcttgttgtattattaaagtattactttaatggagtcacatggattaaagttctctgaatagtgcctggtccccaacaggtattcggcaaacatttgtggcattttatgccgactcaaaagtgatagctggaggatacattaggaaggactcttctagtggcaagtggcagaaatccagggtaaactgacttaaacaacaaaaaattgttcagttagctgggagagtcaaggggtgatatgagcttcagtaatggccggatcccaggcctcaagcagtgtcagcaggatgctgcctctctgctgtctctgctttgttttcttgacttccttctcaagcaggctctctctctccatacaaggccaccaggagtcccaggcttttgccttctgtgggcttagtgatcattcactaagtgatagttctggcagacatcttgatgatgtcactgatcaggtctggctcatcttttgagctgagatcaggcaggtggagggggaagtcctagtcaacccacacagatgattccccagagaagagatattattttatcagaagaaaaatgctggacaagcaaaacaacagatatctagtatagagaaacttcaaatttccctcctattgaatgaggactatataatgagaatggaagagatttgagaatcagaaaaatcatagtttgaatgcaacatttttctgtgtctttatagataccgggactaccgtgacccgcctcattcactggtgccctatggctacacactgcagttttggcatgtcctagctgctcgattagcttttatcattgtctttgaggtaagtttcctcagccaaattctttatttcctttgacataatgaagtcagtaggagtaatgaataaaaataagtgatggggattttgaatgtgattatctatatttccagaagtagtagtgtcatattatgtaacctctttttgatcttttttcttaattgaagtatttgatttttccaagacatatttgaaagtccatagttggtttttaatggacaaatctgaactcgttgctcctaaatgtaattttctggggccatagttcttaaactttagcaaaaatgcagtttttccatcctcactcccagatattctgacataccatgtctgtggcttgtttttcatgagctcgttgtaatgattctgactataggcattctgggaccataatttggaaacatttggaaaacatcagcccagtaagattcattctttttttctttttctttttcaacttttattttagatacagtgggtacatgtgcaagtttgttacaaagttacattgcatgatgttgaggtttggggtgcgactgaacccaccacccaggtagcgagcatagtattcaataggtagttattcagcccttgtcccctccccctctcccctctatagtagtccccagtgtctgttgttctcatctttatgtccatgtgtacccagtgtttagcttccactctaagtacgtacaataagaacttgcagtgtttagttttcagtttctacattatttcacttaagataatggcctccagctacatccatgttgctgcaaaggacatggtttcattcttttttatggccacatagtattccatggtgtatacataccacattttctctatctggtccaccattgatgggcacccaggttgattccatgtctttgctattgtgaatagtcctgtgattgacatatgagtacatgtgtctttttggtagaatgctttattttcttttgagtatatacccagaaatgggattgctgggttgaatggtagttaagccctttgttctttgagaaatctccagactacacagtagttggactaatttacctttccaccaacagtgtgcaggtgtccccttttctctgaagcctcgccagcatctgttaatttgtttactttttttttttttttttttttttttttaagactgattctctctctgtcgcccaggctggagtgcaatggcacaatctcggctcactgcaacctctgcctcccaggttcaagtaattctctgcctcagcctcctgagtaggtgggattacaggcacccgctaccacacctggctaatttttgtatttttagtggagacggggtttcactgtcttggccaggctggtcttaacctgacctcatgatccatccgccttggcctcccaaagtgctgggattacaggcgtgagccactgcacttggcctgactttctaataaaagccgtactgactggtgtgagatggtgtctcattgtggttttgatttgcatttctctaatttccttagagattctgagcattttttcatattattgttgtctgcttctatatcttcttttgagaagtatctgtttgtgtcctttgaccactttttaatggggttatttgttttttacatgttgatttgtttaagttccttacagattctgggtattagacctttattgggtgcatagtttgcaaatattttctcccattctgtacggtgtctgtttacttctttgacagtttctcttgctgtgcagaagctctttaattagatttgacttagcaatttttgtttttgttgcaattgcttttcaggacttcaccataaattctttgcccaggccagtattgagaagggtatttcctaggttttcttctagcatttttatagttgaggtcttacatgtaagtctttaattcatcttgagttaaattttgtttatgatgataggtagaagtccagtttcattcttctgcatatggatagccagttatctcagcaccatttattgaacaaggaatccttcccccactgcttgtttttgtcaagttggagattcactctttctaaatgtctccaattattgccatcatcattaccacacatattgaaatatactgattcatatagttaatttatgattttcaaatagttatcaggatttcccaacatgatcataagcattttccaataggactgggtattacaagtggtatttctggttgtgtatcatcacggaattatttatattcaagcatccaagtaagtatttattagctaagactcaaaatggaattataaagtaaaatctgtctagcaattgtctatattatatgtcaataaaaatatattatctattttctttcagggtttaagaaaattgctgtaaaaatagtttgcatttctatgactctagtcataagtggaaatttcatctcttgtcacatatattaaagccagattaataaaagccaaggttgcctctcggcttggatctaaagtttcctagacctcttcaagactattctatcactgctttttccttcagtccagggaaccaaaagaagaaaatattaagctgctcttccctggaaattatcttaccaatggcacactctctctttaaagaagatatttttaacccatcactgtcttaaaatttttcagacaaaacttcttgttgtttgtttgggatttttttattttaagttccagggtacatgtgcaggacatacaggtttgttacacaggtaaatgtgtgccacggtcatctgctgcacagatcaacccgtcacccaggtattaagctcagcatcccttagctattctttctgatgctctcccttcccccacccccacccccaacaggcccctttgtgtgttgtttcccaccatgtgtccatgtgttctcatcattcagctcccacttataagtgagaacatgtggtatttggttttctgttcctttgtcagtttgctgaggataacagcttccagttctgtccatgtccctgcaaaggacattatctcatccctttttatggttgcatagtatttcatggtgtatatgtaccacatttttttatccagcctatcattgatgggcatttgggttgattctatgcctttgctattgtgaatagtgctgcaatgaacatatgcatgcatgtatgtttataatagaatgatttatattcctttctaataagcgccatactgactggtatgagataatatttcattgtggttttgatttgcatttctctaatctccttagagattctgagcatcttttcatattatttttggctgcttgtatatcttcttttgagaggtatctgtttgtgtcctttgccatacaagttatagaattgctgggtaaaatggtatttctgcttgtaaatcactgaggaattgccacactgtcttccacaatggttgaactaatttatactcccaccaacagtgtaaaagtgttcctttttctctgaaaccttgccagcatctgttgtttctggacttttaaataatcaacattctgactggtgtaagatggtatctcattgtgatttttatttgcagttctttaattatcaataatgttgagctttttttcatatgtttgttggctgcatgaatgtcttcttttgaagaatgtctgtttatgtcttttgcccactttttaatggggttgcttggtattttttttgtagatgtgtttaagttccttgtagactctggatatcagacctttgttagatggatagattacaaaaatgttctcccattctataggttactgtttgctctgatgatagtttttttgtgctgtgcagaagtactttcatttaattagatcccatttgtcaattttttcttttgttgcaattgcttttggtgttttcatcatgaaatttttgcccatgcctacatcctgaatggcattgcctagattttcttctaggatttttatagtttggggctttacatttaagtctttaatccatcttgagttaatttttatataaggtgtaaggaaggggttcagtttcgattttctgcatatggctagccagttctcccaaaaccatttattaagtagggaatcctttcccccattgcttgtttttgtcaggtttttcaaagatcagatggttgtagatgtgtggtcttatatctgagatctctaatctgttccattggtctatgtgtctgtttttgtactagtaccatgctgttttggttactgtagccttttagtataatttgaagttgggtagtgtgatgcttccagctttgttctttttgcttagtcttgtcttggctatttggactcttttttggttccacatgaattttaaaagagtttcttctaattctgtgaagagtgtcaatggtagtttaatgggaatagcattgaatctataaattactttgggcagatggccgttttcacaatattgattctttctatccatgagcatggaacatttttccatctgcttgtgtcctttctgatttccttgagcagtggtctgtagttcttgaagaagtcattcacttttcttgttagctgtattcctaggtattttattcttttgcagcagttgtgaatgggagttcatccatgatttggctttctgcttgcctgttgttagtggttaggaatactaatgatttttgcacattgattttgtatcctgagactctgctgaagttgcttatcagcttaagaagcttttgggccaagatgatgggattttctagacacgggatcaggtcatctgcaaaaaaaagataatttgacttcctctcttcctatttgaataccctttatttatttctcttgcctgactgcctgggccagaacttccaatactgcgttgaaaaggagtggtaagagagggcatccttgtcttgtgccggtttttaaggggaatgcttattgagaatttttaacatgaagggatgttggattgttatcaaagaccttttctgcagctattgagataatcatgtggtttttgtctttagttctgcttatgtgatgaattacttatgcttatgtgatgtttactgatttgcatatgttgaaccaactttttatcccagggatgaagccaacttgatcatggtagataagctttttgatgtgctgctggatttggtttgccagtattgtattgaggctttttgcatcaatgttcatcggggatattggcctgaagtttttttgttgtctctctgccaggttttggtatcaggatgacactggcctcataaatgagttaaggaggagtccctcctttttaattttttggaatagtttccatagaaatggtatcagctcttcattgtacctctggtagaattctgctgtaaatctgtcagacaaaactttttaaaaggctgccttatttggcttttcaaatagaattttccattttcttttaatattttgttattaactatttgaaaatatgagaactatgcagaaaagcttcttaattttgtgccatccatgcatcaccaaatttatcaagttttaaataaaacgaagaatacttagcagtatcatttgaacatgatttagtctctatttaatactttagaattgtaatagcccttaaattgtcatctagtacttccttggtcaccattatatagatgagcagaagtgacagtgactctagaattccagctattagtatttcaagtaaagaatttgtgactgtttaccaaaaagaaaaaagcttcttcctgaaatgatcatttccctaggcccactgataattcttataaccaagatttgtaaagcacttgacagtctacaaggcatttttaaacattttctcataattctcacaatactcactttatagatgaggggaatgaggctcagataaattaaataattcatcctcaggtagacagacagcccttaagcagtgaaagctaccagcttcaacctgggttttctgactccacagaatacattcttctggctctcctttgaattaattatctgaccattcttttcccaccttccttccagactcctctttctattccttaggtggtgccatcagaccagttcaggcctcacctgtcctatcatcttgcattacacacgcctcccctggtcactttgcactctccacataccccagagggtccacatccttcttcagccaactctctaacctcattcaggatgcacagtagacctgacgctgttacattctcctctgttttagcacctcgtgttttgtataaagcacctcatttcatatctgatcccagacctcccaaaagacctaagggatcgaatgagaagagagaagtacttgattcaggagatgatgtatgaagcagaactggaacgtctccagaaggaacgaaaggagaggaagaagaatggaaaagcacaccacaacgagtggccgtgaccatgtaggtgagaggtgtgctcagcgtctgaggccattccgaggttgaatgggtgctttaaactccctgaagcaaagcttaccattgttgcagtaacagggatcaaaataaactccttagaagcttcccaatccaaaagaagcttgttttttactttaatcgttgcaaattttgcttgatcttcccctcccacataccttctgcaacacttctctgccttcttgccagactctggcctatcagtcaaggtcttcatgaattggcctaggagttccctgaaacaaagcgtcctctctcttttcctccagccgggctgttttctttaatatccccagggaaacatgccccttctttctaggtgggtgggaggcagacattagcaaagagaattcttcctgaaagcctcagcggccagagaccaaggtgcaacagggctgtcctgggctgcaggaccagtaactgatgaagaatttcttctggccccaccactactggctgctttcttcccaaaaaggccatttctaatttttgcttgaaagcatagtatctgcctgcctgtttctatttccccaatagttggcaggatgtgatgttgctttagactgcccttctgactcagtctgttcacccataaagcaagcataaaaatgtttataccatccctgactccatttggggttacaaattctttgaatgcctttggtgcatggtaagtacaaactattgcacctcatgttttaaagcaattgtgtatgcataagatctttatgccttcttttctctttccagaaaatagtccctttccaggccaaggacctgaattctgtttacttcttctggctgtgcaaaagcacactcaagtgaatgactaaaaatgcaaccacagtgcatgttgcagataccggcggccgcaggaggggcagcatccagtagaggactggcgttggagtcacactgctgtgaaatcacgttgcagtccagcgcacaattgctatctatccatagaccattcttgaccaagcaagcatgcacattatgggcagttacattctcaagtttttaaaatcaaggggaacttgtatactgggcctgtttttcagcctgtttgctaccttttttgcattctatcccatgtgaattttacagacactgggctaaaaagggtattcagacacatggacacacattcctagaatgtcatcatatggtcctaattccatgtcaccaacaacacagacaagaccctgtttacaactttttctttccttttttttaattttagacctttctgagaagattattatatatgacatatctatagctatgtgtatggccatagatgtatttctgtgtgtacatatgtatagtcatgtattcctgcatatgtacatacaaatacagagatatataaagtacatagaaattccttacttgtaaatagccaaaaagtactgacatgagtgaattttcacatttaaatagtcatcaatatgaagccatgattaatgcttgtataatgtgatgcaataaaatttaaaataaatttctgcacatggaatattttcagctg

SEQ ID NO: 15410 - DNA, 107041 bp, Homo sapiens
tttcactccggctcgctctccggagagtcctgttccagacttctcagggtttttacagcacaaacaactgcatacggcccgaggggaggctgaaaaggacttgtgtgtggtggttttattgcctgtcatcactttgctggcctcctcccgactggagcctggaggttcacagtggatttctttctgccgaagacaccaaggcactgaggaaggatcccttctccttctgttgactctttctatttttatggtaagtgcttacgttgaatgagctgctctgttgctgcagtgaactgaaccgttcgttccccctcttcccagctaagcttagtgaccttccttctgcatttcctctgttttcatggatcttgtctgggatgatccagcttcaaaaatgccaggggtcatttgcctggagtgtttgtctttttatcttttttccataaacgtgagctcttctgctgtgatacgaatataagtgctctgtctttgtccttgaagcagcagccggggaaatgtgttcacgatggtaaactgcagcagcgtgcagggaatctgtggaggatgactgacaaatttgggcaggatgaatcctcagtgtgccaggggcactcactcaggatcagaagggccgggggtgacctgcccacatagcaaactcttccatctttgtggataaagatgagcacacacgtgtgagttatgttgagtctgctgtgggcagctgtgttttctgcacctgcccgtgtgggtctgggatgaccctatatcttgtggggtttacaacttgggcaggaacattctcagcaggaggaatcctgagctggcagacggagtagactgcatgacctcattgcttctttcccttctgagtctcagggtacccagttctgcaaaccatattttacaggctcttcagagagtggtagggcagtgatgacaggaacatttttgagttgacaacatagttttgtcctcctgctaggagataaaatactttgaggttattagaatggttagacttttctaggagaacataagcaggtttctgacgaagactatggatgtggcagattgtttattccagggacattactcttacaatagtgctctaatttttcacctggtctcctgaggtttgctgcaaagagcatcacaacttcaagtctattactggcagcttcttgacgcccaaaggaaaccaagaacattttattagtttcactcctgtgcgttgcaggagtctctcttaacagggattttttttttttttttttggtagcaggtgtgtcgaactattttggtcaaagcatcattccaaagaatagcttcgcagttgtaattctatttagttattttcaagtcttggaccggaggtgggttatcttatttgtgtaggtttttccattctggtccatttcactctagagagggttcttgccaaatgtaattcagtctctgattcataaggtactgaactaatacaatgtgattttttgtgataagtgaggggagagaatgtggggtgaaatttccagtctctcctcctgctctttgggagtttggaatgtaaagttccctaactgcttgctcattttcactacttttatgtcccctgttcatgtggatttttcttgaaatagtggtgatgacatcagacatatgcctttaccttcttctctgggtccaaagtagatgcgtttgttgttgttctgtttttgtttgttttttatttcagtgaagggttccttgcatttgtaaaagcatacgtttaaataaaaaacaagaatttgtagatgtttacatgttagccctgttcaagagtaaaaccagcacagaggttaacagcaaaaaaaaaaaaaattcaaaacaatttttaaaatattatcagcattgcttggcttagctgttctaatatccactcttccctacactcgattgtggttcgcggcaatactgtattgtaatttgactgtcagactgctctgcttcctctttaattctttaatgtttagctgtttactttcatccttaatggtgtgttcttactttgcttaatctttttttctctttttctaattgaaaggatgttatatagtgcctggtaactcaactgaggatactcattaagatggaaagtgttagaatcagcttgggtgtcatggaaatagactcagtatttctcactgcaggcaatttcagaatcatttagaacatatttcattttaattagtagcaactttagccttgagaaaaaacattatttaggtttcctttattttgctaaacagattgtgtacctatgcaatcagaattgtatatatatgtgcaattgtttatatatatgtgtgtgtatatatatatatatacacacatatacaagcgtgtacacaaatgtactgttgtttgtactgtgtcaattgtatatacttaaaaaattgttgtagcatgcccatttggagaacagaaggaaaattcctcagatattgctttaactggcttttttttttttttggtaaggatttccccacttcctagaccccacttccagataatgcctttaagaatttctttgaattgggagagtgcatttttcagcatttccttgtctcacagcatggtgtcatgttaattcctttgcagggtctctgaaagcagcatagaaaactactgcaggaaaaattgataaaagctgtgctgagcggagcctgtagcctcttggtgtgatgaagtcactgcaacattttgtgtgtatttattttgctgctatgccttgcaactgattttgcttgcagacttagcaaattgaagttatttaaaatgggtctggaaacacctagattggtgtagatgcagttgatgcagttattctttttttttttacactctttaattacaactatcatcaaaactgtgctttcactgtttcttttggtggtggtttaatttgaaacttgcagcttaaattataaaccaagtctcccttttaaagtcctcttgccttctgctttctctcttcttcacttttgccattttatatatgtgaacatgcctacatgtacacagacaaactcagacagtgaaaaatgtacaacaattaatgaagagatgattacagcttttcttttagtaaccaaactccaaatgttgaaaccataatcatgtaactgagggaagaaattgtttctgttagtataaatataacctcatacttctgcaggcattcttatcattgaaactgttttccatagttgattaccaggaccagaaatagaattgattttgcattttaattaatgacattctggatctgtctaggttggactgccctcaaaccttgatatgtttactgtctaaaaggtctttgtgttaagagggggagtttatgggtgttataaagtaaaatcatttgattatgtgatacagcttttctttggtaactgaatgaaccatatcattagaatgttggctgaatttttatgttgcttttcccaatattatttagccaatataatcccttttaccatctctttgagccccttttacagagtacaaagagttatgtgcgactcccacatgaggcttcttagagggaagactgttcttcagcagagattcagaactacttctagcaccagctctggtaatctacttggaaaggaacttgcaattcaattggcaactcaggcagattgtataaaataggagaaatgcttcatgagctgtgttgaatactgtatttttgatctgtgcctccctactaaattcatttaggactgtctttactagatcagttttgcagggaaaaaaacatgtcctcagtagcataataatctatccagactgtcataaatgtttatattgcaagttatacttcttaggagttggagggagatggcagaattttggaggagaaccaaatcacagccccaaaataatgcaagacgaaaggggaacattcttcctatgtttagcatttaattctccagtcaggctgtttgctcttaagtctgaagagcgaagaaatgtaaaaacacataatgacaggttttgtgggctttttctctaatagaaatctttaacccttaattaggcatctgctgactgaccttttggtgtgtgtgagccagcagccattcttatagaaagcagacataatgtaatacagtaggaattcagttacttacatctttcctgttggtcccccacaggggacctcctctgagtgtcagagagggagtgagtgtctggagaccatcagagaccacagccagtcacagagagatatcttcaagccccttggattccagttcagcccccaccactaactggctgtgtgactcaaattctgtatctgctacatgaagcttggaccagataatcccagaggactgtaacccagccattaaaaattgtgaagtattaattcacttctatttgctactagatgaacgattatttctaagacaattgacccatattagacattcctggagggagtaggctgtaacttcctttgaccctgcaaagcccccagaactgtgacagtgacgtgagcatcagtgttactcagaaaagtgtgatcatggtacccttcatgaacagggcgaatatgtatatgatgactatctgcttatcctggcacattttggaaagtctcttgtgattatcaaaaaggaccttggccaggggcggtggcccatgcctgtaaatcccagcactttggtaggccgaggtgggcagatcatgaggtcaagagatcgagaccatcctggccaacatggtgaaactccatcttacgaaaaatacaaaaattagctgggcatggtggggcgcgcctgtaatcccagctactcaggaggctgaggtaagagaatcacttgaacccaggaggcggaggttgcagtgagccgagattgcgccattgcactccagcctggcaacagagcaagactccgtctcaaaaaaaaccaaaaggaaccttaaagagcaatttacctaatcctctcattccacagaagttaaggaagtgatatgacttccccaaggctggagactcacatagcacctgggccggatgactttagtgtaaggtgcattcatttactcagaaccctgctccattcccagtgtggggccccttccatgatacacagctgacactgtgccattcattgttcacaaatctgctttgtggcatctgtctcactggtgtccattatttctgggttcatttcatgcagattacgtggctgtaccagtcagagtgagtcatatcaagcaaatgtttatggtaatttgtttatgcttgtgtggaaatgcatttttatgttgaaattctgcttttcctataaacatttaaagaattttacaaaaactatgcatagtttttcccctttgcttaaactatttaaatgatcattgatttctatgtagagggggtgatgtttgtgaattaattccttcaccattcactcatttacctgttacttactgagcacctattgtgtccaccctactgccaagcagcagagatctagtggtgagacagccagacacatccactcctcttgaggagttcagagtctacttatacttcatggagttggttgtcttttcattgtcagccagtgttctatttactgattcacaatttctcaaagaatctggttgaaaaatagtttgcttgggcagatttttttccctgtggttattccattgagaaattcttttcgtagaagggcacctttgctgtcgtggtgacatatatcttccaattttcgaagatattatttttagcttctgattttgtgacctgactgaacagaagagacaaattagctaaacttatttgcactattgttgtgattcatgaaatgacaattcgtgtctttgataaaacttacctgtttcctagaatcttaaactgacagcctggatagcacagtgtccatggaacaaatcacagattaaataccacactcctttgccttgcatatcaggcccataacagtgtacagcccttgcttccttgttctatgtctggttccgaagttccatggaatgctctaggagtaccaaaaccatttgcaatactcagaaatttacagtgctctcacttgcctcagtgcctttgcacatgctatttcctcttctctcttcagactaaactttcaaagcaaatttgatgtcatctcccttggaagtgttttgacacttgccatccttattgacttcttttgcccagagctgagctaggtatactatctctgttgttctgtatccctcaggaccttacagactgtttgtctacttgtctctctctctctctctctctctctctctctcaaacagactttttgtttcttgagggcagggactatatgttctgtacctcaaatcttggtttagtgactgctgtagagcagataaccaataatccttgaacaaacagatgggaatcaccatctaaaacctatggtgctgtcattggcagcttctgctctatgtggagagtttaatttttcaaaccaatgtgactatgaattatactgagaaggataaagagattggcagacatcctgatgtagttcattagaaattctattcaaaaccccaggaaatgtttctgctttcaaatgagtttcagcaaagtaaacaatgaaaatttattaagtgccttctataagcaaagcattgcattaagtaccaaggaatgaaagatttttttttttttttaaaagcacaattcctatcctccagaaagccacaaactagtgagggtttgtcccatgtgtcaatgactggtaatgaggctgactgctataaacagagactgtagtcagctgtatacttgcagataaggcagggggtagaaagggcattctagacagaggggctggcttgagaaggaacttaaagttatgatggtcgtgccagcaatcaggtgactttgatggagcaggggctggggggtggggtggagggaaggtggaaaatgcaaggaaagatgaggaacgttgtgtggggagatgggaatggtatcaggaactctaaatgctgtttattatttttgaaagttggaggatagttaatagggtctggaaaatgccaaatagaaatttgtttggaatctcttctcaggtttaattaaatcaaaagtctgtattctgcagggaaggagagcagttgcgcagtacataactgcataacacgtttttttctcacccatcccttttgcccttgagggtacactttgccattcaaagtcatcacaaggaagtgaagccgggaagtctaacttaaatcaatcagtttagacctgaagggagtttagcattgagatcactgaggtgcctgttaacaaactgtccagggtgtggaaaaccccctgggtctttggtgctgtatttctactgtaaaaatttagttatttttttatttgacaattaactttgtgctatttacaaggaatacagttgttttatgaaccagtgagatatgcatgtgtaagtttgtttcatgtaggtgaaaaagtggcttggaaaattctgtctgtgatagattcaattcatcatcaaaatatgatttctgcttgccttgtccctcctttctttttcctaaaagaatgagtgaacatattcttagggaatggtaagttggtaggttttctgcatctcataattagatctgaccagatgactctccaccttgaaattagtctaaaaagattgaagaatttggaggaagatctctagatatcttgaccagagcatgaaagcaaataaatattgcttgtggagtgagagatgatgtggtagaaaagaagctgcattcattcattcatttattcattcatttgctcactccacaagtacttaatcgagcacgtactatgtttcagcttcctgccttcatggagctaacattctggtcagagtgggagggggagacagaaaaacacattagcaaatacgaagcaagtcagatggtgatcagtgctatggagggaaaaaaaatgaagaatgctttggctgctattatcttcacatttggttctctttaaagttatttaacttatgcattatggttaggttattttcttctctccactcattgtttttagctgcctatttttatattcactttctgacaattctatgataaaccaccatcttgagggtttttttcctcctagataaaagcagcttttgaaataattggagtactgtgaacaaaagttataatgaagcatttacttctggaattgatttaaagaaaagtactacggacatcaaagcccattagtatttttctcaagactaaagttgtcagaatttagaggaacatgggatggaaatggatctgtccctcacttaactctgagaggagcagtttggggtgttctgagaggatgggagcttggagtatagggaactccaaccccgggagcagagaaatggtgggatcacccatgagcagagctcattcagagaagagacgggagtgaattagaaagtgaacatgcaaaaattgagcaaggaatttctctttgggaggaagggaggtagggaggataaaaccagtgagataaatgtcagtgaataaacaacatttacaagaacaaattctgcccaatatagaacatctgagtgagctggttagtggaaatggtgcctcgagataaaaaacaatatttagggatttcccaatattcccatcctatattttgtgggatctttaattcagcatcaatgttccattttactgcaagcaagcctttagtcaatactttctaccttgcttctaaaataattaggatttaaaggaaaatgtctcctagcggtggagtgcctgggctctggggcagacattgtacccatccttactctgccacttactcacctttggaccttgggcaagtgagctggtctccttgtgcatcattgtcctcaattataaaaatgagattaactaattacccctacctcagagttgttatgagtgataaatgaaatagtccatggagagcccttagcacagtgcctgcaagatgattgcattatctaacaattgttaacctgttattaccatgacttgtctctctggtgttagtggtttagagaagttctcacatgtatatatgtattttcccccttagcagagctttttttttttcttcttcaacttttaagttctgcggtaatgtgcaggatgtgcaggtttgttacataggtaaacgtgtgccagggtggtttgctgcccagatcaacccaccacctgggtattaagcccagcatccattagctattcttcctgatactttccctgcccacactgacaggccccagtgtgtgttgttccccacagtgtgtccatgttttctcatcattgagctcccacttataagtgagaacacatggtgtttggttttctgttcctgtgttagtttgctgaggataatggcttccagctccattcatgtccttgagaaggacatgatcttgttcctttttatggctgcatagcattccatggtatatatatacgacatttcctttagccagtctatctttgatgggcatttaggttggttccatgtctttgctattgtgaacagtgctgcagtgaacaaatgcatgcatgtatctttataataaaatgatttatatttctttgggtatatacccggtaatgggattggtgggtcaaatggtatttctggttctaggtctctgaggaattgctacagtgtcttctgcaatggctgaagtaatttacactcccaccaacaatgtaaaagcagtccattttctccacaactttgacagcatctgtcgtttcttgactttttagtaatcacccttctgactggcgtgagatggtatttcattgtggttttgatttgcatttatctaatgatcagcgatgctgagtttttttcatgtttattggccgcatgtatgtcttcttttgagaagtatctgttcatgtcctttgcccactttttaatggagtggtttgtttctttttcttgtaaatttgtttaagttccttgtagactctggagatcagacctttgtcagatggatagattgaaaaaattttctcccattctgtaggttgtctgtttgctctgatgatagtttattttgctcctcagaagttatttagtttaattagatcccatttgtccgtttttgctttcattacaattgctgttggcattttcatgtgaagtctttgcccatgcctgtgtcctgaatggtattgcctaggttttcttctagggtttttatagttgggttttgcatttaagtctttaacctatcttgagttaatttttgtataagatgtaaagaaggagtccattttctattttatgcatatggctagccagttctcccagcaccatttattaaataggacattctttccccattgctagtgtttgtcaggttttttcaaagatcaggtggttgtaggggtgtggtcttatttctgagttctctattctgttccattggtctgtgtgtctgtttttgtaccagtaccatgctgttttggttactgtagccttgtagtatagtttgaagtccggtagtgtgatgtctccagctttattctttttgcttaggattgtcttggctatttgggttcttttttggttccatatgaatttaaaaaatagttttttctaattttgtgaagaatgtcaatggtagtttaatggtaatagtattgaatccgtaaattactttgggcagtattgccattttcatgatactggttcttcctatccatgagcatgagcattgattatacctatccatttgtttgtgtcctctcttatttccttgagcagtggcttgtagttctccttgaagtggtccttcacttcccttgctagctctattcctaggtattttattctctttgtagcaatcactttcttcttcctgtttgtgattaatgattttagggtaaatctttttggagggatctcactttttttttattcagtctcttagatagttattataatttggaatttacttagattttaagtctgtatcatagaacctaaacagtggaattggaggaccatgtggccacaaggtccctgggaggaggacccactagtcacagtaagtgatgttgtggcaggaaaagagaagagtagagtggatgagaaaaggagcaacctaacagcaaatatgatcaatgttctttttctctgttgccattcgggaggatttagggatgaaggctccttaggtggtgtgtagtgtagacaggctacagcttgcagtttcctggagggaatagccaggagagtgtgatttgtataaacaggggcaggtggctaaggaagtatagttaggtgccagtaagtttgtaggaaagaattctaaaagtggaatgcctggttcacagggtatgtgagtttaaaaattctgatggctcttactgaatcaccattaacagaagtgcgccagtttatactcccatcagcaatgaatgagaatgcctgtttcctcacacctatgcccactagcaagcattttgatctttgctaatctgctgggtgaaaagtagcatcttatagtttaatttgagcatcttttcatgtgtttactttgtattttcttcttctatgagctaactctttgttcatgccctttgcaggcccactttcaactattgagttttgattttgatttttaggaggttttttttttgtttcgttttttttttttttttttttttttttttttttttttgtgagacagagtctcgctctgtcacccaggctggagtgccgtggcgtgatctcggctcactgcaacctccgcctcctgggttcaagcaattctcctgcctcagcctcctgagtagctgagattacaggtgcccaccaccatgcccagctaatttttgtatttttagtagagacggggtttcaccatgttggtcaggctggtctcgaactgctgacctcttatctgcctgccttggcctcccaaagtgctgggattacaggtgtaagccactgcgctgtccaggagctctttatatactagaaaaattcacatttccttatgattttttttaccaagtgtttctgcttattttgttatttgtctttgatattgtttatggtatttgaggcataataaatttttatataaagttgtcacatgtttcttttgtactttctgggttttgtgtaataatcagaaaagcctaacccactctgaaaagtcatgcttctacaatttccttttgtatttttatgtaaataaaatcatacttatttgattcataattattttggattagtaatgaaatagaaattccattttattttcccccaacaactacctagttctctccaaacatttcaggcacgatgtgtcttttccttgctggctaggtggtgattcttgagaaagatgatttttacttgggccaaggcaggggtgacatggaagggtatcatcatctatgaaatccccttatgtagttagaactatttttggagagtctgctccattttcttgacttccagtttgttgcagttccacactgtgttaatcactctagttttatgaattttaatatatgatatggctagcctcacccctattacccttttgttccaggattttttttgatcttcctacatgtttatttttctgaataaactttagaaattgtctcattctaaaaaacaatcatgttttggagaaagggttaaattaaatttatagcttaatctagggagagtgttttttaacttttaagctcaggggtacaagtgtgggtttgttgcataggtaaacgtgtgccagggtggtttgtgacacagatcaacctatcacctgggtattaagcccagcatttattagctattcttcctgatgctttccctccgcccctgacaggccccagtgtgtgttgttcctcatagtgtgtccatgagttctcatcattcagctcccacttataagtgagaacacatgatgtttggttttctgttcctgcattagtttgctgaggataatggcttccagctccatccatgtccatccatgtccctgcaaaggacatgatcttgttcctttttatggctgcataatattccacggtatatatgtaccacatcttctttagccagtctgtcattgataagcatttaggttgatttcatatctttactattgtgaatagtgatgcagtgaacattcacatgcatgtatctttatggtagaatgatttatattcctctgggtatatacccagtaataggattgctgggttgaatggtatttctgtctttaggtctttgaggaatcgccacactgacttccataatgtctgaactaattgacactcccatcaacagtgtataagcgttcctttttctccacaacctcaccagtatcctttattttttgacttcttaataatagccattctgactggtgtgagatggtgtctcatttgatttgcatttatctaatgatcaatgatgtcaagctttttttcatattatcgttgccacatgtatatcttttgaaaagtgtctgttcatgccctttgcccactttttaatgggggtgttttacttgtaatttgtttaagtttcttacagaagctagatatagacccttgccagatgtatagtttgcaaaaatttgggagaattttttatgatactgacccaacctgtcgtcacacagggtatatgttcccatttattcagatcttcttttatgaatctccttagttaatgttttaagatattcttcctatatattttggcacgtattttttaaaacattatttgacatggtttataagtatttgtttagtcttcacatatttgcagaggtattgaggagtgaaaaaggaatggaagtgtttctttgacaccgtaaaatagattacctggggaaaaatattgaaactttgcataagtaaatgtaattgattcattttttcttttatctcttctgaccctatatttcgaattgttgatctaactataaaaacgtatttgttttaaatttgcaattgaatttagtaagtgtttttcacacccacaaattcaaagcaccaattgctgagattcttttgcaaagtgttccatatcattgtcttatattaattcattgactattaattaattagcttagtaagcacttaatgaacacttactatagaccaaatgttagaaatatgaagactaataagacatgatccctttcattgaaagatttgctgtttactcagagatggaatgaaatgatgaaaacaaagaattataataatataaggtaatgtgctttacactctgggaggccaaggtgggtggatctggatcacttgagaccaggagttccagacccacctggccaacatggcaaaaccccatctctactaaagatacaagaattagccagatgtggtggcatgcacctgtaatcccagctgctctggaggctgagggaggagaattgcttgaacccaggaggctgagattgcagtcagcagagatcgccccactgcactccaacctgggcgacagagcaagattctgtctcaaaaaaaaaaaaaagggtaatgtgctttcatgaaaatatgtgcaaggcagagttggaacatggagtgggagagcctcaagctgtcctggggcaatcaaagaaggctttactgagcaaccagcatctgaactgagaccattcggatgagttgctgccaggtgggcagatcaggggaggcttctccagacagagaaactagcaagtgcaaaggcactggggcatgaatcagttacaagttattcagtctatggggcttaggagattaggcttagccagtaggcagctgccagatctcaaaggctttatatgacatgcgcaagaggttgtgctatattctgtaggcactggagcaaattgtgagcaagaaaaggtcagattgtagactacataactctggtagccatatggagagcaaagtagaagggtatgggtataaaatcaggaatacaagtatggagattataacagtgggcccagttagagactgttttctcttaaactaggacagtgacattaggaatgacagagagcccctatggaagatttattcattcaacaatcatttattagaatcacctgtatgctaggctctgtgctggatgctaggcatgcagcagtgtgccagacagatatgctccccactcccaaagccatcccattcaaatgggaagagcctgataaggtgatatgtaagttgatatgttaagcagtggtatatgatgaagcagaatgcagcaggatgaaagggaaagggaacatggttaggagtatgctgatcaggatagtcctctgggcaaggtgatgtttgatcaggacatgagctggggagggagggagggtatgagccagggaaatggtgtccaagcacagggaaatggtatccaaaagagaaatggtgtccaagcagagggaacagccagtgcagaggccctgagaaggaactgtgcttggcatggttaaggaataatgaggaggccaaaagggctagagcagagtggtggaggaggtggcttaagtatttagattttatccagaatgagatggggagccagggcattatttttcatacggcagtagcatgatttgactggcagcctttaagaggatctcacctgctgctgtgtggagaatagagggagtcagggtgtaagtaggtcagttacaaggctggtgcagaggtccagaaagggaggtgatgatggaccaggatagtgattctggaggtggtgagaggtggtagaactatggatctgtcttgaacttggtactagaaggatacaggaaagtgtgcataggaagtaaaatgggcaagtgtagattagataactgctaagtgtagattagataactgctaagtgtagacatacaatattttaaagggagatgagggaagtatagccagggagggtcactttagcaagagcagtccatatggtcaataggtcaatatgatgagtacactatcatgaactcttgcaggctaaacttttattatttgtatacttatgagccacactggattgtgtgacatgactaaatagagaattcctgaaattgcctctgggaggatgtattaaatagggtcaatcagaagtacgtaaatggtgtctactcttgagcaataaaatttatagaagccacatctaaatttagctttaagcaatttcggagcctgagaattttcaggaaatagtaatcaaagccctgataatacaagaaattgacatcctttttggactgacatgggagaggaataatttgggcggtcacagaaacggactcatagatcatagatcttgggaatgtggggtcaatgaattaaatatggctgaaaattataaattacctcacatatccaattgcttttagctaaaatcaagagaaagggctttctaaagccgagatactttttttccattagcaaagggttataagatgttctggagacttgagtcaggctagttcccttatctttggaagatattcttgagtgatgcagtgctatcagtttcaaataagtatatttttgtaaatcaggtgatgttatataatgaaactgacatttgtaaaagttttttatggctcccagccaggtgccccttttgtcagaccctgacttttgaaggattttgggctgcttataaggattcagagttcccctgcaaaattgatgttggaaaccatacccacagtctgcgccagtcactgtggactggatacatttccacagtgtgagatgaaatcagaactgaatgagagtggccactgttctcttggccatacctgaccaaaggttctagtttgatgcagattattattctttagttaactgtacagtaaaccatgcacagtcctcattgtaattaggtgggttcattctttcttaattttacctgctgttgtcgtcatgagtcacaaagttgaataactcttcagttattattgtagccagagtgatggataagatagactcccctaaaccatggtagtcgatataaagcttttcttctcttgcccccatagttagcactaactggcccctgttttgtataaccttatacagacttatgtcatagtgctaatgatataccacatgtgtgtacacatatgcacatacctactcacatatacacatgcacacacatatatgtgtacacacacacacacgcgtaattcctcttctctccccccacagactgtagtaggcactttgaatcatgaatcgttcttattttccttttaactattaacacttagctcagcatctggcataaagtaggagctcaaaacatggttgtcgattgaaatctagaactgggttttgcattttcttgttattgctttgttgttgttctgttgattaagtaattctatacctagtttaggtttgaattgctttagagaccctgatgatggtgccttgtgttcttggccacttgattttatgtgacagtcttcagcatattcataactccaagctttacaaaacaggcaatattttatagggaagtagctctgttgcctttctggatgtagaggcagcatgagattataggataaaactccaatatgtttgtatttatgtatatatatattaccttattcatacataataatgtgtatacatacataataatatgaagtaaaagtaggtcagaagtaaagaagaggtgggaacaaaatgaaagcaggaatacaattaaattgcatgtcagaatgacttacatgtaagatacagaggccacctttaaaggctttaagctttcaatcagccagagggaaaagaacaggcttatgggggtaaagataaaccatttgctcaggttgattttaaccatactcttagcaccaacatcagataagaatttctcccaggagtccctatgaagagtacattgtgtttcgttatgaaaatcatcaagctttgcaaggctgattctcataagacaattttgtgttaatagcattgcctcaaggcaaaattttgtaaaagcagtcggcaaggttctgtttaggaatcagttctctgctggtcagtttgactcagggatatgaaaagtgggtggactacttgtctttaagcaatctttcctgtgtattgtttatctcaaataaagctttgaaaattgttttttaacattgaacttgaagtggcactattctccagcaagtaagggcctacagtgtagctactattctgtgtagctagttaaggagagacctggcgtcctagcagtgtcaaatgaaagctggtattagcatccatatgaggaagctgacttgcctagcaaagacatttacctgaatagcaggttgccctccttatttccaggggaagcatgggagaaccaagcagctcagccaggattatgcatagaaaattgtttggacccacgttattgctcagacaaatgggtgatcctctccaagggctttaaataggtccttttggggcagggaacccaaacacttagcaaagtacagaaggtttgaagggaatgaattcccagagtctggattggatgctcagtctcatttctcaccttcccgtttacaatccctctttttccattttagcaaagcaaggcatccttcttatccatctcagatcttactatagtgcattgtgcaggggtgtaaaaacagcctgggcaccaaacagagcagcaattggaaatatttctttgcagagaagtatggtagtgtgaacaataaaagactttccaatataaacatatgctacattgggataaaactctgtggggaagtgggctggatatgagttaaaggagaaaaactagcgatgtaaattttccaactgataaaaaggagcttgagcttggtcagatatcttaaaaatggttgaatgtgggatatgacagttgtgttttaaaacctcaatgtttatgtatgccataaattatattctttgtaatcctataagcttatgatgaagtcaacttaaaacttcactgagttggggcagatcttcagaaggggatacatagctttttgttttgttttgttttgaatctttgggccatgcgtgagcaaacatgtttgaagaccactcatctactgcatgtaatatggctctcaatcagtcctctagctcttgcatcgacctcaagtgttaggtcagcctctagctgtaactcccctccctgttcttaccactactttatatttactttaatataagtctaacagattgcatccatgattcctctaccaaataggaagatctttaattctcgaaaacggtatactatatactctgtagtttccaggaatttttttgtggtgccttatgtaaaggcaaactttaaaaaaattattgagatataatttacatatcatataattcacccatttcaagtatagaattcaataagttatagtaagtttaccaagttgtgaagtcatcatcataaatcagttttagaacatttttgtcaccccaatacgatttatcatgcccatttacgtgaatgttcctatgtttttctaatatttaaggggctacaagttcatatgacaacatgcgtagagagcagtaaggatggaggaaaacaagaggggcagggccagaattttatcatttatggaagcatgagtgctagcatcttctatttttatttttaaaaaaccactctgatgttcttctagtccttatatgtttttattgatacaaatataaccacatgttaaggcaggactctgtctatctcagttttggctaagatcccaatggccaagaatactagattaggttcccccatatcagttacctatttagaacatacaaaacattgtatgggagttagttattgtctgctccataatatgtatgaggttgatgttggggccctggtgaatgtgagggtgggagaagggtactccatcttcacttcaaaccaagtgagaggaatccttattgaacttgacattatctcctgatgggagtttggggacatgaggttcacctgaacctgtggaaggctgtgatgagagctgccgctaagaacaaagtgggagagggggctgcagggagatggccgcaagttggtgggacgaagatgtgtgagattttatcatggatcaggtggatgctctgggatcattttaactttggaatgcactcaagagggatgcctggagggaatgggggagaaacagagagagagagagggcatgagcaagtgcataagtgatggtggggggaatggttatcagttacctaactattctggatacgtaagaatgtagtgcttagagattagacagaaaaatgaaccatttgccatttgaccatctgggagacattattgtatggtctttaaatctgataaacctgaatttaaatctctccctgaccctcagcaagttactgtatttttctgagctttcagagttgtcatggccagtatttgtcgtaatgatataatcattgactttgacaagtcctggaacttgcctttcaaagtatttttgatatttgacactgattgatgagtagataaatatgaatattctgtatagacaacatctatgatctagctagagatctaaaagtcattgttaggtaccataagcgtgtaacatataacattcaatattttgcaaaatccatggtatttcatttactatactgccatttactttcttatttggattacgtaggtgataaatttgtacaagcctgttttcatatactttgaaagtgtgtgaaaataattgtatataaatggtaattctgattttctctagaatacaattcagatttaccagccttcaaataatattattttagatactattgttaataaataatattttttatttagcaaataactttacatatatatgtgtgtgtgtgtgtgtttgtgtgtgtgaatttatgcatatgtatttttccagccaacatgaaagtcttttgaggacaaaattgagtatttgccatcacaaaactataaataacttaaaaatttggcatatttaaatattgcagtaagcaataatacttttatccatttatgcaacttttgtacagaaacagatcttgtagattatcaggtaggatctatggagtgaagtttgataaacttttaaagacaatgaagttaatttttaaaacctcttaaactcaactcttaattattcttaattgtgttctttaatttcttaaattgtgttcccaaagcatttaaaatatataactatcgtagtactgaatgcatggcatagtattatttcattaattcattaatttatttaaaatgactgtagtgaactcgtatggtacaatctctgtccttatggagtctagagttcagtgggatagacgcatgaaacagacacatgagtaatatataattacaaattatgatcactgttatgagttacaggcaaatggcatgagagaataactgtggaagcataatttaattggagggaatgattctctgatgaaagatctgaaagatgagtggtccattatcagttgagaatgggtcaaagaatatttcagatagtgggaacagcatattacaaaggccctgtggtaggaaggagtatgaaatatttaaggaagaggcaaggagtggatatagatgcctcatttaggaggcaatgggaataattcattctggaaatgaggtaaactagacactagattagactagaataagttagtggcagtacagttagaagtgaatggattttaagaaatagtagaaattagagtcaataggacttcaactgtttataaaggagaaaggagaaggtgttgataaataaggctatttgtaaaggtggatggtttggattctagcacattgtactgtgattgttataccataatttatcttctgtgaacattgcaaggaagtttctgcacttattttcaagttttgatgtgtatatttttacaatactgttcacttttctaaacttttcaattgtaagtttcttataattgagaattgttttctctttctttggtatatgtccagagttcttagccctctaaattcagttgttgttgagtaaattttatttttttaaaaaatagagattagaacatctgatttcagatatttaaaaaaacttagatatttatcttgtggggaatgacttaggaacagttttcttgaatgtagagatttgaaataccaatttgcctttgggtcattattttgtaggaatgtgggaagatataaaattcaatgagcaatatgattaggcatttatataattccttaagtatatgctatgtagatctttcaacatatatattaaaagattaaaaaatgcttgattatctggctctggggtatacttgtaaaacttgcctatttgctaaggtcaaaacaggcatgcatgtattttatattctagctttatctatggtatattaataatataactggtttccagcagacacaacctagagtaatccctgcctaggcttagcctagttagagcctagttaggtcttcttgggtttggacatgatttgagatattgaaaagaaaataattgaggagattcaaagcagtattctaatgaagctatatgcaggtttactaaacagccaacttagccatttatctaaaaaaataatatatgtaaaatgtgggttttactgtaatataattaccgagtctccttaccaaaggatgggaaaactttatagccacgagtgacagaaagaaactattgttcagttgttggattccatgtttatgtctgctaaactggtcattgattttcatactgtgaactttcttaacattgccaggtatacagttagaagacctcttatcctaaatgcttaggactaatttcgttggtcagtggaaaaagatggttaaatgagggaatagttaaaacaatatgatacatgcatttcttgaacaatttattttaacctaaaacaaaaattaatttgctaatattttggtgggggctaagggttttacttcaagtaataattcattaatttttttgttttacagtttcttttttgcataatcatgcctggaattcattacctataaggacatagacacttgtgaagacaatcctagtgcagaattcatctaactttaatgaatcatttcattaaagatttcatgatttcccttattattattattacttattattgaatgtatgactcagccttataaagtgtttcctaaacttttagcttattttaaaaatagaaacaccaactttctttttacatttacatttcatttgtttacatggtacttaattaaaattatatagttataataataagtatgaatgacataaaaagttttggaaatgagcacaagtaattcttgttaaacactatagttttaaaaaagtgaagggaaatggaccattgttctaaagattagacaacttaagctatgaggcttggtgagctgtgggtatcagtctttatgtttaataaagggaatggagattgttggctaagttgaggtcaagtaacagagccccctttttgtgctggtttcagcccattacccttcaactttattcactaaatcagatagttacagtgctgcttagaatagctcctgatattaaatagtgtcaataataatactttagcagtcatctctgagcttcatcattataaactagataaataattaaaacaaataataatagaatgtttaatgggagaaataggcactgttgagagaacagtctaagattcagatcatttagctctatgcccagggatgccttactctaggtttgtgacattgaataaattgctaaacctttctggattcagcttccaaatctacaggctggtagttctcaacaaatcgtgattttgcctcccagagaacatttgacaatatctggagatatttttgattgtcataatctggggaatgttcctgatatttagtggctagaggccagcactactgctaagatcctgcaatacacaggacaggtcctaacaagaaagaattatcagttcaaaatttttgtagtgctaaaactgaggatccttgggctagctaatttatgatggtttcttcctcttccctatgtatctatcattctcaaacttaggctgatcatatatatatgtgtatatatatatgtatgtgtgtatatatatatgtgtatatatatatgtatgtgtgtatatatatatttctattttaaataacctgagtaatgacattagatgaattttttttgtctagtaggtgtttaaatgatgcaatagtaattttcaatgtcttatataacataaacagagaagaataaatatagccaaaatttactactctgtactttttctaattcagcattcccaaatgtaagttaaatataactgtagaaaacccacagtagattaaaatatttattctttcagtaaagggacagtttaccaatgctgtcaggtagataggtaccagcaatatagataggaaaggggaaaagctatgtaatgttggagagtttaaatactgtaattcagttgaaaactatatttcagctaatagcaactttgggatttatatatgtatatccctatgatttaaagtaagattcatcagtggtataaaaatgatattttagtgtgctcaattttatgacttgagaccagttcaaaacaagcatcactgctagtataattctaaattattttggaggaaatgtatattttaaaattcttggtggtaattagtgatgataggttcgctgctctatacttttttatgaaataaagtttgacttaaagaacctgagaacaggtttcaaaagtaacagcatagataccaatcacattttttctgagtttttaatttgttgacaaaattttttttaaaaaactgtgatgaaagcatgcgagacttgagatggctgtagaaggagaaactgagtaagttcctcttcttgtcttgtttcctctccctatttctccttctctgttttgcttactccaactccatgcacacttgaatcaccatgaatggtgcccaagttgaagcccaaatcaagttccttagttgttggggccgtgtcttatttgtcttttgatccctggtatctggcatgtagagtctctaagtaaactctctgcccttgacctttctgcatattataggctctgtctttgggttcctccctccctctatttcccttttttctgcttctctctcccttccttccagtttagtttggcatttatagttttcgtggttgtgtggctcttttcatctaacatttctagatgtttagagcagaagggggggccctcccacctgacctcagcctaccacattgttggaatccattcattcttcaacctattaaaatcttactccattttattaccaagtaaactctttcaaacagttaatttatgattctcctggttttattcttaccccattcaccccagcaagaaagtcggtttctcaaaaaaaaaaaaaaaatgcccttctttccctacctgattattatgtagcatgagaattgacagagcacaagcagggaatgattacacaacatttttaaaaactctgtgttgaaatgtatttgtggcattactgtctcaaggaaagccaaatgcatgcctcagaattgagaaaaatgtaagtcggcaagcttatctctaactccccatgataaaataaattgagtgttttagagctgtcagtagtacttgcgcagttctatctctactgctatgtcagttaatatttcctccctcaaaacaaaacgagtgcataggcaaaatgtaagccagcagttgagattctgaactacctccaccagtgggtttcaccccaaagtgtctcctgaaggcctattcatcctgggtttgcaatgctgggttgcaatgttaatcattttttcatgtgctgatgaggaaaatgataaagtgatggatgctgctcttccttctgctttgtcatcctgaccctgattgtgctgggtggactttctcattaacgatgcaaagtccggtgatttgcactgtgctcagctgggcatcatttcttgtatcttatttttgttggtcagcattatagctagttgttggaactgatttcccttgcactctctgtttgactatgccatggccagcacacttttgaatgaaaccgctgatggttgtcgaaactaaagggacattcctatattttggattggctcacgaattcacctgttgatgccctggaggtaattttcactggctttatttatagaaatggcttacacagtgtagttgtgtctagtcagttgccatatggtaccctaatatgccaccaaatggtaatcaaaacttagtagtaaattttcaggaactaataaaacaactgtgatggaggagcttcatttgggatggtagatatcagtggctggagcaatgaggaaggccttgcctttctcttagtgctatttgttagacagaagtttttaaacaggtatgtccagaatagtacttaatttcttaaactataaaagcaatatatggttattattaaaaatcgatttggaatggaagaataaaaataaaatgactcagttcatttttctgctatcccaataccagccttggagaatatgctttcaggtaatcatagagtcagagaaagaatagagatgaagacagagtcacatatgtgaagttaaaaaaatgtaaatttatcacaatatatatgattttccaacttactgttctcaatgagtttgtcttgaagagtgttacgtgtcaggatatataggtccacctcattcttcatagcagcagtgtggtactccagaccacagatgcaaaacgccataatttaggtaagccttccattatcgataaacataaggttattgccaatgttttacagttataaacagcaagttaatgaacatttttgtacatatatcttacagtatgtaggctgacattgccgtagtattaacacttagaaatggaactgatcattccatagttaggcatattttaaattttgatggatattctcaaattgcccctccccaaagacactatatgaaagtgctcatttcctccacatccccatcaatgcccagtcctttgcttgatggaaaaacagttttgggcatctttagtgttctggtccacagctcccatcctgaccacactcaccaaatagaatcttactttactcttggacagaacagaacaaattaaaacaaaataaaaataacaagaaacagctcaagagatgtggatcttttgagcagcttaaccaaaacctaaacaaggcaaataaagtgaccctttgttatcagcaaaggcctgtgcttcctctgtgctgctgagccacagtcagctaggctggatcatgtggagaactactcaacaaagctggatttccttgaccagtcagcaggtagaaggtttttcttcacttctttccccaaagtcccaactcgagtctaactacgattcgaagaaaatcaagagctccagtgtacaagtgacagagaccatttgttttaagacttagcagtcaccctgttcaggtcttcttaagggagacggcagctcctggacctggccacagagtgtgagaaagatggtggaagagagaaagctgtacatacacacgcacatacacacacgcacagggcgagacagaaaggcaggaggcaaattttttccaaagaaatccaaaacaataggtaaagaggatggaaaaaagagaatggtaactgggcattaccttaaccactgggaggagaacaaaagtaagtcttaaatctgatcagccatggcttattacttgataaggtgaggtgaggaggggaagatggtagaagaaacttgatcttccagtaggaatcaataaaaattgtattagatgttccccttatctttggggctcttgtcttactcgtacttcctttgtggtaactttaggattctcatgtttctcttccttgacgttgcaaaatttgatatatttccatttgttttgttatttcttttcagatctcaccgtttgctgtattttgctttgcgtaatattttcttttccttctctttctgcattatttgctttaaaacaacatatacactaaagaaatgtaacctcaaccttttcattcaagtgtgtatttctgaaaaaaaatcagatatttacagataatgaataacaccacaaaagttgttttatgctgcaactgtacttaggttcaatgtcatctttgccaccttctccctgtgttatgtaaatattccatttattgcaggcataaaaataccacctttcactgtactttatgaggaaatggaagccaaatgactttttttttatagtttaaaattcatttacttatatatgtggcaaattctaaggcaagccagctcaaatctgtgccaaattcaggaagaaaaggattatcacaagaaataataagtggattatcacaagaaagaaaaggattggtaaaatatctgttatttcacttacaggtggaaggccacccctttttgtcatttaaatgctaaattttcttctcctttttcatacctttcattttccctcttgctttgtttttgcatacaagcgagttgggacatatattgcttctatctatcacttttacataaaagatagaaatccgggaaattgcaaaaggtttacagtctttccatagactaaaatcacgagccagatgttttaaaacaattttatattaaacaattttaaaactagtatttgtataagccagtaaatctatttttttcataaatgtcctatcatgtttttccccccattgggcacttggattggaactacaaaccacaatcttcaaataattattaaatctgaaaaacctatgtcttgtagtttgtggtgactctgtaggtagccactgcaataaaatctatttggagaaggagctattatctatgcacaatgtgtatttgatgaaatgggtaggcaattacagttcacaaaaacacatactgtattagaatagttcacatatagcaaagataattagatttttcatacagtaaccagtcagccaataggagtaaaaatgctacaaatcttatttataaaaagtgccattaaaagataatcccttctaatgttgcttgagcatttttctggatatgagtgggcagatgagtaatagaaaaataacactgacataaaaattaagcctgggagattcctgagtttgttttgtgcaacttggagttttgaggctctgtcaggagaccgctggagacaagagtactggattagaagcaggaagatctggtgcttgacctgactgtactgtcagtcagtcatgtgactcatcccccaagtctcacacttctcattttcaaagagaagaaccctgtactgcagagtaagagatcaataaatgtttgttgaatgagtaaaagaatgaacaaagattttaaagattcctttccaagattctgaaattccactaggaacttgaacaagcaataaaaagacagcattgcaaattaagaacaaacaaacaaacaaaaaaaaactttagccaaacattctatttagtttaaatttgtagatatacagattttctaaatatcagttttcctcaaatggacttaagatgacttccagactcagggtacagtgtcacattagctggtttagcgagagtgttgtattctacagaaatgtgactctgaataatgccagtttgtcacagatggggatgaaatcagattttctccaaaacacccaaatgtgtgatgcataaagcaacattggcagccagtggggaagatcttatcaatgaagtacacaaagctctgaatgtttacttcgcagaggaaatggcttcacagaccggaaaatttaagttgtcatagaaacccccatgccatatattttgttttaatttgagtattggcagattaagaggactcagtgacaaaggagctatattaaaaatgttgaaattgagtgtgctggttttattttttaacttaattgatatctgttttcaaaaggacttttaatatctagaagggcaaaagtatttcatgcaaattgtgcatagatttctgttgaaaaacaatatggcattggaactttttgttataaaatggtgtgttttctcctgtttatttcttatcataaattatctttttaccgtggtatcatcaaaataacttcactggtatcaattagtaacataggaagctatatatcccaactgtctacatttttattccaactcttttacttaaggaatctgatagtagctgctattggtttaggaaggaaaattaataattagtttgacaatctacttgaagtcaaacatttaggaaaacaaacaaatactgaatcccttaactatctggagagctaatatttattgagggactgctctgggcctcgctgtgctagattctctatgtacatgatttcatttggtccttcaactactctgaaatataaattatttcatttcttgatatgtaaggtgagactaagaaacattacgtgatgctcagtaaaaaggaaaatctggaatttaaactttttcaacatccaaaatggcaccacactgcctcatgtcatataattaactagacacaaatgtctaaggagcagaacagacattttgtgatagataagacataactgattctgtagtaagaagaactaggaagatgtccaggcctcacatatgacggccccttctggaccaagttagaccttgagttagtcttcagtaactagcatcccagcttggtgtgaaaatttggaacacttaattatggacattaacatatttacacataattaacactaataccattttgataaatgattaaaaatattcctgcatatatcttcagcttttacaaagggaattatgtgattttgggttttcaattatgtgcaacctattgactggacattttctgatgtttccatggaggatttaagtgttattatgtataatatgttagctattaatttttaaataacaagtttaaattgcacaaaattactttattatagaagctgttgccaaaatcaactggcttgggaatgcacatcactgaggaatttgaaccaatcaaatcattagccagagaaatgtaattatttataactcagccaagctcttattatgggcaagttagttgcacttttctccgctcttttgtggttgatgtggtattttataatgaacgtagattagtgggaaaggagcaatatttataagcaaaagacagtgtaacagagtgaaaaattgaaatatgaaaaattatgaaagacggaaacattcagaaagcagattttctgaaattgtgtttaaagacagataaataaatatgtttgaagatggaattgagaaaaaaagatggaaaatggtcattgctcacagaaaaagattcactaagcttattcttttgatgtgatataatagtgatttgatggatgcagctaacaaaatgtctacaaaaagcccagtggtatccattaatattgatgcattgagtttcactaaccgtattcatggatgtattatttctagcaccttctgtgtttttctttttgtatttggtccataccagcgtgttgggtgctgtccatggtactggaccagcgttgcttgctagggcctgctgtttgggagattctagggatggtttcctcctcccaaccgcaatggccctgttcctttatcttacactgtgcttgaattgtaaatacaacttgtgaatttattagtaacatttctagttattgtagtttctaagtatgagatctcagtggagatctccaaacttaacctggctaaaactgagcttttatttttctccaaaccagttcctcctgcagtctcttccatctccgtcaatggcaactacatcctttgttactgaggctgaaatcttcttataatccttgactccactctttttttcacatcccacatctgtcaggtctgcctttaaaatatattcagaatccgaccagttttcaccacctcactgtggccatccttgtgtgagcccccatcatctctccctgtaatggacttctaactggccgtcctacttatgtccttctacttccccaggccaacttttaaagcctgttctctatatagtaaccagagtagtcttgtaaaacatgtcaggtcctattactcccttgctgaaaatcctctgatggctttctgctttagtcagatagtaaaagacaaagtccttataatggctcttacatcatctggccttcttgactcttcctcatgtaccctatttcagccacacaggcccttttgatgatccttgaacacacccaattatgtttttgctttaagacctttgtactcgcgattccctgtgccaatacagatcttccatcattatatgcatagctaatgtccttactttcttcaggtttttatttaaaaatatctttttcattgatatttttcctggtctttctatttaaacttgttaaaaagaaagaaatacccccccataacagcttatattttaaattaaatgtatctttgttgtttttttatccctctaagatgttggctcaatgaaagtaggaattttttctgttttgtctactgctatgcctagaataatgcctgcatagtaggagctcaataaatatctgtcagctgactaaatgaatggaattatgttaacagatgaatgattttagcggaaataaatgtcaatatttgatgatataaatatatatattagattataatcatttatcagattattattttagataataaaagcatttttagcattgcttgatttatggttaggattctgtatttggaggtgctaaaatgggtaagaagtccagccattgcagatgcagaggcctttagctgaagctctagagctgttggggtccccaggaaaaagctcacatgagatctcctgatgctacgcttctggccttcattattcacccccatttctaacatatatatgttggggggaagcttaaggttttcagtggtgtggggctacgacgggtgtcccttcacaccatttcaaatggataggggtaagttatatctagagtcttagttccagaaacaaggttgtgatacatactcctgttaaaaaatttttttttgattaatgtgcaccagccactaggggatgctagacactcatattcagagtagggtccactgtctcattgggcttggcaagaagtctggtctacctaccttcagaccatttcattatttgtattctttttagccttttgtgtaaaactaacatttatttaatatttcctccattcctccttttttcagcacattccccaattggagaggggtattttggatgcatctgggttcttgcttttaggaactgtgtttaatcatggaaacctcattcctattttccaagtggcagtgactcatgcggggagagtcaaggccctgggtctctgctagtgctttccccatcctttagcatttcttcactttgctaaaaagcgtaaaagtcttttcagtgattctgtctgtgggtgttggaaaaagattttaagaaaaatgattttcaaaatgactagtatttacacgtatgagtccctatcttttcaagtttttagtttcatgccactttaggaaaataatagcccatgcggtgccaccttattctttatatcttttacacgtgattgattgtaaaggcgatgaggataccagtatccattgccaggaggtaagcaggaatcagataaaagcaaagggtggaaggtggagatagaaatacatatatgaataacattcttcttctctccaacttcatatagcttatcaaatccttaatttagctttgggaggctggtggatcacttgaggtcaggagtttgagaccagcctggccaacatggtaaaaccccatctctactaaaaatacaaaaaatttagctgggcatggtggcatgtgcctgtaattccagctacttgggaagctgaggcatgagaatcacttaaacccaggaggtggaggttgcagtgagtcgagattgtgccactgcactccagcctgggcaacagagtgagactctgtcttaaaaaaaaaaaaaagcttaatttaaactttgatcttaggatgaaataccctcatagtgtgctctgctgttagagattcatgtgggaaaaacatatatcttggtttctttaaataaattagtagagggaaaagctgaatcgacatatgttatcatataaaggagttaaaatcatgttctttggtgtgaatagaccttggtttgaaactaaactctgctgcttattaggtgggtaacttcagagaaattactttttatctctcaatcctcagttttcttatcattaaatgagtttaataacttctatcccataaagttattgtgaagattcctgggaaatatgtatatacatatttaataaccatcagcacaaagaatggcatgcaatagttgctctatagaagttaattcctttccactttcatgtcaatatttttaacctagctgttagatgatctcagatctcagtcctagtggaggaatttgaactggactttttcctcccttaacatagtacaatgtgtatgtaaatcactagtaggaattctgtcattagaatttttaaagtgtaagttaaagttaatattttgctttatgaataagatatttttgttacttctgggtggatgtcaaggaagaaatcagtacaaggtaatcccttaatatttccttgaaatgtatgtttgtagtattatgcctgattgtaatagcatgggcaaaatcagttaaaatatagtgagctgcacacaaaaccttatatgaaattctttctttggcttgataaatgccaagacctaattctttgtgaagtgggtgccatagctttcagtgacgttaatatcattcatgtaaaatcattgttcctccagcatatttttatgggtctcagaggtcacgtgttcacagtttgtgtaagaaccagcattgtggtggagtggtgacagaattgcattgaaatcgtggctcttctactcaataattgtgtgatcttgaacaagtctgttaatctgtgtgagatacagctcttagacatataaagagtaggactatagtcattatgcctattgcatatcattgtattgatgcttaagtgaaagaatatacatgaaagcagtttatgagctctcaagtgttctccaaatgggagatggtttctcattgccacatttctggctgctgctttcacttgtcaaaccacattcctgaagcaacacagtttgctgttaaagggagaatatttaaggggcccgagatgctgtaggaaagccatctttctcttctttcttttctaaatggcagcagtaagaggtctgtgagatgggaaaataggggattaattagaagatgattctacatttgcctgagaagatgaatgatgtttaatgcgctttgagaattaggcagtgctcgggagtccattttatttttctacttgagtgttccagtgtattcgttgagtaagacctagacagattattttaccttatcccaacatgcctttctctttactttgggtaagcccaaagtgtaggttctgtcatcacagaccatcagccctctgttcttacagcagatgaactgccccgggactgcttcttgggtaataatggacatcacatgggccatccagccactctctgttggttcttatgtcatccttcctgctcagacagggatttcataccagatacttctcctgccatcattgtgatccagctgctgagataacgtttcttacattttatttcattactctagcatatttataagaaatggttaatttgacttgagtttatcagtgactgtactgtgagctcacttttagcttaagtatccactttgagcacaaaagtgtggatttttttaagttatttttttcacttttaatgagtataccataagctcttataaatattatatagaaatctgtctcttatggaaagtaagctagacccattcctcagtgactagcgtaaaaatctatttctgcctcactaagagtttaacatatgtgtaccttttataatgccttgtaacttggctaaatatgccattttgaactgatatttaaaactgtataaagatcctgtggttattgataaaagtacttgatagaaaatgctgtgacatttaaaattgtcaggctgtactggatgacttttccttgaggttgttgcagacactccacagtcgacatttagtttagttgctatttctggtggcacgtgtcttgcatgggcctcatgagtatgttgacacttgcgtattgtgcatttaagaagtacctggagaggactcctcccctgtcaaaaagttttctccatcagttttcctatagacatttgctacaattccaggttaatttcttttgattttctgtttttgaacaggttattttatgagtgaagtcactcaatgagtatttcttgtgttcctattatataacaagtcccgtgtagggtctatagtcaatcacttccacctgtggaaaaataattagcttgtttggatggggatagggagaaagaaaacaatttggggagggcactgggctcctcagtgtggtaacacaaggctgatggagaggaaaagagtgtatgaaactttgactgtaggagatgcttaatatgtatttattacataaaatgtattaaaataaacttgtggttctagcttcattaggttgtgataaggtggaagggccagtgtcctgagtgtcagaaaacatgggttttgcatggctagccctgccacccagccacttagctgtgaccctttgaacaagccatttcacttttctgggctgtgacttctttattagtagagtgatagagtgggactagatgatttctaaaattccagactcttctgatttttttcctgaagcatgccacttgcattttaatgaaaatattgattgttaatatttattgagaagtataaatgtagcgggctggtaccgtctttattcccatattacaaatgattccatttgtaagttaacaatccttaaatctgttctggtgtcagagccagggtttgaactgagatccaccagtttcaggtatgcacatgtttatgcaacacagcctccagaatgaaggctgatgaagacagggacgctcattccccaccccccaatcctctgtgtaagctttgaagatcactctggaagagtctacctgtcatgaaagaacgcagatgactttttaagaatatttatgtagtcttatatttcagggtacctgagaggccctttaaggtcctaaattattttttgttctatacaggaatcctttctgtaaaacccttgactaaaactgtctctgctaaaggatgggtattggcaggtgttggggtgagttgacgaaaaagcaaaacaatagtttctgtgaaaatgcatgttaaagagaattagcagtaaatgaacgtgtgtttccttaaataacccaacaccccaatccacctagaaccgatgacttttgctagtttttacccatcacctcaggagtcattctggtttcttggaaacgtgtaaagtatctgcttagggaaatattattttatgttgctgatgttgggaggtagcatctactttagttgaggaatagtcagctaatagttcttttctttgctgtgcttttgcttatgtatttgttcagacctgctgcttaatgatttcagctggccacctgccatgtcaaaatcactttcctctcaagatctgtggaaccaattttatctgaacacaatggaaaggaactcaccattttgagctacatatggtcttaaagataccatcttaaataaagagaaagtgaagaaaacatggtttcaatcattagtttctttcccagagccactttctccacctctaatatattgtttattttctgctaacactttaaacacttatactcagttaatatttcaactcttgtgtgaggaattggtttttatgctttctagcagacagattgcctgagactgacacttctgaccaagtaaaataagcatatttaaaatgctctgtagcttattttcgcaacgtatttgtgaacactagaacttccatatggaagggactgggggagaggatgcacacagtttgaaaaactattcaggaactggagagggtaatgaaaatgaaaaaatgtaacttatggcctccaatctatcttttcaaaaagtaattaaaaactgaaaagcaaaagaataattacttcttagtttaatacccccattctaacacctgatgtaatcattagggtttgatgcagctcaagataaacattgtataaaaagagtaatatacaaatggaatatattgtcattcacatgcataaatagattagcttactattttagagcactgattcactaatttatattcaaatttgtgtttcttacccaattcatgtttctagcctcacttccattcctgagtcatagtcaggatgaatagtcatagcctgaagatttaaatttagatgttctaccatttactacctcataattaatctcaagttttattcaccacccctccaattaagaggttcttctattagtcatttgatcttctatctcagtcttgcttacactcccttgaaaccacactttgatcttgtctcaaatctaagctccacctttgtcttactagttgtgggttcttgaggaaggtgtctagcagagtgtctggctcatagtaggagattttaaagtattgtttcttttttccttgtctcagagcctcatccttccccacccatccagatgatcctgttcattattcaaagactagatctgatcacttctcttacatggaccccatgggacttgcattcttctctgagccaaataaggaaacgtatttgtcccttaataaatactctgatttattattttctttttcatgttgtatcattggagtttttggatacaagcaatagaaaggatttggctgacatgggtaaagagaggaccttttgggagggctaaggtagctcactcgattcaccagtctagagaaccaagcttgggaatggatgggaagcaaagaggtatcacatgggtgagagacgaggaatctggtgaacagtctcataacaggagcagttgttgagcaagccaccaccaccgaggtgaatgagctctgactgcttcttccactgttgtggcaattgcttagggtgcaaataagaagagactgtgtgatgggttcagcccagctacaccagggcagttagtggaaggatctgccctttcgactgccctagtacgaggccaggcacctgaacttattatcaccaaagacttcacacagcaggagacacagaagtccctgaaaggaagtctggatgctgttaggaaggagaaactgaattgcagtgaccagaccaccaaaacgttccctaccatttttacccttcaaactctggaaattttcatttcctgaagagcatagattgtaattatgctaggttttggagttcctaaagtttgtatattcatgacatatttattaaccctttaatatacatgtaccaacatttatctgaggtgccgtgtatatagcagtgtatacataaacattcctgtcttcctggagcttgtattttggtggcaaggtgaggcagtcaatgagcaagattagaaaaatgcagcttgtattagtgatgtgtgatggaggaaaagatgacatggcagggcaatagaaaatgctatggtatatgacttgaagttttaaaaagtgattggagaaggtctcactaactaaggaggggacatttgaacaaaaactgatggatgtgaggaagctagcaatgcagatatatgagggaagagtgatccaggcaaagggaatggcaagtgcaaacacaggtgcatgtgttcccctggcacgttaaggaccagcctagaggtcattgcagctggagtggaatgaaggagaaggaaagtagtgggagatgagatcagaaatgtaggagggaaccagactaccatagatgcgacacatgaacaagatgtggcctctgcttccaatggccttgtggtctaagaggaggcacagatgtgaaaggacgtacttcagtacattgcagcaagcaccaaaattaggcagagggtgcaggctaactgcacccaggcaggaggatgggcctggttagatctctgcttgtctgtgagctctttgagggagtgatgtatcttattcattttgcatcctgggtggcttgtagagtgcctgacaaataccttttgtatatatttttgaattcattttgagtggttgaattacagatacaatgggcataatgtgtgagaaggagcaggattttccttaatcacagacagaggaggcttagggaaagagattaaggaaaataggaaagccacagacggttgaagagccaagagttgaatctctgcagtcttctctctactcggtactttttctgtccttggcatcattgctttgatgttgtaaagtattgaccacataaactactataaaagttttttgagaggtaagcataatgtctatattagttgcatgatctgcaacatcaaggtagttgattattttactgcaatttaggggtttgatttactggcttatttgtgctgttttttccccatgtggacggttttgtgcttgtctttatactttttctctacagggcactcaaggaacaccaaaatgtaaaatagaaccacaccattgtatagcagctgtagacagatatcagtgaggctgataatttggatttttctattgcaactgctactgccatctagtattatctaatactgagtggcttcttccatgatgacttcttgaattgtgaagtggaaatttggtagccttatgtaaccaagcacttacattatttaattaagcaaggtgctacatgaatcaacaaagcaacacaagctgaatatcaggaaaacacatttcaattagtgacagcaggaccagtgcctgaaggccctattcattgggtagaaaatatgacaatgccagggaaaaatgcaaattcatttcttataatattctgtgtgctgaactgctaaactaatatttattagtaatcttagagtcagtagtctttgcatatacgttttacttcctttcctttatatttcatttatcaataagtttttggagtccccgtgggtgaaaatgttgatctgttagggatttagaaaatctagtaaaagtttgcctgggctcagaagcttattaatctatttgaaaaatatgtgtctgccactgtactaggcattaagcatacaaaaatgaataaaatatgaagtctttttatatatatatttttattatactgtaagttctagggtacatgtgcacaacatgcaggtttgttacatatgtatacatgtgccatgttggtctgctgcacccattaactcgtcatttacattaggtatatctcctaatgctatccctcccccctccccccatcccacaacaggccctggtatgtgatgttccccttcctgtgtctttaagctctttctgaacaggagagaagccacaaactatcatatagtgtgatacgggctgtgatatagaatatctgggagtgctttgagaacctacaggaaagaggaggtcttctaatgaggtcataggcaatgcttccaagggagtttttcttcaaatggaggaaaaggaaaagggattctaggtgaagggaataggatgacccaaggtctaggagtttgaaaatgatggcacttgaagagatgcatacaagaatgctgggctgagggatttgcatttgccccataggtagtgaggagccaggagagatatgtgatattccaggttcctgtggatgaaccatccaggtgaagacatcagaatacagtaagagtcttaactttgactgcaggtctagaactcacaagggaagctggcttgataacatccccaaaggagagaatttacattgaaagaggaaggctgatgacaagacattagagaaaagcaatattttaataggtaggttgaagaaatgatatcagagaagccaggctttgccttgtgtttggaacaggcctgccagtagatgcctttatagtaaaagataaataacaataaatgaaatgcttttattgttaataaaaatgttgatgatgatgacaatgatagtagtagctaatacctattgagcacctactctgtactgggcacagctctaagaatttttcatttaatcctacaacaaccatatgagataaatagtactgttataatatcattttcgtttggcagataaggaaaccaagatgcagaggctttaaagtcagttgtccaaggtcacacggctaataagcaatgggtttaggacttcaacagtcttgcttcagagtttacactccctatctgctatcgtatcttttaaatagtctaacaactgtttgggagatgtcttatcaaaattgctctctcgaccgggtgcagtggttcacacctgtaatcccagcacgttgggaggccgaggcaggaggattgcttgagcccaggaatttgagaccagcctgggcaacatagtgagaccacttctgttaaaacaaattaaataaaaaagtgctctctccctgggagttcaagatttcagtgagctatgattggaccactgcactccagtctgggtggctgagggagaccttgtctctaaaaaaaaaaaaaaaaaaagctcgctcatacccaaagtcagggcaataaaggtttgagtggtcaaataaagggttgagtggtcaaagtcacataaaggtagagcttcaacagattatttttctttagattttcaagtcagcatgaggttgtctgatacaaacatcatagatgccatggttaaatggttctgtttctcagaaagccccctttcttcttataactgccccttcctttttaacagaccagcttagcctgctcagcatgagtgagccttgactattcaatattccacaggcccctatagggcctgttggtggccatggtagggggcatagtggacttgctgatccttgtgattattgagtatgaatttaagatgcacatggctgaggctggtggtggtgaaggtgcgaagatacagcagcatgaatccaggaggtggaggatgcagtgagccgagatcgcttcattacactccagcctggatgacagagtgagactccgtctcaaaaaaaaaaaaaaaaaaaaaagatttgcaagagttaccacctgctgctataagactgtaaagagcatggactaaaactgaatgggggtatggggtgccaccttggcaggagttgactgagcctcaaggtttgtttggtttttgatgattctaagctgacaatcatagggaaaaagaataagagtgcacattcagtttaaaaccaaaatatactcactatcagcatagcaggaatacagaataagaagtccacagggcctggaaaagtcagaaaagactttgtcaagggaaagagattacagctgaataggtggaggagaaggtagcttgatcaaaaatgtgctgttgggaatacatatggtaaaaacaaaagataaagagactggcccaagcatcaggtcagatgtgtggagaggaaggtggaaaataaagtttcataaataaagtgaggtcagattttatggggccttcaaaggagttcgatgttttagccatgggaaaaatggggcaggtgggaatgcttgaactaggaattaatgatgaaagaggtatttgaaggtcattaatcctaatatgttggattgcagagagactgcaggtaggaagggcagttagaaaactgtaattatcaagtgtttgagatgggttaaagcctgaaggaagatgtggatggaggactgagaagcaaggagcaagtccaatgggcagtatagttagatgaaacagaagggagactaaaagcaggttccctatcttgccttgaggattagaagactgaggacatcaccaatgaggtacttaggaagataagcctattttcattattagttagaaaactattttttttttctgaattgattctcctaagaattttatactgtattgttttcaagatggacatcattctgtctttgggatgtgtcttatacttctgctggccaggccgtaattgtgatatcattgcttttgattgtggatttgtaccagaacttgcagaatgggggccagtggctcagaagaaaatctcggagataatatgtgatctctctttgaggagatgctgtagtacctccctcttgatggcagagagaatgattttgtgtggagaagcacagaaactgaaaacaccaagtcacaatttatttagtagattccaactgcaaataaagaaagtttagggataccttaaccagtttatttctttgtaatgtaggtacaagaatatatattacaaaaaacaatctgggcaagtttaaaagcacattttaataaagataaaaaaattttaagtgataaagtattctttcatagtttaattggcctttttttcattcccagtacatatggcaatggggtatcttacaatcagtggcattttcaaataaataaggtaaaatatccaggacccactgcttgtttgaaatttgcttgctggagttaagagaagtgaacattttaaagattttttttttcctttagacagaaccttatttcatttgtgaaggctgactggacttggatgctgcccactagttaatttagtgtggcaaaaaataagaattctgtgtctgggcttcactgtctgcaaaaatgaatgcattattgtaaaatgtgcactaatctaaaaagtgtattgccttcctagaagtctgagtaatgtcttacacacataatcacactgcccgtcttcatatggacatgagtcctatagtgcttgagaaatggaaattatttgactgcatcagctagtgcatcgtacttctggttattttgaatttttgtaatcagatgctgctgaggctgtggccttttccccacctcctctctcatacatatatatgagtggtgtgttcagtgaaattttctgacatgaaaaagaagtccttaaaccaaaaataataataataataataacaataaagggaccactgtcttagaaaacattagttacccgttctctttccttctcaaggaggaatgacttcagtgcaattaacaatccgtgtctttgtgtcccagtttgatcttgcccagtttgaaacagcttgcactactagattggttcttgtaagtgttgaaagttcttaattacaaattaaatcttgatcctgtaacttggtagtaatcctaccatctatatataactttacgattttcagaggactttctttattgaaggcagtatgaagcaggaagggcaggcattgtgccactttacggttggggaaactgagacacagagagagtaaatgacttgtttgggtcatagcagttagtagtaaatgtcagaggagggatggaacctagattgggtgactccttgttcagtgctcttttatttttacttctcctgttcatattgaattgtttcagaggttggaattaggaacaaaataaacctatatcccattttctgagtcacagtccctcagacatgtgaaggcagcaatcatgagttgttgtttgttttccagccaaacatatctcttttccagactgtagtaacatagagaccccctcaaagatccctgatgtgacagaggtaaagacatttactagagtcagaggtcagctttcttacctgtgaattggccaaaggcatctattaggctatggaatgttaattatttcctgcatttgtctttggctagccttctctaaatgcaccataactcacctgaaaaactaccagatcatgttgtttttgagttaggtcaccagccctcatcaggatcttttaggcatgcctggaacgttggttgacaaaatccaatgaaatgaccacctatttttctctagccagtgagtcttaataggaggtgagcaatgggaacacctttaaaaaaaagatgcctgtgcctcatcatatagttactgaaccagaaatgaggggagaagatctcaaagatggatattatgatggtaaatacacttgggaaattctaatgtatccctgagataccactgtcatactactaaagcctaaaatgacatttaaaaaaatgctaccacctatttttattggctcatacaaatcttgtcatcatttgatattgtcatgacatccgccaaaattataactgacccaggtctccctactcatgtacatattcattcattcaacaagtattcattgagtacctggtacggtggataaggtagtgaataagacaaagtctatatcccacagagctcgtattctaatgggtaagaaggcagcaaataaataagcagaaacatctcttaggtagtggtaaatgctacaaagaaagatgaagctgggtgaggagatatagaataatgaatagggggttgcaagctaccaaaacagaatggtcaggaaggctgaggtggtgacatttgacagtcctaaataaagtgagggagcataggaagatccagggtgaacggtagtccaggcagagggaacagcaagtgtcaaagtcctgaggacaaatttggactgctagccttcatattagtttaaaatcattgtttgattttataagacatactagcctttcagaaatataggatataattgatcagggcctgaaggatgaactcattttcttctgttagctccaggtacttcttaacaatacttaatctacttttgctgtttgctctttgtagacaacaatgcagaagttggatgcatcttctatgacatttttggacttgtgttttaagagaggtacattgcctctttggggatctggaatcttcctgatagcgagtcagcaagattggtgggcccaacactggcacatgtctcagccaaattctctgtgtagcttctgacaaatgccaaactactggtaaatatccaccccccccccccccccactgaaagccaaggacaataatattctttattcattttctggctctgagtatcttttctttttgtttttgcagcctaacctttttgtcatctttggcatttttcacaggctccagctcattcctggctttagttgaacttttctgacattcttcatataggtcagtgctactcttatatttcattctttgttatatgattctccttccatcttttatgtggttgttttgaagcctgaacccctcagaaagtttcctctgtgaccacattattttctctggaagcctgctcttttatctcccctccgcagctgtttgcaagtgtgtgtatgtgtatgtgtgtgtgtgtgtgtgcctgtctgaaatgttttttagaggctcattcctttctgaggtaggtaggttcctatttagaacttctgagcctaacatcatgcttagtttacttctaattttaatgaacacttttattaagatcctgtcttagttcatgtgcactgctataacaaaataccttagactgggtaatataaagataatagaaatttgtttctcccagttctcaaggctcagaagttcaagatcaagatatgagcagattcagtgtctggtgagggctgttctctgcttccaaaatggtgccttgttgttttgtccttacatggtagaaggtggaagggtaaaggggcctacctcgatccctttagcccttttataaggcacgaattccatccaaaagagtagagcccccatggcttaaccacctcctaaaggccccacctcttaatactgttgcacggaggattaagtttcaacaagacttttggaggggacacaaactttcaaaccatggtatattctaaatttgtgtcttagttcatcctttctctttcacaaactccaggatgacataatttatttcctccaaaatttctgtcacaccagcatcaccttccagtgacttcttcttcttagaattatgatagaggagctgttaatcttcttttatagcatagcaattgagaccatgggaaaatctgggttcaagtccaacaccaccgcttactctctgggttggctgtaggcaaattgttatgaagactgaaatagtgcacaccaagtgctttaggaatgtgcttggtatatttttagtcctcaataattgctagtggttaccataatcattatcagcatcaatatcatgattctgagataagaaattattgtcaagctaagtcaagaatgaatagattcactaaacaagtatctggactgtcgacattcccctaactataatattgtaactctgtaaaaatatttctaatctatactcagaaaatatccttcacaccttctgttcctgagagcttcaatgtctttttatacagcagtttaactgtcctcaacttctcgccccaaacttacatattcaaacattcatcaagatgttcaacagaataaagggccttaccaatatcaaacaagcaccctttaaaagtgctctgtaaaattatcctgtaatttagaagacaggtagacgacgacatgaccacataaaatcctgttattgttaggaatgattactactccttcaaatacatacaaagtcacttttaagttggttaggcttttgaataaggagagaggaatggctcaaccagtcattttagaataaataattatcccatgctgatagagtggaatggaataatctgagagtgattgtgggagtttggacttcaatttgaaatatacaatgagttgttcatgttgaaaaactgaccaggatgaaagactgttggagttattagataattctcttccgatagaagctgagctaaaaataaacttcctgtttacttcctttcctttcatctaaagtcaagacgatgcatgtcaaagatggctgtgcttcattcattcattcattcattcattcattcagcagttatttattgagtatccactgtatatcaggtactgttctgggcattagaattacagaggtaaatgcaaggtgcctgccttcatggagtgtacactgtacaggaggggattagatttaagcaagagaataagccagaaagataatttcagatagtgttaaggcctgtgaagaaaagagaacaggccaatggaatgggtagtgcaaagagggaggaaatgagatacttagagacaagaatgatgataagtttcagatctggggagcattctctgaggggaaactggattttatattctatccagtgtggattgagaagccatttagaggttgcaagcaggagagtaacatgttctggatttcatctcacagcaattcccctgtgttcttaggataatgtattggaaataaatctgactggatgtgaggatgccagttaagagtctggtccaggagaaaaagggtggtggattggatgagagttggggaagtggggatggagaagagtgactagagtcaagatttattttgggttctgaagtgacaggaactcccaacagacacagctctgtggggtggtaaggtagagggatgtttctgacctgcctgtctggtggagggtggaaccctttgttgaaattagaaaggtagaggagctggctttttggagaggatagatatagagagtgaggaatgaaaaattaaagtcagggctttaaaagcctatgaggcatccacgtggaggtataaaatagtcagccggagggatagtcaaagcaagagggaaattggggaacattagcatgttcataatattaatactatgggaataggggagatcaacaaggaagaacgtagagagagaagaaaagaggacccaggacaaagccctggagaaattaattagtgggtagagaaagaggatgttgaagactgaaaaggaacagcagaggagttgggaaaaccaggcagatattttattgctaaatccaagagaagagctttcagaagttctgaaagttgtccaccatgtgaagttctactgggagattaagaaccggagagcaggaaaggcccatcatagtggccagatggaagtcattgtgctgtaagcaaaagtgttttgagtggggtgtaggtgggtggagaaaagattacagggagtgagagagtgaatgggacgtgaggaagcagatggagatggtgagtgcacatagtttttcaaagaagctgtgaatgggcggaacctggaggggatatgagtcatcacagaaatattagacatttctgagatggcacctgaaagaaaagttgacctgggagaggactggctggcatatagtaattactctggggtttaaagggtaggaatggcttgaggttaaggtctctgacctctttttagcttaggacaatctctcttcctcttttgttcctcccaagaggacgttgtttgagcatccatccatgactgaaacttgcctgtccttgtacattttagtaacatgagccaataaatttgcttatatttttatagcttaagatgtttgcaatagagtctttttattgtctatatggtacatatgtctgtatctatgtgatacatggctacataatcatataaatatattgtctacatggagtttctcagaattaagaaaaagcacaattactctgtagttcaccctaatagttatctaaactaaggaaagggggaataaatgaaaaaaagtaacattttatcataatgttgtttttagatagcatatatagcatttactttaccagttcattgtaagttggcaaacatttagaacttgaaatgaaatcagagctcatctggtttagtttcattgagtagaggaaatggaagcctaaagggagtgaatgacccatggaaggaaagaacctaggacctggctttcaacctaggaaccagagctttggagtaacacagacctgggtttgagttctgcctctgccacccatacccttgaaactctgggtgaattatttagctgctctgtgtttattttctaatccataaaatgaaattataagacattgatcttgtagttatgaggcatatatgagattgcaaattaactagcaaggcgtctagcacatagaaatcccttgatcagtgttaaatctgtagtgtcccaaaaccttgaatgaattagtagtaagctgaaaaacatgaagatcatcctagtatataaaaatcatactttcctctcttgtcttcttactgttagtttttgggtaaaccagtaattccatttttcaacaaattatttggataattattgattcatataaagttataagaaataacagaaagaacttgtgtacagtttcccccaatggtaacattttgaaaaacttaataaaatatcactcaataatttgatgttatgaacaacaaatattttactggtgctaatatctattaaaacatcagaaaattcaattttatgtaatttgggactaaagcaatatcctgaatttcagtatctgttggaaccattagacaaatggatctagtgccacagacagctgactttgctctgacttggtgaccttggccaaggcacttaatttttatgctctagagctaattataaattgggacaaaagtactcatctctgcttaattcaggggagtgttccagattaattcgatactgtgcataggtatcccctggctatctctcctgccacctttctttatatactgtctatgttttccttttccttctttgccaacccataatgattttctcagttttcaaagcacaccatgttttatctcgtttctatacattttctaatgctgttcctccatgtctatcttattcccttcctaccctgcctcccaatctatacatacacttattcttcctcctcttctttccttccacacccccccccaacttctacttaatttttgaaatcacaacttttacaaaatcttcaggggaagctctgcataacccccagaccagattaggtcccagtggtgtgttcccttagcatcctgggcctccattcacagcactttaccccatgtccttattgtgctttgtctagtgtttgtttttaccagtatgtgaagtgagggcagggagaagattgccttattcaccacttcattgtacttatcacagtgtctgccacagagtggatgcccagtaaatactcattgaatgagtgaatgaatacatttaataaacatacacttgcttttttggaaggaaacgctgtgcagatcaggtggaactgtgggtggtatttctatttagtatgtgactcatctatattgaaggctgttaaatgtttaaagtgtatctttgtatggtagtttggttttccttatttctttcttttgttttcatgtcagaattactgtgtaattatgtcttgcaaaacacctcaaatggtggccaagataattttttttttttttgaggtggagtctcactctgtcactcaggctggagcgcagtggtgcaatctcggctcactgcaagctccgcctcccgggttcacgccattctcctgactcagcctcccgagtagctgggactacaggtgcccaccaccacgcctggctaattttttgtatttttagtagagacggggtttcaccgtgttagccaggatggtctcgatctcctgacctcatgatccgcctgcctcggcctcccaaagtgctgggattacaggcgtgagccaagatgaattttaatagggaagacaaacccaaaatagagatgaatgtttactgtggtgcattaaagcattaaagagttgtgaatgtgaagctctccccagtctttagtaacatcaagttatcttggtacaggaagcaaatagccacttctcattttgcctcaggtggtgaaaaacttcccattttaggccagttgagattgtatgtgctgtatggctatgaatgccaaatatgagtcttaaactccaaatatgtggctgagctaaaagtaatgttaaattgtactgtctgctttggtgtcttataatgacttaaaataatcaaagtaagaagaaatttttgtacctatgtcaactgagatttcatttgttttttttctttttcttcctgtagattaggacttataaatgttccccttcagagtactagccttgatttatcccattgttcctgccttttgctttctctgtctctggtgttgggatagcccaataaaaccaactttcttctatactcagcaattgcattgggagggaggagcagagacttttccttgtttcatttctagtcactaagagggtattttgagccttgaggtgtatatatcagagatcctagatacctagatcctatagttggtttactatcagaatcaccaggcaaacttttaaaaaaagtgcagattctgggacccatgcccaaaaattcttattcaataagtttagggtgggactgaaaatcaaactcttttgatgatactgatgtataaccaagtttggaaactactgtttgggaatcccaaatgcttgaaaccctttgtgagtctttggtgtctttgggctaaaattccaaaccttgagcatggtcctttgtggtctgacttctcctggtccattgctccagcttcttttctgcacgcgaccccctcacactcttctactgagccatggtaactacctgtaggttactgattgctcaatggattttcttaacttttggacatggtggaacatgttttgccccctccatgtcctgggtaattcctgttgtcttttggacttctctcacctactctgatagagctgggcttgtctgggctctcctggtgccttatctcttccctttcttttcctacttatcacactgtattgatttgtcctgcacatagtgggaataaatagatagttatgaatggaataagttgcttgctcagttttctgtctttcctactgtattatgagctcctttaaataagacctgcatcttttccactttgtaggcctcgtgcacgtgttagcatgtggagagcacttaacaaatcatagttaaacatgtaaattaataactgatattgaaaataaaagaatcctgtcctttgggtaaaagatcctgcagtagttaatgttctgagctggaaaacatttgcctattacaatagacatgtattttactagaatagaaaagaacctgggccataaacagtaattgagattgggaatattaatagaaaaacagagaaacatacagttaaattgttctgtatgtattttcaagtgttttattttattttcatataggtaataccatcgtatgttacaaattttaaagataaaatagtatacagggaagaaagagtctccttcctgcctcatttctcagccaccaatttctccaacccagaggcagtcaacgttttagttttatacctttcacaagacgaatggtaacataggctgcaggctgtctgtttgcttttttacttactggtttgtcttactggcaaacatctatataaatgagtgagtacacaaggagattctttttatctctttcattgtttcaaagtattccactctatggatatattccaattcattttactagtccattattgatggatttttaggtgaccgttttaaattccatatctgtgaattcattttttcacccatgtcattttgcgcatgcacatgtatatgtaggaaaatttttagagctatattttctaggtcattgaatgtgtgctttgtaatattaccaaactgccaaaatggggattatatcaattgttctgttaattgtcaccaccaacctcaaatacctgggaccttgtgggctccggatcaattgttctgttaattgtcaccaccagcctcaaatacctgggaccttgtgggctcgggccatcaagcagatggtctttcagactgtgcaatgtattctgtaatgtgtacatttggttgagatgagttgaaagtatttgagagtacctggaactctgaagctacctcagctacctgaagcaaccattgaggctgaattttcagaatgttagtgtttatctattaaattaatcgtttatttagggatatttagttaataaataaaataataaaatgtaaacattttctcattggagttttatcagtatttctgccattgatccttggaaaggggacttatatatgattagagtcaggaatttggaaatcataggaagtaacagcaaagttgacagttgactgaaataattaaaagaaggtctaggaggacatggttcttccttgtacacctactggtcatgcccaatgaggagagtcattcctcctatgctttccattttgttgaaggatcataacaggctgcactttctgatagaatttcacatagtgctggagccaggttcaccatcattttctttattttggtttgcatttctgtcttgaggatctaaatttttttcttaggtaacttttctggcatcagaaaattttctcaggcatacattttacctgaaatacttattatgaacaatgaatattaatcattctattgagactggcagaacctaggatcatgaacaccacactttaaatgtgcttttattttaagtaagagtcatttttttctgggatttttaaaattgttgataaaaatttaggaaattcagaactatattttgaaaaggaaagaaaatgtttctacctttatcatatgaatgcagaaattattgatatttggtatgttttctttgatcttgattatatagatttcttcacattcttaaacacttatactgtgcaatgtatgtagcatcctgaattttcaactatatgaaaattacatattttttcaggttaaaaattattttaaatgattttaatgagatattaatattctatattatgcatataacataacatatttaaccattctcatattgtgggatatttgtgtttctatttttagctcttttaaaatgtgctgcagctaataacttttctgtgaatgttagtctatgactatcttgctatgcatattgcaagtggaaataccagatcaaagggtatcaatattttttaaactctagatacaaaaatgccaagatgcttccagagtaagactctaatttatacctccatcatcaatttatgaagttgtccatatcatatattcttttaactttgtcccccattttttaaaaacatgcacaattatatcttcttgtttacattttaaacattattattagtgaagtagagtattttaaaagtttgttactcatttttctttccctttttgttaaatatctatccctgcctatccttttgtatttctgtctttaggagacttgctgctttttcccagagattttaatgttctttctatataaactatatttcaatggtcacagatattttctccaggaaattccagcttttttgccttttaattttctcagactgggtaaatttaagaatttatttatatgaagtctactaatcttttactttgtgaattctttctttgcttttgtgttgggaaatcctttctatattcaaagtgatgacaaatattcatccatattttctcctattttaaaaataatttcattaaaggataagttcttaaaggagtaattctataatgtatcaggtggtgggaaatgcagagaagcaaagtgaatcaagtagggggtatgtgaagtgtgggctgtgaaggaaggcctcgcttaccagatgcacctgaccagagacctgtggggggaggggagggagacaagccaacgtacctgatgctccaagcagagggatcagcaaatgtaaaggtccttagtgggagtatgctcagctcaagggctatcaggaaggcctgtgttgggggagcagaatgagtgcttgggagagagcaggtggaaatgaggcctgaatttcagaataggccgggggcaggagcattctagcctctcataaaccattttgggtgcttgggtttttactcttaatgacacaggaatcattgcaaagacttaaataggggagtgacctgacatgacttacttttaaaaaggattactttaactgcttgagaaagcatagatatctaaaagaaaatgtccaggcacagggatcctatgtataccctccttccttttgaaatttgtgctttcttgcttataaacttgctataatctatacctaatctattaaaaacatatttcaaataaataagaaagagatggatgtagcagttcagttgtgttcagatgtatgtaacaaaccctgctgcagaggttgaatccagtggggctttatttttctctcatcacaggaaacctggaggaagacaattcaggactagttcagcagctcaaggaaggcctccaggatacaggcttcttctactgtcctaaacatgtatgtggctatcatcctcatgttgacaagattgatgctttcctccagacaccacattctgcatcctaggcaggaggaaggagatggtcagaagacagctgaaactgtcttttcactaggaaacaaaccattttcctggatcctcagtagtaggcttctgattacttcatggccagaactgggtcataccactattccttgtgggcacgttgctgccttgaataccagctataccttcttactaaggaagatggaactaacagtgtttgtgataatggatagcctgtagaaaaatggatatagatgagtctcaaaataaaaatatacaaatatacatgtcctagtcaatatacataaaaattacaaaatctgtaatattccaaaacgcaaactaaaactgtcagttaccactttgtccgtcatgttggcaatttaaataaatcgataacactcaaagttagcaagaataggtaaaatgggaatgttttatggcgccagaggtataaccttcctgggaacaatttaatcattcatgtggtgtgtatgtaagtgtatcttattgagggtttgctttgcatttccctgatgactaatgaagtagaggacctttgtacaactttctaaccatttgaatttcccctttgatgagctgcctgttcaagtctcttgaccatttttctacttaattataatctttttatataaatatgaagaggttgtttatattttctagatacaagccatttgtctggaatatgcacggcaaacatcttctcctaataagtagcttgccttttcaaagctctcttaataatttattttgtgaacagaagtttttaatattatataatttaccattcttttattgttaagtacattgtatgtcctgtttaagaaatatttccttactccaacttcatgaagatattttctaatataatgttctagagatttgtttttaccttcatatttattaaaaagactgtcctctacaattacttagtaatattacctttgccctaatttgaatgttttcatatgcattggtttctttttgagcttttgcttctgttctattggtctatttgtcaatcactgcacctgtaccactctctcttagttaccatagtttttaaataacttttggtatccaaaatttagcaggttcttccccatttttttcctgttcagaacctataaagtctttcatttacctttactttagaaattacagcatacttccgtgacctattaacttccaatgttgactgaagtatgcataaatgttttacgtgtatatttatcaaaggctaaaggtagtatctctgtcctcttcccaaataacgcaaggatctaaataccatttaactacaatcttcccattcttacatataatattacaattgttcagtattttacttatacctgctttttgatactccccaaataaaccattattactattttgttgttgtttttgtagccagtcagtagttctaggtagacttaccaacatgacaaccagtttatttatgtattattgtttttgcattttccatgttccttccggattctgtctggcttctaagaaggagcatcttttatggacagttctgagtgataaaatctctctggcttactttctgaaaaatatctttattttgcttcattcatgaatatagtgttgctaagtatagaattctaaagtgatagttattttttcttagttcttagaagataatctttttggatgtccttaggagatattttttcatcgctttctgtcatcttctgtagctgatgaaagaagtctgtcaatgtaattatggtttccttgtcaataattgttttctctgtttgctttagctgtttcctcttttctttggaagagtgcagttttacttgttgtgttagctgtggtatgtttagaaatactagagacccgtgttttccttctattatggaaagttttcaaccattactttgaatattctctcccttattctctcctcttttatttttagaatttatgtatacacagcattgagtattctgtgcctcatgtttcttaatgaatctttcatattttttatttcttcatttctccatgctgcattctgcatgattttcccaggtgtatcacctcccttattacctccctctttagttggtgtcttttttgttccttttcaaagcaaccttttattcccacagagttataaactagtcctttctactcattcactgtatttatctaatagtccattttagattttcctttcttcagttgtggggatacaaattattgtctatttttatctgcttaatcttcctcatcatgttccatttccttttgtgtttcatagcttttctttgtgagttcctcttctgcagaagttttgatagttgttgtttgtatgtacatttttgaggaggggattccatgtgtcctggcttctcatggactgggtggcattttgaggtctgtggcttcgtgtagggagactgaatgctagctttcacctcatgtggtcccaagttcatttttttttctcctcatacgctttatggcccaaacccctaagttctaaagtctaaatctaaagtccatttgaagtgcatcaattcctgcctcttggtcaggaatcaaatgccttctttgtttctatagctggggcattccatttcttagtttcaagcttggctttgtaatgctttctttgttgtatttgcatgcatcatttaagtgtgttagtaatgtcattttggtccatcgtatccttttttctcccctttatttgttttattgtcaataacttctactttctgcctttagctttaattattagttactaaaacaactttatgctaacatcagaggcttataaaaaatagaaaaatttccccataatcccatattgagtcaaaatgatctatttttattctctagatatccttcaaatctttattcatagggtgctgttgttacaatcatgccatatatttaattttgtgttataactctcttctggtttacattttgcccgtatttctttgtaatcttcaaattaccattttaatggctctatgatagcctcttgaattggtgtactctatcatacttacagagtttgttttctgtttttccttgtttatacaaatttccccagaatatttttgcatttgtagtgtttgcattattttctgcggctaaaatctcagaagagaggatgttaaattaaaaattcttaaccatgcattgccaatttgacctttgaatggcttttctcattttacagtgacattaggaataaattcacataccgacataaatttaatacctactgtgtgggaagttctgtgcattttgagtggcatagtgacaaataggacctgcttcaagtttcaaggaatttacagtgaaatcaaggatatagatatactatcaacttttataatattaggataaatggagcaagtggtacagtcaaaatctaatcaaagaaggaattttatagaagaacttgtatttcagccagggatagaggaaggggtggagtttccctgtacaaagggaggctggataatattccaggctgagagaacttaacggagaaacagccagaggtatgaaaaagtctacagtgcatttggaaactattgaaatcgatggtgtggctggaacaatgggtgagagaaaggagcttgtaggagacttgaagtactttgccgaaggattttggttataatcagccagaattttcatttctgccactaattgcaaatgctggtttgagaaaagcatgcactgtagattcatggtagcctgtgattggcagaacccaccagtctcctattttatagatgaaaacaatttctacggaaattaagaaaattttccaagtttacactaggagtgtatctgaaggcacacttgctccctttttcaagaaaaatttgtttagcatctgtttgtaactcagtagtaagtgcttggaggatagaaagtaaatacagtatagggtcaacttctgtagccagctgggggaaaaacaaatcaatatttgtaaaatggcaggataagacaatgatagaaatgagtaaagggtattttgagaacacagaagaggggaagctatttcagcttggcaagaaggatgaagagtggaagatggtggctctattaaatcataaaggatggataggaagaagcttgccaggtatacctcacccatggtgagggaagggagtttcagcctgagcaaaggcacggggtaggaatcagcatggtggatgtgggaatcagagcagcttcgcattgtggaagaatcacatgtgaggcagagagtggcaggatataaaaccagggctagatggtgtttgctatggtaagtagtatgggcttgatttttttagggctgctgaggatcttaaaatatttaagagggaaacttggcaggactttctgattgactggatgtgggagtaaggatgtgagggagagaagagcaaaatatgattctctggtagacttcttctttcttctctagttagtgagtttatcaagatttaagatggtagtggttttgtttcagcagaagccatgcagtgtggtgtcatgtggcagtggaaaaaccatcatggggcgtatggagactcaaatgttcctgaaatgcctgagagaacatccagggacatttggaggtcactgccagaggccatgcacattgtccagttttcagtggtttctcttcgttgctaagaagcttgaacatatacagaatgcatttaataatgttcagaaaaccttcttaagtggacaatctcaaatgtacaacagacaaagcagaatcagatatttttttggatggtatacctcattagtacagaataattacaacattaggtgataataatagcaactgatatttatggagtactcactgttttccatgtaggatgttaaatgctttacattcgtgatctgacttaatccttaccataatccctactcaaggaaacaaaggcacagagcatgtaattacttgcacacggtcactaactccaatgcaaaccctgaggcatgccaactccaaagccctcatttataaactccaggccatattgcctccccatgaagctgatacgcagacaagtgtggtgccactttgagattctctgggttcagctgtcaaacaatgacatcattaaattatccatgtaaaataagaagttgagtcctctatatccgctgtgtttgaggagtggcaggatgtgggatgaaagaaagaaattggattgcctctgaagccctctgaatttgtaatagaactacagcctcctcaaaccaaaattataaaataacctacatcactctgaaagaattttcttactaaatacgttaatgtgagaagacaaaaccaaaccaccaaagataatatttgaatattgataatattcaaacctcatttgaaatcaaaccactagaaccagaaaagaaaatgaaatgtgactatttaattcctcagcagagatatatgtatgaaaacataatttctatcactggtgataggagaatttgatattgaggacttcatgagttgggaagagcgatttcttaaatgaaggtgataaaagcctgtataaataatacagtcatgtattgcttaatgatggtgatatgtctgagaaatgcattgttagctgatttcatcactgtgggtacatgaaagactgcacttacacaagcttagctagtatagcccactacatagctagggtacatggtatggcctgttgctcctaggctgtaaacctgtacatgttactgtattgaatactgtaaaaaactttaacacagtggtatttttgtgtctaaacctagaaaatgtacagtaaaaatatgatattataattttatgggaccgccatcatatatgtggtccgtcattatgaggctcatgactgtctaagataaaactgtaggcctcataccaaatagagaagattggcaatatctatatgtatatgggtgtggattgtataattaatttctacttagtatcctttgcttcttagaaactttaagttccctcaatttaaaaaaatccttcttgatttcttttgctttttaaagatattttgatgtaaaagagcttttgtttttattttctttgcctggttctccactcaaaaatttaatgcctgtgtgacttagaattctcataagatttagctttctgtctttttacagatatgaagtggcatagtaggatttggggtccattttccctcagcttcctatttcttgccagtagcttcattgcaaaaccactctaccatctgccctgcttctttttctgcttccacccccagttccctcattttctaattactcccaacaggagtgactcaaacatatattggaagcaagattcccacagttgccaaataggagcagggaagtgccacgtactaggttttcacaaaagaagtcattatgtatctggatttttatctgccagagaagaagaggaatgcttgaggaagtcaagtctcagggcaaaaaagtaacataataaacaaattagagaatggcactttcacattaccatttctgttacattttgtggtagtctttcaggctgttcacaagtatatggctcccttccttttttgggctatagtacagtatcgttccgtgctagtatagttcggtccaggctcttctgcactccactgaactcggatatggccatatgacttgacttgttttagccagttaaatgtgagtggcagtgacaggtgtcacttctgagaagaagctttaaaagccagtggctttaagagcatattttgatgtcttatttttgacagtagttgctctatcaacttgagtctttaagtgacagtgtgaacagagcaccctccccataccagctgactcataatggccaggtgacatgggcaagaaagaagcctttgttgttttaagtcactgagatttggggagtaatgttatggtggcagaatctagtctgtcctgactaatacactgaaacagttttagcatgtataatctcatgtagttaagagattcaaatcataattcctccgatacatggatcaaagataatagaagacaaacatttaaagtgtttttaaagcattcactcaaaaagaatgtattttgtttgcatccatatagtagcatctaacctatcgcacaatagttttgtgttatataatagatctgccactgcttcagagcctctgtgagggcagagataaggtctcgttcttttttaatcctggcacctggcactaggtgtggcatttagtgggtacttaatactattagattagtgaagaggactgaaaactgcctggcacatgagaggtactgaataaatatttgtacagatattaatgttgttaatatctgtaccaaatattcagcacctgtcattaaaattcatccatcacctatcataaaattaattagcattggaaattctctttgtacaatcacaaataattgtacaaagtgcattttcaacatttcaaccccttggtagctactgggctaatttttcaggcacaaagaagcagtttaatgtggaccctcaagttgtattttttcctgccaccagggcctttaaagccttacttaaggaagtaccattatttcaactttggcaggagggatgatacatttgcatgtaaactggtttggagtttgatgctgagcttgcatcgtgaccacctttccactggacattataattagggggaaattctgatgctaaagcttggccagtgtatagttattaattcaaagttgattatctcaccagggattgtgaagagtttcatttggttttaaaactgcctaatacatgttattctaaggtgttgggaaattatcagtgtggctgctttgtgtgctctccttggtccagtgaaagcttcaccttactccttggcccctgccagctcctattttatctgtttcttcccaggaaggatttcaggcatctgggaacatacatgtacacaaggttgttgtcatcaggtccctgcttgcctacttccttcttcctaaatttagattctctaaatggagcttactttcctatgtctctgtcctgtctaagcagtttctccattacccaaaatgcaattccccaggttcattaattcattctcaaatatctcttaagagcctcctctataccaggcattgttcaaagccttgtgagtacagctttcctggaacttctatttcattggaagagacagatgataaataaaaaagtaaatacagtcatgcatcacttaacgatgagaatattttctgagaaatgcattgttaagtgattttatcattgtatgactatcacagtgtgtccagagttcgttccttctggtgcatttgtgttctcgctgacttcaagaatggggccgcggaccttcgcggtgagtgttacagctcttaaagatggcacagacccaaagagtgagcaacagcaagatttattgtgaagagcgaaagaacaaagcttccacagcatggaaggggacctgagagagttgccgctgctggcttgggtggccagcttttattcccttatttatcaccacccatgtcctgctgattggtccgttttagagagcactgattggttgattttacagagcattgattggcccattttacaaacctctagctagctacagagcactgattggtgcattttacaaacctcttgtaagacaggaaagttctccaagtccccattcgaccaggatgtccagctggcttcacctctcaacagtgtgtacttaaacctagatggtatagcctactatgcaccttgggtatgtgatatggtctattgctcctaggctgcaaacctgtacagcatgttactgtactgaatagtgtaggcaattgtaacacagtgataagtatttgtgtatctaaacatatctaaacatagaaaaggtacagtaaaaatacagtataaaagataaaaaatggtacacttgtataggacatttaccatgaatgaagcctgcggaactggaaattgctcttgatgaatcagtttgtgagtagtaaatgaatatgaaggcctaggacattaccatatactactgtagactttataaacatcctacatttagtctacactaaggttaaatttttttgtttcttcactgttaaattaaccttagcttactctttttgctgtataaacttatttaaaaaatgtttttgactcttttgtaataatatttcacttaaacacacattgcacaggtgtacaaaagtatttcctttcattgcattcttattctataagtttttttctattttgaatttttgttctttaaactttctttgttaagaactaagatacaaactcacacattagcgtaggcctacacagggtgaggaacattagtatcactgtcttccatctccacatcttgtcccactggaaggtcttcaggggcaataacatgcatggagctgtcatccatgataacaatgccttctggaatacttcttgaaggacctgcctgaagctgctttctagttaacttttaaatttaatttaattttaatttttaaatttgtattcttttagagccacggggtctcattatgttgcccaagctggcctcaaacacctgggctcaagcgatcctctcacctcagcctctggagtagcagctggaactataggcatgtgccactgcacccagttaaatttttaaataaatagaaggagtatactctaaaataacaataaaaagtgtagtacagtaaatacataaaccagtaacatagttttttattatccttattattattatttgagacggattttgctttgttgcccaggctggagtgcagtggtgcaatctcagctcactgcaatctccgcctcccaggttcaagtgattctcttgcctcagcctcataagtagctaggattacaggcgcctgccaccatgcccagctaatttttgtatttttagtagagatgggatttcgccatgttgaccaggctggtctcaaactcctgacctcaggtgatttgcccacctcagcctcccaaagtgctgggattacaggcgtgagccactgtgcctggcctttattatcattattaagtattatatactggacataattgtgtgtgctacacttttatgcaactggcagcacagtaggtttgttcacatcagtatcactgcaaacatgtgagtaatgcattgccctatgacattataatggctatgacatcactaggtaataggaattttccacttcggtataatgtcatgggatcaccatcatatatgttgtccatcattgactgaaacgtcattatgcagtgcatgactgtatacggtaagtcaggcagctgtaagtgctacagtgaataataaagagggaagaggtattatgtttgtggaagtagggtgggacagtgttactaatcatttcaggacaggaaaagcctaactgataaggtgttaggtaaacagctgaaaccttaaggaagtgatgaagaaagccacgagcacatggggtgaagaggagctagaaaggttcccaacagaggggacagcaggagctgaggcaggagcatgcttggcaacttcaaagaagaggaagcaggccagagtaattggggatcagagcaggatgggctgaagtggattatacagatcttgtagggctttttggtcagtgttatttagtctttagcctgagtaaggtaggaagctgttgtgagtttttgagcagagggtgccttaagaggatctggctgatacggtaagaactggtcaccagaacagaaaaagggtgaccagttagacatctgttagataataattcaggcatgaaatgaaggcattgactttcaatactcagctcaagtgttaactctaactaggaagcctctcctaactcccctaggctgagttgagtctacctcttttgagtttctgtaacaatcttactcttgaaatgaaggctttcggctgagttcacttatatttggaagctgactatatagttgagaggtctctgaattaatttacaattagaataaagtttatttatagataagtaaaagggctaacttagtatattatgtattatatattcattatgtacaaatatacgtgcattatattattaaaacttaacaataattgtggcaattacttaaaactttgtccattacaaagatttttgggacaggattattttgataaggtttaaaattgccagaaatggtaaaataaaaagcagagtgactcatgatgggttttattattgttttcaaattctttataaactaccccgtaatgcctatacccacagtggactgatctcactgccttgtcttgatatatcactgatggtaagatcttttattcaaagtgccttgagcaaaagaaaattccttcaggcacggtttgatccagggagctcgaacagtgtcatcagagctcctccaaattattccaatctgttttccatctgttttcctctgggttggcttccttctacagcaggctgtctacttttagttgcaagatgactgacagtgactccagccatccaaatgcctttctccaggtcactgcagcagaagtcccaaaatatgactctaacaatgtcgtatgcccgtacttgaaccaatcacagtggccacaggaatgcaatattctaattggcctttgaaagtcaatattctaattctgacaggcttgggtcacttgcccccatttggagctgggtatggggtaggtccattttacacgaattacatggaagtagaggaggaaaggcaggcccccaagaaaaattaagattgctgttagcagaaaaagaggagatagatatgggatattcaagctacatccatgtactacaagcaattatttctgattcctatccagaattctgtcctaaaagtgttcccacttggtaaatcaggtacatagatatgaagttctcacccccgcattgattgccactgtagcttcctcttcctttcgtaggattctcagcaggaatcccctcttcagcctctcactcacacacccacacacagacacctttcatcataagccctgcttttgcctcaaggagctttcatattgtgtgcgttcagtaaagcaaaaaataattcctcacaaaatcggcattttttattatactttaagttctgagatacatgtgcagaacgtgcaggtttgttacatagatatacatgcgccatggtggtttgctgcacccatcaacccgtcatctacattttaggtatttctcctaatgctatccctcccctaacccccgacaccctgacaggccccagtgtgtgatgttcccctccttgtgtccatgtgtcctcattgttcaactcccacttatgagtgagaacatgcagtgtttggttttctgttcctgtgttagtttgctgagaatggttttcagcttcatccatggtgtatatgtgccacattttctttatccaggctatcattgatgggcatttgggttagttccaagtctttgctatcgtgaatagtgctgcaataaacatatgtgtgcatgtgtctttatagtagaatgatttataatcctttaggtacatacccagtaatgggattgctgggtcaaatggtatttctgattctagatccttgaggaatcgccacactgtcttccacaatggttgaactaatttacactcctgccaacagtgtaaaagtgtctatatttctccgaaaagcaatgacaacaaaagccaaagttgacaaatgggatctaattaaaccaaagaacttctgcacagctaaagaaactatcatcagagtgagcaggcaacctacagaatggaagaaaatttttgcaatctatccatctgacaaagggctaatatctataatctacaagaaacttaaacaaatttatgagaaaaaaacaaccccatcaaaaagtgggcgaaggatatgaacagacacatctcaaaaggacatttatgcggccaacaaacatatgaaaaaaagctcatcatcactggtcattagagaaatgcaaatcaaaagcacaatgagatatcatctcatgccagttagaatggtgatcattaaaaagtcaggaaacaaaatttgcattttattttaccctgttgatgctgtataaatccaggtctcagcaggaaacagatggaacactcaaattaggataattcaagaagagtataataaagggactatttgcaaaggtgtgggtatcgtgtaagaaaagcacagggacattacagcgctgtgggactagtaaatgaagctctgtttatctcccccaggtctgaaaaaggttgggggaggagatagccattgccagagctaccagacttggtggggagacacagccagctgtggatgatttcataggaaagccactggggtagtaatactctgacatctctctcccttagctttcctgtcttctacaagtgcctttcattggcagaagccacacggcaggggagcccattgacagagtccattccagtcagcctctagagtggagggcagggttgacaagagaggagagaggatacggaggggaagtggatgttatccagaagagtccatctctttgtcctctcagtatatgtgcttatctttaagtgaaaagttcctgttcccttcacagaggacacaggaagtctcatcgctatggctctatgttggataattttactttaatcatactgcctcttcaaagcagtggcaggggaataaaggaataatggaaggcatagcacctgcagttcttgattctgaagcataaggtgtctactctcaccatgactccacgttccccttaccttctccagctcctcagctggatgtggctggatggcggtgacccaaaccttcgttctgcagaatctcagtgccacccctgcccccacctttttggatagcttcagtgttatttggttccaagcatggtcctcaatgttgtatcagcaacccagctgctccctggtagttgggcttactctgtaagtccttttctctgtgttagttcagtaggatgatgaatccaaactacctaggggctgtctttgcttccaacttaatggaattgtggctgtgtttcctgatagaagcatttctacattaaacatgaggacttccaaggtcatgtggtcaagctcaaggtcatagagatgagaagcaaaaattctgtaagtggatagttagtgattagggttagagttaggataagaacactgatacctctccttgttcctggtcctgtgcattctggctgaggaggagatacgttatacaaaatactgtttatgtaaaatgctttttgaatgcatatactaaattctgtgggacagcagcccaactttgtagaagttgtctcctctcctagctcccactgtaattgagcctttgctctagacactaacaagacagagaggcctgatacagtaaaggtgtactgttatccgcagtaagcaaatggatcccgattttctttactgatggggctggaggtgggaggtgagggcatgagtacattagtctggtcagtagctacataccaggcaccacactctgtgttgattgctgcaataaaaatatcacttctggagccatagttgtgattggcaatatcacttggttcagtttatgactcttgcttaacggtcttcatgtcttcagaccatcttgtatcagtcaaggttctccagagaaccagaatcagtatattgcccagatgagcattaagcaaactggagacccaggagagccaccagtggtatattttcagttcatgtccaaaggcctgagcagtaggcgagccaatggaataaggtctagcctgagtctgagtccaaaggcaggagaaaactgatgccccagctcaaagacagtcgggtgtagagagttagttcttcattattcagtccctttggtctattcagtgtttcagtgggttaaagaaggcctgtagaggacaaactgctttactcggtctacccattccaatgttagtctcatccagaaaaactctctctctgtctctctctctctcacacacacacacacacacacactcagaatgacgtttaaccaaatatatggacaccccatggcccagtcaggttgacacataaaattaaccagcacacatctgtctgactgttgctgaattaaatgaagataacataggaattatgcctacattctttgagtcctggatagtagcaccaagctctgcaattcctccaggtgtgtggctttgttcttagtttattctacagggaggggcagttttaggagtgtcattttgcactctttcattgccctcatgcaatgaatcagtaaaccaatgtagtgttttgccagttgataaatatatctgcttctactatacaatatggtactggggaaataacatcaggatggatctctggtgccgttggacccactctgagatggactcaggccaagactctgtcacctgtctccacaagcctcccatttgaatggtgtaccacagcaatatttcagagagcaacttaagtctagacccacagctaacctggggaaagcctgagcctttctttcttcagtgcacagtcaccctggaaacagccataggatgctatgtgggaggcttgaagggcgagtcacagcatgcacctgaggcagcattgttgggtccctctcaaagacacccagccactttctctattgagaggctctaggtcagtggaacttggtgagaggctaaaatccttactatggtgactgcattaggtcccagcccacgagagtagaattttgtctcttctatatgccaagtagcaccttagtaggtggtccatctatttttgtttctatttctgagattatttagtcaccaccacagatccctgtggaataagattttgattaccactcatccctgtggtttgtttcatttaccttatttctgatagttaaatgccgccaaccagttggtctcccttactcttgggttcctttatctccattgataacaaagacactgattccatttcagccacccccatcccattttccaggctgcagaagaaagccaccacacccagggcagccaccacaagctttccaagaatactcctcctcccccttgtgggagttgtggttagagaatggctgttgctcatcctaggtccacttcaccactcccatttctgagacttcagatttcttcctctccagcagggatcagctcaggaccagatcataaatattttaggctttgtgagccaagaggcaaaattcaacaggtattcttgccaaaggctgatagttttgtttgtttgtttaacatttaaaaattgtaaaaaccattcttacctttcaggccatacagaaacagacagcaggccagatgtggcccacagtctgtagtttgccaacccccttctccacaggatgccacagaagttcagttgaaccacataaacacagactacccttgagtccaggctttaattgtccaattaggtagattactgatgccactccctggtactcaacctgaaacactgaatcctaaatccggggtgagtatatcccatgagtgaatttaatgagatcaagccttatgttttgtcctcattgatccaatgcctttcgaaactcataccttctctcctggctcctgccaatatagactggtgtgaggttctataaatcttatgaaagatttcttatgtaagggatgtaggctgtctcatatttctccctctgagctgtgcttggacctgagtcttagatcaagaggcagtgagaggtgataggaatgagtcctgagggaatgaccagcaggttattatgcatggaaaagctgttcttcttagacagggaggacaaatctgtccccatgggcaagaagattttgtgggttcgaagttttcatatttgtccgtgtctgcccaaatgatcgcaatccagttatcagggtcacattcccttgatatgagacccctcgtatgagctgatcatgtacttggtgctgcagctctgcaacttttgttaggctctgagctttgtcctcagccatatctgccgtgggactctggaaaatgaggggttgctgcagttataccatctgaatagctacagggactttctgattttttctatgcgtgctctcaattgtacattcagagatttcagtttctcattttccttttgtacaccttctaaggctgtgagaagaagccaagagactcaacagtctttatagtcactgctgtaaccatagcaattaagtgcctctgccactgacctcccagcatctccccttccacctgcatttcatctcctaccactgctagagacaacttgaataactgatgtcaccacttgtcctggattatttgttttctgttttttcctggcaaagtggttctacctgtgtttctcaacaacatgatcaatctaatcctggaatcccacttcaggatctcaatagaaaacagaatgctcaaattgggatagttgaggaaaaattcatgaagggttatagaggcctaacccagtgatgatgaggagcagttactgggacttggagacaggcataactgtggaaagggttgctggaaagaagctgggatcctaagttaagcaacacagtcatcacttttgacattttcctctaatattttgtgcagttatgcagcaaattgtatttcaaaggtaaaccttatttaaaaccccatagcatcatatgactcctatttttaaaagtctgcaaaataattacatccctttctttagttatccttatcatattctacagctgatggaattcagttaagcagcattggttgtctattcaaaactaaattaatatagtgaggatttattttaagttttcattatttttttttacatcatagcccttgaaacatgacagtttgtcattccatgtatttgcaggatttttttttaagaaaaccatcctgattctctattttcttactttcaaataccatcacagtataatttattttaatcccttatcctgtgggtcacttttatctgatgattgctttcatttaaattttaattggggtttgaaaactctttttatggactggaggacaataagtaaacttttgtagtatggcagggtgatctatagtccaggaaatcaatatctaggcttctatatgcaggagctgttcaaggcaggaactattttcttatttatttttgaagtcacattagagttccaaatgtataattatacaggattccataagttaatagtataggcttattggttttaaagaagtcttcttcttcacagtgatattttttcaggtattattgagatgtgtccttatttatctggagaatagatatacttattctctgccttcatttcgttattgctacctagtggtaggagatgacaaaaaacctcatctaataggtgtcacttatacctcttaacatcactatttccaaatattaattgttccttggaaatccttttactagggctgttcttgatggtctgtctgcattcatcactttgtgattactgagttttcatatcaccttaaatctttgatgagctgttcctcaaagaaagaaggtcatttatcatgtctgttttactgaaagaaggacaagatgagacaaagaggtattacataattcagtgtgcctatgaagctttctaggccgtattccaaaatagatagcagtttcttcaatcaaactctgtataagataaatgagatattgtttggtaagaaccccccaccccactttgtgccaaacttgttggcaccctgcagtttacagcatgaaagtcagcttctctgcacagtgatttttaagactgctaaaggcaatcagctgttcttagagctgtgccccaatgcactttatatgcccttctgttatagcactgagcacctggtggtttgtaaccttttacaagtctttttccttctgtagactgaatgccctgacagcaaggactgttaattattcaccattctgcatacactctgattgggtggcttacaaacaacagaaatttatctcttgcagttttggaggctgggaggtccaatatccaagcactgacagatttggtgtctggtgagggccagcttcctggttcatacatagccatcttctcactgcattctcacatggtgcaaaggatgagggagctctctggagtctcttttataagagcactaattccattcttggtttggggtgggggctctgcactcatgacctaatcacctcccaaaggtcctacctcctaatgtcatcacattgaggattaaactttcaacatatgaattttggagggtcataaacatttagtttataaaaaagggctgcttggtgtatcatggccactgaataaattttgagtagcaatcttacctggtatgccattgcatttatatatgattgccactaataactcaaattactgaatttatgttgtatcgatgatgctgttttcctagtcttagtattagtagccaaatggccttggattaactttctcaatattattcattcattcattcattcaacatttattgaataccttactaaatggcaagctctgaattaagctttgagaatccaagaagactaagactttgttcccacctttcccttcagcttccctttcctaagatagacataataaaacaattgcatcacaacatgatggatcctgtcatagtcagagtggaaatagaaggagattgagtgggacaggggagttgaaagatgcccagcagcccccagggagagtgaaaacgtgatctcaagatcagctttattttctgaccaattctcatataccaagtgtggtcaggaacatatatttatgtgtctaggtagccagttgcatttcattttatgaagctaagtgattatgatgattagctatgggattaacatacgttttcagctaagcaagtcattaaaaacaaatgcaagtacaattatctcctcctttagcttcagtaaattaacatgttatagtaagaaccttgttcatttgtatgatgctaggaaaaagccacacaaatgacctgctttttactttatatttcggcagctataattttgtaaaaatgggacatgttggccatctgaaaagcacttagttgtataacttctacaagtcattgaaagtaattatcacatcataatccaatgttttcctgaggttcccatgggaagtaaagtatattctatcctgatgtggtttggatgtatgtccctgtccaaatctcatgtagaattgtaatcccagtgttggaggaggggcctagtgggaggtgatttgatcatgggggcggatttcctccttgctgttcttgtgatagtgagttctcacaagatctggttgtttaaaagtgtgcagcacctccctcttgtctttcttcctccttctttggccacataagaccatgcctgcttcccttttgccttctgccatggttttaagtttcttgaggcctccccagccatgcttcctgtacaacctgtggaattgtgagtcaattaaaccttttttctttataaagtacctagtctcagttagttctttatagcaatgtgagaatagactaatacagcaaattggtactgggagtgggcatttctgcaaagatacctgaaaatgtggaagtgcctttggaactgggtaatgggcagaagttgaaagagtatggagggctcagaggaagacaactgggggaaagtttggaatttcctagaaacttgttaagttgttgtaaccaaaatgctgatagcaatatggtcaatgaggtccaggctggggaggtctcagatggaaatgagtaacttattgggaactggagcaaaggtcacttttgttatacactaggaaagaggttggaggtatcatgcccctgccctagagatctgtggaactttgaatttaagagtggtgatttagggtttctggttaaagaaatgtctaagcagcaaaacattgaagatgtggtgtggctgcttctagcagcccatatttatatttgtgagccaagaaatgacctggtactggaacttatatttaaaagggaagtagagtgtaaaaattttgaaaatatgccagcccagctatgtggtagagaagaaaaatccattttctggggaagaattcaagctggctgcagaaatttgcataagtgaaaaggagctgaatgttaatagccaagacaatggggaaaatgcctcaaaggcatttcagagcagctcctcccatcatagggtcagaggcctaggagggaagagtggttttgcggactgggcccagggccccgctgacctgcgctacctcaggacactgctccctgtgtcctagctgctccagctccagctgtggctaaaagggccctagatacatcttaggccactgctacggaaggtgccagccataagcgttggtagcttccacatggtgttaagccttcttgtgcacagagggcaagagttgaggcttgggaacctctgcctagatttcagaggatgtatggaaatggctggatgtccagccagcagtctgctgcaggggtggagtcctcatggagaacctctactagggcagtgtggagggaaaatgtgaggttggagtcccccacacagagtccttcactggggcactgccttgtggagctgtgagaagagggccactgtcctctggaacccagaatggtagatccactggcaacttgtaccatgtgcctggaaaagctgcaggcaatctataccaatccttggtagcagccatgggagctgatccctgtatagccacaggggcagagctgcctaaggccttgggagcctagcccttgcatcaggtggccaggatatgagacatgaagtcaaaggagattattttggagttttaagtttttttattttttatttttatttttttgagacagagtctcactctgctgcccaggctggaatgcagtggcatgatcttggctcactgcaacctctacctcctgggttcaagtgatgctcctgcctcaacctcccaagtagatggaattacaggtatgcaccaacctgcctggctaattttcatatttttagtagagacagggttttgccatgttggtcaggctggtctcaaactcctggcctcaagtcatctgcccgcctcagcctcccaaagttctgggattccatgcgtgagccaccacacccagccaggagttttaagctgccctgcttggttttgaacttgtatgggtcctgtagccccttagttttggctgatttctccttttgattgggtgtatttccccaatgcctgtaccctcattgtatcttgaaagtaactaacttgtttttgattttacaggctcctaggcagaagggacttgccttgtctcagatgagactttggaccatggagttttgaattaatgatgaaatgagtcaaggctttgaggaactgttgagaagggatgattgtattttgcaatgtgagaaggacatgagatttgggaggggccagaggtggaatatgtggtttgggttttgtgcctgcccacctcatgtcgaattgtaatcctcagtgttggaggagggacctggtgggaggtgactggatcatggcggtggattttccccttactgttcttgtgatagtgagtgagttctcgtgagatctggttgtttaaaagtgaaacccggggtacaccatccagacaggaagccatgaagagaaagggtaggtgatttcacgcaggaatgttctatgagccagggcagcatacatcacttctgaccagaactcagacacgtactacaagggagcctagaaatgtcgtctagctgtgtgtccagaggaaaagaaggaactgggtttggtgaataactaaccacaatgatgataaacttttaaaaattaatcacattatctataactgcccctaaactgcttcaaaattttcacaacagcctcattcacccaatttcctattgacaaatatttattgttctcctgtaatgtgtcagagacattgagccagagtggagacagtagacgtggtaaaaagttgatcagattactgatatattttaaaggtaaagtcaataggatttgctgatggactgaatctgggatataagagcaacagaggattcaagaatgactttcagattttgggcatgagcaactgggaggataaaggatgccatttattgaaatcagagcactgaggtagagaggtcattttgtgggttggggggtggggataacttaacagtttgctctggccatgtcaagtttgaaatacctcttagacatcctagtggagatgccaaagagtcagttgaataaacaaatcttaatttttaaacaaagtacaaccagagccagcttcatgagtgggcaacccatgcagtcccacagggctctcctacatggaaaggtcccatacttgatgtaatggtttactgttgcagtcttgaaatttttaataaattacttagtaagtgctccgtatttttatttttcgccaggccctacaaattatgtagcttgtcctgggaggaattctttttgaggcagtggaaacttgtaagtgtggggttctgaaggcaaggaaaagaaaaccttttgagaagaaagagattgtgagagatcaaggaatataaagaccaaaaaaaaaaaaaaaaaacagtgggaattatcaagatggaattgctagtgatgtcgacaagagccatgtccaagggtggagtgggggaggataaaaatcctgttggaatgagctgaaaagaggagagctgcctatggccacagtttccccctgcagggagcagggaaatgggatgatagctggaaggttgtgctgagtcaaagcatgtttttgaaaaatgagagaaattaaaaatgtttgtctgctgatgtgagggattcaggagagagggagaaactgatgatgcagtggagaaagggaagaattacagggaaagtacgtaagtcaaggacaatggaggacatgtggaggagctggctgtaagaatagtcatgtgattccatttcaaaagcagagaaggcagatttctcaagaccatgtattgaagagactatcctttctccacatatgttcttggaacctttgttggaaatcagttgaccataaatgcatgggtttatcactggattttctattcccttccattggttgatgtgcctgtttttatgccagtaccatactattttgattactttagctatgtaatatgttttgaaatcaaataatgtgatgcttctagctttgttctttttgcgcaagattgccttggttgttcgggatctaaaaaagtaagaaattttgtcatttgtgacaaaatggatgaacctggaggatattatgctaaatgaaataagccaggtactgaaagacaaatactgcatgatctcacttatatgtggaatattaaaaaataaaactcatagaagcagagagtagaatgatgattgccaggggctgagggtaggggacggataaaggagagctgttgttcaacgggcacaaagttttggtgagacaggaaggctaagttctggagatctattgtacagcatgatgactatagttaataataatatatggtatatttgaaaattgccaagagattagattttaaatgttataatcacaaaaaaagataagtgtatgaggtgctggatatactaattagcttgatttaatcattctataatatatgatattatatatatatatcaaatcatcacattttatagcataaatatatataatttttattttccaaatataccttaatttttaagaaacagagaaagcagagtctatgggttccagaaggttggcaatttggggttggttctagaccacgtgcttttttttttttcttaatggaatatgaggtgaggtcagcagctgaggtggtgggaggagtcatgagtttggtaagagtaacttcagagaactgaaaggttaatttactagaagatggtaagattgctgggcaatcctgtgctgagttgccatttgagattttgtgaatatccatttgctgtcaacatcgtcgagtgatgtttttttctccagcatctttcagctgctcaggtgcaagtacagagtagagggatagttgagtttagacatgattggttctgttatggctcttattttacagatgaagggactagggttcagagaagaaagtaacttgctagtaatggacagagtttgcacataaatcttctctgaccctcgactccaggctcttaagcagtatgtcatatttcagagctgttcttaatatcatggaataaaaagtgtagattctgcaaacttctatcccttcccctagtggcgagcaggtgaataagcaatactgtaatttgtatctcaactttttttttcctactagcattatctaaaaagggtatctcagctagttaccaaatcccagccttgggaatcacaaagcaatattgtgcattgaagatatgctcatgggatagaaaaagtatcactgagtttgatcaccatctctcctgcctgctggccatgtgacttgcagcatggttgtaagaatctgttcagcattaactgagcacctatggtatgccaagcagtaaggaagatactgagaagatattgatgaaactgaattttgtcctcctaagaattatagtccagggaattcagtgagatagtatatgcacaatgttgtgtccaacacagggtgggcacttaataggtgttaattctctttgccttctctatccatttgtcctcaagtacctgatgacacctcttggtgaaaatatcaacactcactgagatactaaatgagggccccactcatgtgtaaatatccaatgatgttaatatttaaaaattagttcccatccactgaatcagaatctcagcaactttgagtgaaggcaggacccttaactgagttgagtcttcctctacccataaaaatatactgtatataactttttcctgaagctattggaatgaatacaagttagcatgattgtctactggcaatactagaataatctccctaaggcgtgctgttttctggctggaagttattttattctgttgaaatgtatttttttaaatgaaaggggcatttccttttcctatattatttgctttcaaaaagcgaagagaattctttaaacatggcaaattaaccactggtgaatcttaaattttaccttctcaatgatgcatgttctgattcaccagtcaatatttatttctaagccttcagatctcaaaaaggtctatatggtacctgagttagtgcatctcaagtaaccaacccctgggaaggtgttttatttctgtaacacaaatgaggcaggattttatgcccctggaggggagatgtttgtcttttatctctatattggggtacctaatacaggaaagagtgttaaatgaataaaggaatggacccacagtggggaaaaggagcttgcttgatatcagtgtgtttgaatttattaccatgaatctcactttctaaaattgctagcactattaaagtttctgacagtgaagcaagccattggaacatgtttgtggtgtgaatattaggtgtattattatgcactcaatttagcttttttattttatataatttctctccaagtggaaatcatgttctaggtaaaggaacaagaaattaagcagtgtggaggttagattcaacttccactaatggagaagatgactttggataactattggctccagtttcatttggggattagggattggattagaatttgtaaatctaattgttgtttctctgtaaaattgggagaccctcagggttgagagcagatcttcctcttttgcatctatttcagcacctagcccagtgcattgtaaatgcttaataaatactagatgaattaaaagtgaagtattctatttattctttagagaaagatacacagacgtttttgccaaccagcagaaatgaaggcagcaaccacttctagtttatcttgtattcctagcatcaggcaaaatgatagggacatggtaggcatccaacaactgttaattggctcctccaatcacccttttttgtcatccttccacaggaatttattgaatgccttctaagtgtcagaaacttggtttatattaatgaaagaacacattccagaggagtagttttatttgtataggcaattacaaagtaatgggatacaggttataatagaagtatgtaaaatttcactgaagttcacagggaggagaacctcatctgctcgggagttggggaagacactccaggatgatgagggttgagctattgaaagaggaatgggatttgttaaagtggaccagggtttgagggtattagaacacactccagttagagaagatggcacacacatgttcttggagctgtgatatagcacagtacacattgtaggggtagtttagcatggctataggaagaagtgggtaacataggggaaggaggtatggacagaattgagaaacagggatgattctgggaggttattagaggtcagagtttgaagaacatctcaaaacaggaaatactgactggtatctgagcttctctagaaggctgaagttaaattctataggtcatgtctcagtaatagcagtggtagtaatagcaatggctaatatttattgagcatttgttagagacaggtgcctttctaagcatttcatcttcttaataacttataaggtagatattgtctttatcctcatttgacagatgaggagattgaagcgtagaggtgcctcattcaaggtcaccgagcaagtccagactttaactcagagggtctggctgcagaatctgttcttaatcactatattatattacaacgcagaaaatatagtgttgtaatgctccaaagttaatttatacaataatacaatcacaaggattagaacttcattctcactttaaatccaaacagcagcatgaatcactgcttctgcctttcatatgttttttaatggcttgatcattgtcttcctgatgatttgattatgtgaggagggcaagttaaggtcactgccactaggtgctcactgttgttgcccatatgcaagacctcagtaaaagatgtctatatggcgaatgtaacttttagccaggtctttgcgctatgagagtatttagtctgtctgatctttgaagatatctatgcatggaccattggctctaaaatccccctctttgtatccccacaacaatgcatattttcatctagtgtactcttaaaaggggccagattttgtgaacatagatgcctgtccttcagagtttatttatagaatatgctccaagctcaattcccacctatgagtgagaacatgcggtgtttggttttttgtccttgcgatagtttgctgagtatgatggtttccagtttcatccatgtccctacatggacacaggaaggggaacatcacacaccagggactgttttggggtggggggaggcgggagggatagcattaggagatatacctaatgctaaatgacgagttaatgggtacagcacaccaacatggcacatgtatacatatgtaacaaacctgcacgttgtgcacatgtaccctaaaacttaaagtataataataataaaataaaataaaaaaagaagaaaggcaggaagaaatggaagaagaaaaaaacccattcctttatattataatacaaatgcatattcatattctgaattttaacattaacattataataaaactgtttttatctttaggaaaaaaaaaaaaaagaatatgctccaagcatttgcttctcaaattctccactattggataacaaataagccataatgtaacaggattttcatttaggtttttccattaagccttagccatggattgtgatggtatctggttgaggccagatctgagtttagtttttactctgctgccgaaattgttgtgtgatcttgagccagtcattgcactgttctcaacctcagtttcctcatctggaaaatgagggtgttggagcagacgatcagtgagctttctcccaactcttaacattctctacttgtagagtttttataatcaaacacaattatgtaaaagagagaaaagcagttgtcatggaaactgttatttaatacataacactgtttcttaatcagcctgttttccttgaagaaatttgcttctcttgtgatacaggcccaaaggtctcctaattctgcctttagaaaggctcagatttcagttccatcacttaagaattcaatgcatggaaccagttacttaaccaccctgtgcctaaattgctttattctaaaagtggtattgacaagaatactgacctcatagtgtggagcatcaggcctgatgcacaacaacaaaaatgttaatgataataataccaatacagataatattaaaaatatctaatgtttattgagttacttattgctactctgtgctaggcattagtaaatgtattaactcatggaatcttcaaaccaaccctgtggggtaaatgttactattaatctcataattagatcaagttacgtacttgtcccaagtcacacaacttgaacggggtggaaccagaatacttgtcgagctacataggccaatttcagagcctacactctgaaccattaacgtttctcaataataacactgttaatacataattgtgaataaccagcatcttttatggcctttgctatatgcccaaatctgttctatcctatgaggtagatgatatcatcatctctatttcgtagataagaaaactgagacctctagaggttaattaaaaacacatagttggtagtagtggaggcaggacttgaactcttgcagtctggctcctgagttcatatttttaacgatgatatctcagtatgagctattattaccctacatccagttcagttttgtgtccatgaatgatgtaagatgattatagctccacccactagatgatgtgagcctttggcagtcttctggaactctgttttttttgtttgttttttgtttttttgtttgtttgtttttgagacagagtctctctctgttccccaggctggagtgcagtggcatgatcttggctctctgcaacctctgcctcccgggttcaagcagttctcccttcctcagcctcctgagtagctaggattataggcacccgccactgtgcctggctaagttttgtattttttagtagagacgaggtttctccatgttggccaggctggtcttgaactcctgacctcaggtgatctgtccgtcttggcctcccaaattgctgggattacaggtgtgagccaccgcacccagctggagctctgtttatgctctttgttgattccctattgtgctcctaactaccacaatcgtttatggaaaagccaagctgcgacacaagtatcttgccatgtcttataaaataaaacaagaggagataagtacaaaagtctatgaatttcaggccagtaagctctaaaatttcaaacagcaaatacagtccgtaaaacatttgagagagagtttacttcagtagctccaattatctgagcaatgttttccaaataccttagcacctattgatctaagagtgaagtaggagaacttctttaaagatcagatagtaaatattttcagccttaagggccataaggtctctgtcatgactgtttaactctgttaaagtgcaaaagcagccatagatgatagtaaacaaatgtatctgtgtttcaataaaactttatttacaaaaacagatggtaggccagatggcccagaagccattgcttactgacctctaatctaagagagagatagcctactgataaagtatttaatgccaatgggttttgggataagtggcctcttgtacgtgcataaaagcaatagtaatgacatgtttattttttccttccctcctcatttttaatgagtcctgatcttgctgttccacatttactaaattaggtactggcaaaatgtgatagtgtaggcttacactattcacattactatctgctacttgactcaatatattgaaatttgactttaaggacagactttcagcagtaggaagcaatgttgacaaaacaacttttaaaaaagatcatatagaatgaaaacgtggatatgtgccttgttttgagctatctcaaatccttttgctaaataagtagggggtaaattattttaaatggggaaaatggaacacaatttttaaatattttaaggcatttcaaatgggccttaaaatacaacggttgtcctctggagggattttcattaattattaaccatatcagaaatgtaattaagtcagtgctgaaattagtcaagatcagctttataactcaaatcacataaataacatatatgggttctatgaattaatcattgtagatttgattaaaaagttccatttcaaagttcatgcaatttaatgtcatgttgtttctgtttttcaaacatttgttaaaccaactgtctatagaggcacattatatggctaaagatctaattgcaccattgttagcatagaactgtagtcagtaaataattagtggcttgcattgtgaagttttgataaatttttaggcttctctgaattaacatttgtcttatggtcagttaaggaaattaaatatcgattaaggaaattcagacagggcagcttcacagtctccctcctccacagggccccccatgaccactgccttggaggctgtgctgactttggggaaggcctatcagtggctgtgacctgggttaagctgatggaccaggggcatttttgagaatattgattagattaaggagaggtggggacctgtattagttttttattgcttctgtaacaaattaccacacactcagtgccttaaaatgtcaccaatttatcttacatttctgtgagttagatgtctggtgcaggtctcactgggccaaaatcaaagtattagctgggctgtgttccttctgtctttctggagactctaggggagaatctgttttatggcctttgttttttgggatggaatctcgctctatcacccaggctggagtgcagtggtgcgatctcagctcactgtaatctctgcctcccgcattcaagcgattctcccgcctcagccccccgagtagctgggattacaggcatgcgcaaccatgcccagctatttttagtatttgtagtagaggtggggtttcaccatgttgtccaggctggtcttgaactcctgacctcaggtgatccgcccgccttggcctcccagaatactgggattacaggcatgagccaccatacccagcctcggtgccttttccagctcctagggctgccacatccctagactcatggtccctctttcatgtttgaagccagcaacataatgtctctctgatccaagccaccaaaggttctctgtttttgaggtcttatgtgattagattgccccccttccttttggatatcccaggataacccctccatttcaaagtccttaaatctgcaaagtccctgttagtcccatgtaaggtgacatattcacaggttccagagatgaagagttgggcattttagcagagccatcattctgtctaccacacaaccgacattcagtgtattggattcactgtcggcgcttcctctgtttaccagcccatcttcttatgtttcagcttcttgtgtcctgacacccatttttgtctcagtccactttaaaccttgttcttctcagttctcaatttctctgaccttcctttagcatgcagtccagtggaccttcttctgctgagagcagtattgctggccaggctgtctgggttcaaagctaggctgtgcctcataaacatgacctttggtaagttatgcaatatctctgtaactcagttttctcatctgtaaaaggaggataaagaatgtgcctggactacatatgattgatgtggtgattacatgcattaatatattcatcactcttagaacaatgcctgagacatagtaaaccatcaatacatgctaaccattgttgctgtgaatttggttactctccttttgggtgctggtagaaattccctcaagattttatctgtgatttcttgtattttcttcggaagttgcagcttctctcaaagctttagcattcatccctaggcaaagaactccagctggacgcatttccaagctctatacctttatttctggcagtactaggtgaacatttttgtttggatgtcccaggggagccacaaagctgaacttaacatcttgcctaccgaaatattccatccgtgttcttatttctattactgtctttagatccgaagtcaatttttattctttccctctcatttaccactaaacatcaaaaaagttatcaaatactaaagactctactttcaaactatcttttaatctatttgtgtccccacttccactgctctgatccaggcttctatgaccgttaccctgatttgttgccccagttgaagtagaacagtattcttaaacctttgctctgattatgcaacccccacccccagacccgcccctcccttccaccttgctccagcatcttaagtgattccccgctgtcttagcatggagactacatccagtgtagcatataagtgagttttcttcaggaattccctaaaaatttaaaaatttcatacaaaagtatgttgtgaagatcgttgctttcagtctcaacaaccagtcactgctcacgcatcttaaacatgcttgaaacaggacatcttttcctttcatgaatgagccttgttctttcatacctgaaccttcaccatggggggcgtgctcttctcctccatctctgcctatgagaaatctacccagcaatgaggcttagtgacaatacccaccactctctttgtgaagccttccctggtagcctttccctgaaccgtgtaagtcagaggtcagcaaactacagcccacaggccaaatccagcctattgcttagttttataagttttattagaactcagtcacactcattcgtttatgtattgtctgtggctgcttttgggtctacagtagcagagttgagtagctgcaacagagaccatatggcccacaaagcccaaaataaattatgctctggctctttacagaaaaaaacatgctgacccctttctcccctcagagattacatagtctaccttgtgcatctttgacatctccttctgttagagtcacttctgcacaacttttttcctggcaagaacgatctcctcttgtagacatagattctgcctttttcatccttgtttctatccttgggcctagcaggggtagggctcagtagttgttggggacaatagattgcctgtaaaaaaattttttaaactacattttgctcacttggctaagtgacaaaaatcttatataaagcagtgttccctttagggggttagtgcttatcatttgatgtttctggtagtaaaccatttcatgtttcacttcgagaagcgcttttttgactgccaagataagctgcaaaattgagtccaaggatcttaagaaataatattcctaagccatttaagcagctcacttggtgatctcatttaataagtggtccactgaaatttaggattgcagagtatactttttcattatgcatgggtttcaccatgtgaggtagatatctagttcctactcagctatttttgttgactgcctagggtatgataatatttgaccatgctactctcttatgaaaaatgccaaatagttaaatttgttttaggaaaaccagagattcctctcttgctcctaaaggagaaaccaaatgaccctgggtttctttcttttttttttttctttctaaaacccaagaagtattgatgtcatgtcctcctgcgaagtgcattagctgtccttgcctttgctgctttagtactggggaatgcctctgtcagacagtgagctcatgagtgcaaggactctgtcttttaatttctgaatcctcagtgtttggcacagagaaagctcttgacaaatatttattaaatgaataagtcaataaataattgaagatctcagaaagaaccttttccccaaggtattacttttaaactataaacttacaattgcctacttctatctagttcacatccttaaatatcacttgggagaatttcctgttgtgatgatatagagtttatgtctagctgtgggaggtcaagggtgggctacgttgtgcctaagtccacagaacacaaggaaaacccttaaacttttgtgaggtgaccggaaataaatatctgcttcctaagtatttccctgagtgagaatgtaaaggtttaagataaattaagtatcacagggtgagacaaagtgagaaattcaggatttagattggcattcagagcagggagggaaaaaaagatgacccaaattgacacaaaatgagaaaatcttgggaaataaaagtaaacggtagcaaatgtgatgtatttgagaaccttacaaggaggttttcagtatgttccagttgatttataggatgtagaaacattaagtgttaaaatggaaaggggtggattttcaagactctcacagtgagggttcagttaggaatcagaattccaacaaacaaacagattttaataaagatgttacaaaggagaggctgggttatggaaattgacaagagatggtgaagcacccagggtctagcaagggtgaggagcctttataaaacatgcctcaagaggcaagggcaatattggagccgcgcaagagcaggagccctgggaaaggggctacccaataggagtagaccttgcagagggctttccaaatggctagggccctcacaagtattcacacaggaagggagcagggaagaagtaactcagcctgtttttcctcccaacctttagctccttcttgtgcctccattggctgaggccaactggaggcctgtgagggagcccaggtgatgaaggagtcaccttcccaggacacagaacaggtggagaatggatttgaagtaggtggaggcccacaaaacgtcaccagcacagggaccatctccagcctttcagtttacaaatgaggaaaacgaggcccagactgggggaaatgaacaccttggaaattcatccctttcagccttaacacttaatgttcttttttttctttttataggtagtctcttatttttattattattattattatacttcaagttttagggtacatgtgcacaatgtgcaggtttgttacatatgtatgcatgtgccatgctgctgtgctgcacccattaactcgtcatttagcattaggtatatctcctaatgctatccctcccccctccccccaccccacaacagtccccagagtgtgatgttccccttcctgtgtccatgtgttctcattgttcaattctcatctatgagtgagaacatgtggtgtttggttttttgtccttgcgatagtttactgagaatgatgatttccgatttcatccatgtccctacaaaggacatgatctcatcattttttatggctgcatagtattccatggtgtatatgtgccacattttcttaatccagtatatcattgtcggacatttaggttggttccaagtctttgctattgtgaatagtgccgcagtaaacatatgtgtgcatgtgtctttatagcagcatgatttatagtcctttgggtatatacccagtaatgggatggctgggtcaagtggtatttctagttctagatccctgaggaatcgccacactgacttccacaatggttgaactagtttactactcatctgacaaagggctaatatccagaatctacaatgaactcaaacaaatttacaagaaaaaaacaaccccctcgaatagtggacaaaggatatgagcagacacttctcaaaagaagacatttatgcagccaacagacacatgaaaaaatgctcatcatcactggccatcagagaaatgcaaatcaaaaccacaatgagataccatctcacaccagttagaatggcaatcattaaaaagtcaggaaacaacaggtgctggagaggatgtggagaaataggaacacttttacactgttggtgggatgtaaactagttcaacacttaatgttctatatcctcataaatcagtgttcaaatgagaaagacaataaggactgactgaataaataaatggaagaataaattaatttgaagaataaatgaatttttcatatcataaatccatttttcaccaacatgtttgctaggtggcattctaacctatcagtggaccataatatatttaactattgccctattaacagttatttttctagtttctaatattactataatcataattattatagttatgtcagtattaattataattatgatactaagtactatttattgagtatgtcaggcaccatgctgtgtgaaaacatatactttttttagcccttattatgaatatttgaagtatgaatttaaactcccattttgtaaaagaggaaattgaagctcacgtagtaactcaatcataactcatcagaagttccacagctactacaagatagacccagaatatgcacgaatatccattcaacacaaaagtccatctctctattgcttccctatttaataaaaattttgaatggaacattttcttacgtaactgttagtatgtcttatcattttcttgagataacttcctagaagtagaattcttgggtccaaagagatgatcctatttttaagtagtaagaaataacatttagttgcaatttgaaacatattaaatatctgtgagagaaaccttatatgggtatgaaatttttagttttgtcaaatgatctgattgcgaatggtgagatagccatgtctgagagcccccattttcttatgttaccagcagtgaagagcatcttttttaatagcctgtattttttagagcagttttaggttcacagcaaaattgactgcaaaatacagacattccttgtgtatctcctgcccctacatgtgcatagcctcctctattatgaccttcccacaccagagtggtacaattattacaattgatgaacctacattgacacatcatcacccagagtccatagtgtgtattagcgttcactgttggtgttgtacattctgtgggttttgacaaatttattacaatatgtatgcaccattatagcattaaacagagtagttttattgccctaaaaatcccttgtgctctgcctatttctccctcctttcttctttcctcgtggcaaccactgatctttttactgtctccatagttttgccttttctagaatgccatgtagttggaactatgtaatatgtagccttttcagactggcttctttcacttagtaatggttcttgaacatttaaggtaagtaaatggacagttaaggttcccacatgtcttttcatggcttgacagtttgttttgttttaatgcttaataatattccattgtctgaatgtatcacagtttatttgtcagtttacctactgaaggacatcttggttgtttccaagttttggcaattatgaataaaactgctgtaaacattcatgcgcaggtttctgtgggaacataagttttcatctcacttgggtaaataccaaggtgcatgattgctggattgtatggtgagagtaagttgagttttgtgagaaactgccaaactgtcttccaaagtggccataccattttgtatttccaccagcagtgaatgaaggttcctgtcgcactgtattcttgccatcatttgatgttgttggtgtttttgactttcactattctaatagatgtggagtggtatctcgttgttttaatttgcaattaattacccaatgacatctacattattttttaagatttatttttattttaatattttatttatgtacttattttcaattaacaaataaaaattgtatatgtttatcatttataacataaagttttgaaatgtgtatacattgtgggatagctaaatcaatgcaattaatacatatgttatatcacatacttgtcaatttttatggtgagaatgcttaaaattactctgttagtgatttttaagaatacaatacattattattaagtatacccactattttgtataatagatccccagaacttatttctcctgtctaaatgaaattttgtatcctttgaccaacatctccacaactgagctccaccccccagcttttggtaaccgccattctactctctggtacttatgagttcaaaattccacaaataactgagatcatgtggagtttgtcttcctgtgcctggcttattttacttaatgtcctccaggttcatccatattattgcaaatgacaggattttccttgtttttctttttaaggttgaatagaatgtctttgaatatatccaccacacattttctctgtcaatttttccattgatagatacttagattccatattatggctgtgttttggctattgtgtctaaagttgcagtgaccacaggagtactgatagctgttggacgtactactttcatctcctttggctatatactacaacatttaaagagttttaaatcactctttatgaattaaaaaaaatctcaggttgttttcactgtagatgggctagtagggttgaggaaaggagagtgggaaggctaagctattcaaggttgtcttcaatgaccactttcccttactcaccccctcttccaaggtcttagctaatctcccagggactgaacactctccagacaaaatcaacgtaacagaagtctggcatttgagaatatttgagtttagttacctgtagtcttccttaggtatccctagaaagattagttcctggataaccacctccctcccttccccagataccaaaatgttcaagtcccttacatgaaatagcaaagtatttacatattacctatgtgcatccttccatatactttaaataatctctagattacttataatacccagtacaatgtaaatgatatgtaaatagttgttatactgtattttaaaatttattttcctttattattgttttaattgtagtttttttttttctgaatattttctatccgaggttggtttattccacagacatgggaactgcagataaggagggccgtctgtactttgtttgatacctgtcctgccggctccctgccacccccggcaccctccgtttctttctagaactatttacattaatgtctactgtgagctaggcattgtgataggcatgaaataagacacagtcctggccccacattcaggggacatatatatagacaatcacagtgcagttgggtaggtcttggtgtagttatgtaccaggtgctaacagagtgcaggggagggacatgtgagctgagggttctggggatgcttggtagagttaggggttgggaataatggggtttcttcagaagggtggtgaatgagctgatcttaggagaatatattggattagggctatgaaagagagcatttcaggcaagaaggaggatttttttttttttcatgaactcactacttaggaccaaactgtgagcaccagcactgtttcattttcaccttatggagaccattattggaggtgtgttcatcaagttttttctatgaaccaacaaacccaaatctcagtggttcacacccagaaacatttgtctttttgttcagagttttttcaggcagctgttgtttgcctgatattggctggtttaagtaaggcttggtccaggttgcagatcaggtttgagtttgttcttagtgtctccttctgggacccatggctagtcgggacatgtgctttttatgataatagcagaagcaaaagagaccaagcctaaaccacacaagcacatttctgctttcatctgtttgctaacatccctttgactaaagcaagtcatgatggccaagtccaaaaccaatggagcagggaatataccttctctctctattgggaagtactaacaagtcacatggcagagagaagttatgaattacgaatcaggggcaataatctactctgccactgtggtttcctgaaatgaagtcctgatagaatttggtcgcagggggattaaaagggagattctcactcagcctcagcaacaggaaagaaagaagttacaaaaagcctgtaaagaatctaaaggaggatttgaaggagagaaagcaccaataatctaactgcagcactttatttgaatttaagtaacgctggtcaaacattcttacaggctcttaccctttctgatctataaattcttcatgtagatattgagccaaaggttagatctagaaaatattatatctagtccttagcatgttggtttcttttcaatgcgcttaaacgctcagttaacgtggctttagacataattgtaacagaattacaaaggacagcaccttggcagaaagttcttcctggttttgatgtgttgctactgccagatttttgtgacatgctgatgctaatctgtcaaatagcctgacactaagtgagaagagaaataaaaggaggcatgacagggccaaggacctggtgtggtggaggatggttgggcagtagcaaatcctctcatcagccctactgagactaagcaacaacctatcttcaggtctctgggttcggtggttggggggagcgggggcggtcctacgtgggttagaactcatactactctcagaaatgcacctactttcagttacccaccaattctgatgctcaaagcccctccaaacctgttttctgtgggtccacctgagctcgcttaactaagatagcacaaattctgccccctcttatgggaacatacctaagctaatgacacatgaggtgctacctcttccgcatgtatacctacgtgtttgagctttttcctcccttggatgtgggagggtatcagtctattttataaacattttgtcaagtgtcctttgagtcaaataagagaggatattagaaaagctccagaaaactttgggaggccgaggcgggcggatcacgaggtcaggagattgagaccatcccggctaaaacggtgaaaccccgtctctactaaaaatacaaaaaattagccgggcgtggtggcgggcgcctgtagtcccagctacttgggaggctgaggcaggagaatggcgtgaacccgggaggcggagcttgcagtgagccgagatcccgccactgcactccagcctgggcgacagagcgagactccatctcaaaaaaaaaaaaaaaagaaaaagaaaagctccagaaagtttggaaaagtaaattcagacctgagagtaaccaagagagttcccaccttccttctggtcaatgttccaggaaggcgaagcactggatttaccctccactttgcagttaaagaggaaactcgaaataaatattcccttctacaggtttttttttttaattaagaatagatgagtcttatgttttgtgtgtggtggtgacattcaaaacatagtttttcagtgttttgaaaagtaatttacctaagaaatgacaagaagagtaatgcaacacatagacagcattgctgtgagttgtaaaacattgacagaacgacaaatgttcctgtggcatagagtccttctgaatcacagaaatgacatttggatgaaagcaaatcatttttacataggcacactgctaactgtgcagtgaagccagaaatagcacaccttggaagtgggccagagagaaagaacacctaagaattttatgttattcagaaaaattttcactttttcggtaggatttttgaggagtaaagaaaatatttgagagccttaaagaaaatctgagctttgttttttttttttttttgagacagagttttgctctttgttgcccaggctggagtgcagtggtgctatctcagctcactgaaacctccgcctcttgggttcaagcgattctcctgtctcagtctcccgagtagttgggatgacaggcacccaccaccatgcccagctaatttttgtatttttagcagagatggggtttcaccatgttggccaggctggcctcaaactcctgacctcagatgatccacccgccttggcctcccaaagtgctgggattataggtgtgagccactgtgcctggcctttgatttttatttattaaaatattagtcatttattgtgttcccgtatactcatcaagtgtctcttgagaaaactcagaccaagcaggaaacataggcttgatgtttaggagacagagtaaagtgggaggcatgacatggggagctgatcacacagagattacagatggagataaggagtgcataacatccccaaggatggacaggatggagagaagaaaaggccaaaatcaaaactttggaaaatgcccactgtggtgggctgataatggctcccaaatatctgtccacattctaattcccagaacctgcaagtgttaccttgtttgaaaagagtctttgcatatgtggtttacttaggaatcttgagatagggagattatcctccattatccaggtgatccctaaatgtcacaaccagcgtccttataagagagaggcagagggagattagacacaaacactgagaaggtgatataatcacagagatagagattggagtgatgttgtcacaaggcgaggaacaccaaggaatgctggcgcccgtgagaagctgaaggaggcaaggaatggattctccccagagcttctgtctacctttctggagtcttgattggcctacaggtgttcagtttgcacttctgtggaaacagggaacatacagcagtgacacagagccctgccgacaccatggtgagagacacctggccttcagaactgtgagatgataaaatcttgtttgaactcatcctggttgtggtaatttgttaaattgggctttgggaactaatatacccacctttgggaacaggaacagaaagagtttaaaaaagtaaggggaggtagcaagaagcttaagtgtcatgaaaacgaaagccaaagcaagagtttaaaaacagatgagcagaggcaatggtataaacgctagagcctaaagcctaatgggtaaaaatgaagattgaggagaatcattgatatgatagaagctaatgatggcagctaacttgtactgagcacccattatgctggacattgccataagcactctgcagatataaactcaattctcacaaaaccctatcaggtatgaattattgttaccccattttacaggtgaaaaaactgaggcaaaaatttaaataaatgcattaagtaacataggtggtaaatggtgtggccaagatttgagcccagaattctggctacagcatccacattttagccactactttgtactaacctcaccttatcccccaaggtgtgtgtttcccaaggttctgactttgggtcttttatcaagtaaggtagatgatgtgtctcaagaggaaaaggtatttttgtaatgattatttgaggttgaaaggaggaagattaggaactttatatcacctggaccccatcttctcagctgagttggagaggaggctatctgatgaggctgagggaggcagctaagtttctgacctcagggagcctaggaaagacagtgaggatacaataaaacaggaagcactaaatgaaaaacttgctgcacagtgaagcatgctcagtgttatttccttgactggcttttggcactgtgccatctgtgcccaagatgtctgcaccatgtagcgtgccaagtgcagaaggaaaagggactgaaggggcatcatcgccccacacctgccctatggaaagtactttgttcagagacgaagaaggaatccgaaaactgcacaatatgacctttgtcattagaaactcttgaacgtttgagaaatggaccatccatgtactggcagatgaatgagagttcaagggcattacatgataagggctaattgcaagactagagactggagtgggtcagaggaactgaaatgtgtcaaggggaaggtacagctctagatagttcttactaaggtctttgacagctgatcaagaatcaggaggacatttcagcctggacgatgccatgggccaagcatgggagaggggagaaacagatggttctttaagagcttaggccaaaggactctcaacattctgggcttccaatctgtcccccacccaggatagctttctgttaagttactattcagaaccactgcaggcttaaaacaatgagtgtttatattggtattgaatccattagactgcatggtatagtggaaaaaggcaaggttaaaatatcagttaatcactttgttgtgtgaccttggtcaagtaacttctcgagcctcagatttcccatttgtaaaacatagataccaattctcaggctcttatggttgtgatgatacattaatgggataatgatcaatatcgagtgtggtgcctgacatttaatagatagtgtcaacaatttttttttagactaagaacaaattggatgatgtaatttattggctgacaattcatttctaaagatgtgacttcagaatgttctataaatgttaacattttcaaatgcccagagtatattttctatcttgcatactagctatttatttacaaatctctttctcccattgacttagcccttgtgtgaggagagctcttttaggctaggccctttatctgtactttgaggacccttaattcctagaggaagaacatggatttttctcaggcattaaagattccttccaaatttccatgtaacatacccactttcctcatacctatcttctcctggtaatattcttgaattattttttatttttaacattttttgctatgatctacattattatattttaaaaacacaatttcaagttatatattttaaaaaaatgccatttatttccatgatacaatttctattctcatttacgtcattttgtgcttccttcagaaaagttatataaaagctaaaagtgctgtgctgagtcagaatcctgttcccctcagcccaataagcctctgcaaaaaggaaaagaagaaattttttcaggagagcagtctatttcatatttgcagactgagagtgcatgtatcatctgatgttgacttaaaatgtctctccccttcccttcatctgtcatccacaaagctgtttgcattcttctggagtcttgatgggtctacagatggttcagtttgtacctccgtggaaacagggaacatgcaccagtggcacagagcatggtggagtggaagaaaatcactccaccatgatgtggatgatgcatgtgtggttgatgctgtggtgtctgtcctacttatagagagagacctctgggagtagaaggctcatacttgcctaggcacctgagcatcagagtgcctgggggcagcctgccagcctatctcctacggggccacccagcctgacagtcctaacctgggtgaatctcctgagaccaaggcttaggctcacagcattgtgggcttagaaacaacatcttgggggcagactcataccaagcaattcatgtggaggtagatgtgtgaaagcccaggatgtccatctgttagctcacactgagaaccctagctgccaggtagacaggaacactagcgtgaaaactctcttcctgtactggaagcccaatcctaatccataggttatccggtgagcactgttggaatgagggcagttaaatggataaaggagagtaaaaccatatgtcaggactgtctggcggtgcaactggaattcttgaacttagtctgtttcttagatgagtgctgcctatatttgttacagtttgttttaatgatttcctggcttaacaagccctaatctgatttgagtcatccttccttaagatttgctagagtttacaaattggcccaggtcatatcctctttttcccctgggaaaatttaaggtgacccttcttacctttgacatgacctatgattggtgattttgcagtttacctcttagcagacttgttattttccctgtttctgggtttttagtagacttcttattgtagctttaaaataattttttttacattccatttttttaatgttcaatatccattttaatgcatacaacaacattataaggtagatactgttttatatcccatttacatataaagaaacctgagactcagaggctaatgaacttgcctagaaatacctggccagtaaaggaagaggttgtgattcaaacctacgcactctgattccaatacttaagacatacctgtggctacttttctgaatgtttcacatgtactatctaatgtaatccttacagttacacaatttttattaaaaagtacagttctcactcagaaagaaagaaggatttgcataaaaaagaatttcaagcccagaaatactaatattacaggtgtcaggaatagtaacatccagcctacttccagcctttctctctctctctttctctccttccctcctttcttttctccctacttccttctctctctctccctctcccaccctccctccttctttctctttttatttacttacttatttatttatttttattatactttgagttctagggtacatgtgcacaacgtgcaggtttgttacatatgtatacatgtgccatgttggtgtgctgcactcattaactcgtcatttacattaggtatctcctaatgctatccctcccccctccccctaccccatgacaggccccagtgtgtgatgttccccttcctgtgtccaagtgttctcattgttcagttcccacctatgagtgagaacatgcagtgtttgggtttttctgtccgtcaatgatagactggattaagaaaatgtggaacatatacaccacggaatactatgcagccataaaaaaggatgagttcatgtcctttatagggacatggatgaagctggaaaccatcattctcagcaaactatcacagggacagaaaaccaaaaaatccaaaataatttttaattctctttcttatcggtgtttcttagcaagaattcttctgtagtgaagaattttccctcatcaactaataaaaaatggctagtaaaggcaggataaatgcttgctttattccctttattaatcttctgagtaacgaattggtatcttaggaacctccaatggtgaacaatgagtgttttaaaaagatacacattgaactcagcctttctttatacagttgatatgcatcagtagatggagtccatattaatgatgtaatctatataggctgatgtaatcaattctacttttgaggagattgacatgatgtctggaatttgctttaaatactccagcatctaaaaagcaaatcaacaacaaagggagtgggatcgatgaaaaaaaattggaaaaatcttgatatttgttgacactggttgatgagtacatggagttcattatactattcattttgcttttggtatgtttgaaatatttccaaataaaatagttctcaagatgcatataattctaaggttatcaagagtgtaaatgtgagtttagccaacaactttggcctatctgtgaatcttgtggagaaagttcttgatttttattgaaattccagataccccaacagtagttcctaagccctactgctttggcaacagcatgtcaaatatgtgcacattttcccagcattttggaaggaatttttataagaattttcagatttgactgattggatcctgattcataaaagtcttgtcttggtaactaaggatgtctacttttgagtgatgcataccttaagaatttgaaacatggttgcttctgttctctggacttcatatgagagcgtaacagccttttagccattctgaagtgacttcttcagtctaatggtgccatttctcattccaggtttaagtttatctattcatggggctgaaaagcgtttgcaaatccatcaacggcgaagtgtggcaagccgcccagcgtcacgtcgtcgcctgcctgtggtcaggcattcctcactcccaccaggcagaaggtcaataaaaatggaggcaagctcttctggaatcactaatgga

SEQ ID NO: 15411 - DNA, 44434 bp, Homo sapiens
tggtacaccggcatgctcttcccagctgccttcattggattgtttgtctttttgtatggcgtcaccactctggatcacagccaagtcaggtacggggagctcttggatgagtttgcctttgtttagtacttagaggtggctgtttgcactttgggggtattcacagattgtggagacatttagcttttcactcaaacttcctaccctctcatggaaaaactcaaagtttcagttcactaggacctctccatccattgtccttgctgccatggtcttcagataccatgcaagtaaaagttaccttttcagacatacaagccactatatatccacagaacaagccgccttcattcactggctataagtgctctctttttttactttttcactttttttcttagctgatactgcaaaatagtgaactaacaattctctcttatgaattctgtgtttttacaacttgagccagaaagacatctcaccagcttgctagtatcttgggagcggttcagtgtcgatgaccattatcttggttgtctcaccagaatataggtcaaggtactcacagagatcttgttgcaaggctggacaatgatcttaaattgtaaatatgccttttaaatgtgattgcaaaaataaaagtgagtgattaagccttccacctacgaaaacattttactttctggtgaaattgttaatgtgttagttaaatatagttttcccccaggatagggctagaatctctagtcatttatgttttgttttccatattagttttaacttatcatacacatagagatcaagataagtatctttatatatcttcttactcccttaattcagtatgaaattgcttcagacctttgaaaagtgaaggacatttctataatttgggatataacaatcaatgtttggcttcatgtattttcctgagtttaacttattaatacataaagataaggaacagcctcataagtaggtttaccaaattatttaaatgggcaagaacttgtttacattaataacagataaagctaagatgcttctaagggcaaacatttaacctactggatcttatttactagttgaacattctggtgaagttagaaaaaaatgttccatgtcatcaaaaagcagtcctttctgttctcttttccagtaaagaagtctgccaagctacagatatcatcatgtgtcctgtgtgtgataaatactgtccattcatgaggctgtcagacagctgtgtatatgccaaggtaatttcaaactgtagcattttagatgaattgaatttaacatacaccttcctgagggatggtgggtaactctattctgtcatttccagtctttgattttcaagtgaatgttgtaggatagacttatctccatcattcagtattctaattcccatatctttgttaattgtccatgtatttggaaggcatggctctagacatcatccatggagctgcagcatggcacagtgtgaggagcacggtgctggagtcagagaaagttaggtccaaattttgactctgctgtttaccatttctctatctgggaataagatatttaacttctttgagtctcagttttctcatctgcaaaatggagaccatgatgcttgtttcacacggagttaaggtgtatactgagcatagtgcttggtaaatagacctcagtaaatgacagctatcatcatttgcctcctcttcatcatcattattgtcaaaatgacctccaattaaggctagctcagccacttacctctttagccctgaaatgtgccccctttctaagaaactcttttttcatagaaagaagctcagtcttctgagctttcttgtctctaaaatacaggaaatatgtgtcctctctgtcctaccctattggcatgacgtgaggactaaagaagagaatatatgtgaaagtgctatgagaaaaaaaatacatgacaccactatttctattatgtgttattgcatacctctttctcgtgatatgccttactttatttcttagacatattcctcacattcctagagttttttgatacttaggtggtggtgtccataacacaaaacaatagctgaagtttgagtttgcgaagacttttccaagagctactgccttttggcttgcccagattcagatataaatggcattggcagattttatccagcttttgtaatcactgaagcctggatctatctaattactctcttggcattgcagagttttgttcattttaaacaagggaacatttgataggcaacccaggatcccgcctatctataatgtctttagtactgcaggtggccggtctgtgtaggaggagcccagactgcagcagtgagcagtggttttagaaagatttgagctcttatgttgcaagggacaaaaaaagcacaaaatgctctgagccctatctttaggaaacactcagatagacctgagtggataaggataaatttaacagagtgactttaggacatagagatttggtgagcatcaagagctttgtcagtaatataattttgtttaaaggtcagatataagcctgaatgactcaggttttaaaattctgcttctggggaaaccccaaaatcagaagccaatttttttttttaatgtggaaagatatgcttgagtaaaattctctttttaggagatccttaataattcttttaaagaatcgtcatgaatagtttatgagtgctcagattttataggggcttattttgggagttattctccctaacttaagacctagaacaataataattataatagttacagctataataatagctagacaatctacattgattatttctaattctcacagcaacttcaagataggtgttattatttccattttattcagagactcaaagaggtaaaaattactcatgcatggtcatgcagcaataagtagctgggccttggtttattgcactgcaaaacatgccttctttaccactgtgccctgctgagccacaagatgtttagattctgaatttaacatttggccttgcctagaaacttagtaaaatgaaagataaaaagccttagaatgacagaattggagttatacagggtttcctttagaaatatttattagagatgtcagagtgatttcatgggactgtggatacacagaaatattaaatcagattggcgctgggatctagtccaatcagtggctgttctgctgatagggatgctgtatccttgactcttgtgtttgcaagaatcagaaacccaactcctactggcttagtcagaaagtgatgtaatggtacattttgccagaacagatactggggtggctcacgctgtgggatcatgagggcctcacagcctggaactgttcctccagggaccccggtggccctgcccacatgatcattctgtagactagttctctgtacaatagaaaagatggctaccagctgccttggctccaggcttacgttttccttcccttgtctccttaagtggatttttgtgcttattttaaactcctggtctgctgccacactgtgtctatgggaatcttctttggaggggaggggttgttgtcttccccatatatttcattattttggcctgttgggtacttgtcctctggaggcgtcagccactttgagtaagggtcagaggccaaggccaagtttgtcagtcctagtgagttacagagaggacagcgtgccccaggcacgactgagtgctactgctctatcagaggacttttctggtcagtttcatttttaaacctgcttagaacaaagcagaattgggcactttcccttgattgtaatctgccaatgctggggtttaagaggaggtggactatggagtgaatgccccagggcagctatccaggtagcacctgcttttcacccatgtctaacagagcaggactttgagcattccctgatattgctccaggaataccagcacctgtggtgtggcctgcttagctgatttctgagggaggggaaactaattgtccaatggccatttgagggagagaggctagagtagagcttatgtatttctctaacctgtgctctcactctacctggtatctacaacctacctctccccacacaccaccaccatcacacacataccagttcaagataacctcccatctcccctgaggtttctcagggtctttgttttttgtttttgtgttttgttagttcctggaatctactaccttgcttctccaggactgattttggcagaaggtgtcatcagcttaagctaactgactatctcattgggaaccggagcccctataaccttacccctcctcattcatatattgtcaaattgataactgcagcagaaagctgtctgtctccaaatgtttgtgtatcagccccagggcagtattctgattggttctattttgagccatgtgtcccttgggaccagcaggagttacctggagaaaggagaatggaagacagatgatctgggtagccaaaacaatgataactgcagtccattccagaatggacactgatggtgcaagctacactttctagcaactctcagtaaatactctgatagaggctgggcgcggtggctcacgcctgtaatcccagcactttaggaggccgaggcaggcggatcacctgaggtcaggagtttgagaccagcctggccaacatggtgaaaccccatctctacaaaaatacaaaaattagctgggcatgatggcgggtgcctgtaatcgcagctacttgggaggctgagacaggaaaatcacttgaacccaggaggtggaggttgcagtgagccgagattgcgccattgcactccagcctgggtgacagagtcagaatccatctcaaaaacaaacaaacaaacaaacaacaacaaactctgatagatagcacagtccagtcaaataccgctagaaccttcaaggttggtttgatactgagtgcccaatatacagcttaacattccctctggcatatgaaatagattagcttcagacatttgtctcacagtaggtatttgagtgctgcccatctctcctctattcaaagaaagagaaacttctggaataatctgaaatacttcacgttctgatataacatgaaaaacctctttatatttggtgcattctcgaaggaacaataaagtatactttataggtagctataaagtacccccaaaaaaggttattctttatgaacctatcagtcatcatttcaatttgtcatggacattggtattatttatactagaggcaggaatgagcttggcagttttgcagtaaaaatggatatttttgctttcttctgtggtgtttgcaatagaatatattattctagcaataaagtattgctagttgtctttgtgttatgtgcagtaggtaaatatagtgattacccaaggctttaataagggtagagttggatttagttaatggttctgctcttttttataaggctgaaatccagagggcagcccagaaaatgtttgctcaaaactgcataaacaaaatagccatgttttcaaagtgaataaatgaggcattaaaaacagtgcttgggaagttgaaaacctttaaagcagcactaacaataccttcctggtcctaaatataactatatccatacacatatgtacgtgtataagagttttgttgtgcacaaaaggggattcttagtagcactattggggatgctgataaatgttcaactagatgataaccacataaagagaacaaattgtatcctctatatatgaactaccttgcaattagaggaagccttttcttatttatggttcaaaaggaatattccccctacccaaaacaaagcctgtaaaactcattatataatcacagctatttttacagaacttgaaaaaatttgaattggaatatcatatatgagaaattaactcagcaccgattcttattattcacaggtaacccacctttttgacaatggagccactgtcttctttgctgttttcatggcagtctggggtaagtgttctataaccataaaacttgagttttcctcatatgccctatgatatattcctttagaagtttcactttggatgtgaaagaaagaagcttgagtaaatggaattagctttcctattagtagaaagttggtaaataatttattgggtttattttaaacgatattgtagaagagagacatgtctgatttctcttaaaccttcaacaatgtcattagcactctgttattagagtagaatttactttctgttggacacagaaataaagcttatggtacaactttagtttaggtcaggggagaactgaaacaccatctcagtatatataggactttctattgtaagtggctaatgtgtgagtacccacctttagctttcttctagctctgtacaaaattacccctaaaaacaaggtctattcacaggactgatttgagctttttgatataatttcaagctaacagccccatcacacaaggtgtgatggaaacagtcaaatatttggaagtaacaggacttgattgaaatctcaactccctttacacactaggctgtgtgatttttggcaagttatttaacctacctctttgtaaaatgggttaatatataatagtcaaataattataaagcttcaatttaatgatatagaaaaacatctcacaaattcatggaaagcagttaatggcagttacctttggaaaggaagattcatggaagagtaagtgaacaacgaggagagacaaactttatgctatatatttttagtctggtttgaattttttacaattatacttttctcctataactttaattgccaaaatctgaattttgatgtaacaaaattctactacctttagacttaggctcatcttgttcattatgtctgctatgaatattggaatcttccccatctttcaggccccagctgaaatgtcatctgctccagccaaaagatgtctttctcctttgaatttccatggcattttgttcttagggcacttaaaattattttcacagataacttgtcttgcctagtagatttatggtccttgaggaccattatgattatcagagatctcatattttttttttttttgagatagatggaatcagtaagtttctgttggatggatgggtgggtcaatggatagataggtggatggatggatggatggatggatggaaggaaagaaggaaaaagagaagaagaaagaaaaagaaattaccaaaagtatttatttatgatacagtgaatgtatttaagaggtcttttttgataagtggaaacataaaaccttgttcacttgagggagcttgttcttgatatattgtgtcttttgtacctagagactgtcaaaggaaaattgtcccacccatcacagctctgttgaagggacatgttttgaaccccatgactccagtccctctcagccagtaagcatttgaaccaagatcagtcaaaccacaggttggtgagtggcctgggaaaaggcctgaggttctgcccagacaaggactggtagggccacccagattcttattctccagaatgtggactagaaaatgtaaagggaaatagggagttagcagcaggaatggacactgaaaaatacagagggcaggagggagggagaaaaagaaagattaaaattgaccattgggtagaagtagggaccaggaggaattaggaggctgaagttatgagaatcagaacctagaaatagatagaagcaaagaactagtggaaaaattagagggcgaaaaagccaactgggagaaaatgtaagacaaccagagggaagcaaagagagaatatagccaagtcatgttactagtggagtgtcaggatgaagacccagactctcttgtggctgaggcctctctcaagcttcgggcttccatatcctgtctctgaacaggccatgtattttttcctgtaggattcctgcctcccttggtggaccttgtgaaaagctttcactgttcatgctacccttaatgcttctctgtcccttgcaaacaaactaaccctaacagaattttgattacaggcctgagctctcagataaagaatgcgtatatagttttactagaatctattagtatcatacaccgtgattcggataagccatataatgcttaagctttgccatggtcacaaatgaggggactctggaaatatattcatttcctaaaccagtattataaatactaaatgtattctgtaaaccttaatgtatatagtattctgtaaacgtaaatactaaatgtatattgtaaacctaaatgtattcatttcctaaacttttcaggtcatagcacacataaaaatgaaaatatttacacagcagctgctgtacatggaggagcctcctcatggccatggatagggctgtcccaaacaccccagcctcagaagccacaagggttgaaaggggcattattgttattcctggcataggcatttggaagttctgccttgggctgctaatttactgtgcaatgagttaatgcttctatataagagtggtatcctggtggtatcctggaagaattaaaacacaaaacttccttacccacttcaatatttcaccaatttcaaatatactttgaattaaataatggtttcttctcacagtttacctcctgagactacatagaagtaaatttttgtatgatgacatttgttcataaggcagaggttattactctcccccactacctccattataaaatggattgcataccctctttgcaagttgtgttttatgttatagatgacaaataggttttgttttatccccttgccaacctcagctgattggtgctggctgcctggagcatggagttgagaagtttctgaggttgaaagtgggtggattggagatttaacagcccttgtggtttggagtatactttgtaagactctgatggatgttttataataaactttgggcacagaggaacattttagggccattccaggcaagacatgcctggaataattcaccctctgaattgctttgtcttagatgacaacttattgcttaaatcccacattattcccagaaatgtgctagtttgagaaaaagaatgagttgccccaagtgtttctttgtagatagagataatgccttttgcagaaatctgaaagagtcaacaatattaacagttatattaatagcattcatttccgagggattactatgtactaaatgcagtcctaagcattgcccatgtatcatctcatttaatctctccagcaagcttttaaaaaggtactgttcttatcctcatatgacagataaggaaactgcagcagtagctagaaagtggcaaagccaagagttaaactgggcagtgtgagctcctctgctctactgctagaatcaggtattgtttgttaccatttccttctgttttagagacctgaaccttaaaataaaggactgctatgcctgtcctgagcctcatttatcctgctttgagacagtaatgttctataaaaatgtgtcagttctaatggagctcagtttaatggtctcaggatcatctcttatgatcgacaagttacagcattaaagaaaacaaatgcactctattttcaggaaattgctagatatggagctgatgagaacagatgtaagtggtttacaagacttctgaagggctgggcttgacgtgttcattttgttacctttgctttgtgtgttcaccggaaaaaaataataaggctccatctgtaaccagtttgtagcaactgggagggccttggcattgggttaggaatcctgacagaactctactacctttgttcaggtcacgtctgtgtgagtgcagggctccctcgggatccctgaggtatgctgtgagcctgggtctcggctggaattacagtgtggctcattcctcaatgctcatttttgttcagaaaggtccaagggtcagaatgattatggactaaataactcctctcccgagggaaaaaatgagtcatcagggaactagatgttggcagagacctgtcggggaaacagattatttccctctgttctgtttctggtttggtttgttttttttctctctctcccccttgtttttcattttttacttctaggattgccaaaagttaagttatccccagtaaacacaccaagcaagatccacaaagctctttaatcaaaatgacaagatggtaattatttagtgtgatcctgttagtaattggtgaatgaagtatgtctcatttaaaaaaataaattttgcaagaatcagccttttgtttctagatatttatgctaactttatattttatagtcttatctacatgttccacaaaaaaatggtaattgtatgttgaaaaaggtacacatttactaaaggcctaccatgtttgtatgcacattcacataggatacctcatcaatttctcatcacccattagaaagaaattactaacctcattttatagatgaggatactgaggctcagagaggttatgcaacttgcccaggattccagtagctgataaggtgtggagcctaaactttaaaccagatctggtctgtttcactccagagtcattccaaagtgtgtccaccatgttgtgcatcttctgtgaagtgtgtcaattaagatctcattaactcatacacaaaaatgagttagatgtgatctctgctttcaaaaatctcagtatattaaagaagcgttgataattataatacagggcaagtccaatttacaataggccaatgagggtttatgtagtcaacttcctgaggcaaaaggaaaagcagaaaaggttcacccaagaagagatattggaaagaagtcttagctttgccaggcagagtagtggggttggaaggagacatagataacattcttaggtgacaagagtatttgtaaagctctgaaaaggaagaattggctgttcagagtgatagggaggttgagtgtgtattagtttcctaggactgctgtaacatagtactacaaactgggtagcttaaaacaatagtttattgcataacagttctggaggctcaaagtccaaaatcaaggtgtcagtgggattctgagggctgtgagggaaggatctgttccatgccagtctcctggattctggtgatggctgatggtccttggccttccttggtttgtagatgcatcactcctatctctgcctctgtcttcacctggcatttgccccgtgtctctgtgtcttcacatggctatcttcttctcaagacggtggtcatattggattaagggcccagcctactccagttatgaccccatcttaactaattacatgtgcactgaccctacttccaaataaggtcacattgtgaggtactgggaccttttttgaggggacacagttcaacccatagcagagtacctgttgaaggctgagagctacttatcacagaccacttgagctacaacagaacatggcttcacgctgtaagcaacagaaagccaactggagttataatccgggaagggacatcatcaattgtatttgggaaataactctggcaacagtgcagggagaggtgaaagtggaggccaactggtggcaggcaggccccttagaaggcattctagtactcagtcaaaatattacgcagaacttggcttcagaaaagatccaatttccagaataaaaaccacacgtgtaaaatgttttcctagctttagttatttataatatgcaaaatttgtgaacaacgtaaatgtccaacaatagaagaacggtttggtaaattataagcagctattataaattgctctttcaaagcatgttgataatacaaagcttgtatttaaatttttttaaagtagggtataaagtatacaagtaaaacacgattttgagtatattaaatgtaaatgaaaacagaaagaaatgatgccataatattaatggtggtttgctttatgtggtgggattgtgggaagatttttttcaactttaagtataatttatgtgcaataaaatccagcaactttaagtgaacaattcaacaaattaggtcaaatatatatagtcatggaagcatcaccataatgatgatatataagagaactttttttcttttttttgagacggagtctcgctctgtcccccaggctggagtgcagtggcacaatctcggctcattgcaagctccgcctcccggcttcacgccattctcctgcgtcagcctctcgagtagctgggattacaggcgcccgccaccacgcccagctaatttttttgtatttttagtagagacggggtttcactgtgttagccagaatggtctggatcttctgaccttgtgatccgcccgccttggcctcccaaagtgtgggagccaccgtgcccggcctaagagaacatttttatcctctcaaaagtttcctcatgcctctgcagtcagtcccttggcaacctgaaacctgctttttaccactgtagtttcagctgttctagaatttcatgcagattaaattattcaatatatagcattttgtgtctggctactttcacttcagttaatgctgttgagattcatttatgctgttgcctgtgtcagtagctggtttctttttagtacagagtagtattccagagcctggctatgtcataatttgttcgtctacttaccagttaatgaatatttgggttcagtatggtttttaactactataaataaacctagaaactattggctcttctagttttttgtttttgtaaattttcataaaagcctttgtagccattcatcttggatgaataattaaaagtggcattgctggatcatgtgataagtgaatgcctaacttagtaagaaattgtttcccaaagtggccatatcgttttgtagtcaatatcagcatgatatgagaattccaggtgttccacattctcacaagcacttggaattgtcagtctttataattttagtcattttagtgggtatatggtattatcccattgcagttttaatttgcatttccctaatgagtagcgatgttgaacatcttttcatgagcttatttgcaatctgcacatcttacttggtgaagtgtttgctcagatcatttgtccatttgttattgggttgtctgtcttatttttaagttaaaagagtacttttatatattctaggtagaaatgcttcatcttacaggtgtttgcaaatttttttccctgtctgagtcttgcatttttattttttaatggtgccttttgaaaaccaagagttttttctttttatatagtctaatttaaattttcttctgcactcattttttgttttatttatgaaatctttgccaaactcaaagtttctaagattttcgtctatattgtcttctaaaaagcttatcgttttagctcatatgtttaggtttatgacttatttcaagttggtttttgtatatggcataacgtaaggggcagatttatttctttccatgtagatatccagttttcctagtaccatttgtcaaaaacgccgttcttttcctttttgaattttcttggtacattttggttgaaatcaatgggccatatatgtatgggtctgttttcagaatttttattatgtttgatgtgtatgtgtacacatggcaataatccactgtcttgattattatggcataataactgttaaaatcatatttttcttttcaaaaattgttttgctgttttaggttctttgcatttccaaaaaaattgtagaatcagcacttaaatttcttcaaaaaaagtgttgatattttgattgggattaagttgaatcaatgtcagtttggaaagattgagtgtcatttagctttttgtttatttacatattctgtaatttctctaagcaatgtcttattattttcaatgtacaaggcttccagatattttgttaaatttatgcctatatattggattttttgagttttttacaaatagtatttttctgtaatttcaattgccagttattcattgctactacatagaaatacaattaacttttgtatattgaccatatatcttgtgacttactaaactcagttattagtgcttctagcttttttatagattccttaatattttcaacatagatgattaagaaatttataaaataaataagttttctttctttctaatctatatgagttttatttctttttcttgccttatactggttaggacctccagaataatgctggatacaagttatgtactagacatccttgccttatgcccagtcttaggggaatgtgtttagtctttcaacattaagtatgatagaaaccacaggttttcatatatgtctgttatcaagttgaaggacattccttctattattaggaactgagggttttaaaaatcatgaatgggtatagaattttgccaaaagcttttcctgtattaactaagacaatcctgtttctttctttcttttatttttttatacttcaagttctgggatacatgtgtggaacgtgcaggtttcttacataggtatacatgtgccatcgtggtttgctgcacccttcaaatcgtcatctacattaggtatttctcctaatgctttccctccccgatccccctatcccccaacaggccccagtgtgtgatggtccctgccctgtgtccatgtgttctcattgttcaactcccacttaggagtgagaacatgcagtgtttggttttctcttcctatgttagtttgctgagaatgatggtttccagcttcatccatgtccctgaaaaggacatgaactcattcttttttatggctgcatagtattccatgttgtgtatgtgccacattttctttattcagtctatcattgatgggcatttgggttggttcgaagtctttgctattgtgaatagtgccacaataaatatacgtgtgcatgtgtctttatagtagaatgatttataatcctttgggtgtatactcagtaatgggattgctgggtcaaatggtatttctggttctagatccttgaggagtcaccacattggtttccacaatgattgaactaatttacactcccaccaaaagtgtaattagtgtaaaagcgttcctatttctccacatcctctccagcatctgttgtttcctgactttttagtgattgccattctaactggcatgagatggtatctcattgtggttttgatttgcatttctctaatgaccagtgatgatgagctttttttcatatgtttgttgcctgtgtaaatgtcttcttttgagaagtttctgttcatatcctttgcccactttttatggggttgtttgtattttcctgtaaagttgtttaagttgcttgtagattctggatattagctctttgtcagatggatagattgcaaaaattttctcccattctataggttgcctgttcactctgatgatagtttccattgctgtgcagaagctctttagtttaattagatcccatttgtctattttggcttttgttgtaattggttttggtgttgtagtcatgaagtctttgcccatgcctatgtcctgaatggtattgcctaggttttcctctaggatttttatggttttaggttttacatttaattttttaaccgatcttgaattaatttttgaataaagtgtaaggaaggggtccaatttcaattttctgcatatggctagccagttttcccaacaccatttattaaatagggaatcctttccccattgctgtttttgtcaggtttatcaaagattagatggttgtagaaatgtggcgttatttctgaggcctctgttctgttccattggtctatatgtctgttttggtaccagtaccatgctgttttggttactgtagccttgtagtatagtttgaagtcaggtagcgtgatgcctccagctttgttctttttgcttaggattgtcttggctatatgggctcttttttggttccatatgaaatttaaagtagtgttttctaattctgtgaagaaagtcagtggtagcttgatgtggatagcattgaatctataaattacttggggaagtatggccattttcacaatattgattcttcctatccataagcatggaatatttttccatttgtttgtgtcctctctcatttccttgagcagtggtttgtaattctccttgaagaggcccttcacatcccttgtaagttgtattcctaggtattttattctctttgtagcaattgtgaatgggagttcattcatgatttggctctctgtttatctgttcttggtgtataagaatgcttgtgatttttgcacattgattttgtatcctgagattttgctaaagttgcttaccagcttaaggagatttggggctgagacgatggggttttataaatatacagtcatgtcatctgcaaatagagacaattcgacttcctcttttcctatttgaataccctttatttctttctcttgcctgattgccctgaccagaactttcaatactgtgttgaataggagtggtgagagagggcattcttattttgtgctggtttttgaagggaatgcttccagcttttgccccttcatatgatattggctgtgggtttgtcataaatagctcttattatattgagatacattccatcaatacctagtttactgagagtttttagcatgaagcggtgttgaattttatcgaaggccttttctgtatctattgagataatcatgtggcttttgtcattggttctgtttttgtgatggattatgtttattaatttgcatatgttgaaccagccttgcatcccagggatgaagccaacttgattgtggtggataagctttttgatgtgctgctggattcagttttccagtatttcattgaggattttcgcatagatgttcatcagtgatattggcctgaaattttctttttttgttgtgtctctgctaggttttggtatcaggatgatctggcctcataaaatgagttagggagaagtccctcattttctattgtttggaatagtttcagaaggaatggtaccatctcctctttttacctgtggtagaattcagctgtgaatccttctggtcctggcctttgtttggttggtaggctattaattactgcctcaatttcagaacttgttattgggctattcaggggttcgacatcttccttcttctttttcttcttcctggtttagccttgggagggtgtatgtgtccaggaatttatccatttcttctagattttctagtttctttgtgtagaggtgtttatagtattctctgatggtagattgtatttctgtgggatcagtggttatatcccctttatcattttttattgtgcctatttgattcttctctcttgtcttctttattagtctggctagtggtctatgtattttttaatcttttttaaaaaacaattcttggattatttgatattttgaagggtttttcatgtctgtctccttcagttctgctctgatcttagtcagccttcttgtcttctgctagcttttgaatgtgttttctcttgcttctctagttcttttaattgtgatgttaggatgtcaattatagatctttcccgctttctcctgtgggcatttagtgctataaatttccctgcaaacactgcttccgcagtttcccagagattctggtacgttgtgcctttgttcccattagtttcaaataacttatttatttctgccttaatttcgttatttacccagtagtcattcaggagcaggttgttcagtttccatgtagttgtgcagctctgagtgagtttcttaatcctgagttctaatttgattgcactgtggtctgaaagactgtttgttatgatttccgttcttttgcatttgctgaggagtgttttacttccaattatgtggtcaattttagaataagtgcaatgtagtgctgagaagaatgtatattctgttgatttgcagtggggagttctgtagatgtctattaggttcgcttggtccagagcagagttcaagttctgaatatctttgttaattttgtgtctcattgatctgtccaatattgacagtggggtattaaatctcccattattattgtgtgggagtctaagtctttttgtaggtctctaagaacttgctttatgaatctgggtgctcctgtattgggtgcatatatatttaggacagttagctcttcttgttgcattgatccctttaccattatgtaatgcgcttctctgtcttttttgacctttgttggtttaggtctgttttatcagagactatgattgcaatccttgctttttttttctttccatttgcttggtaaatattctccatccctttattttgagcgcatgtatgtctttgcatggagatggatctcctgaatacagcacacagatgggtggtcttgactctttatccagtttgccaacctgtgtcttttaattgaggcatttagcccatttacatttaaggataatattgttatgtgtgaatttgatcctatcgttaggatgctagctggttgttttgcctgttagttgaggtagtttcttcatagcgtcaatagtcttgacaatttggtatgtttttgcagtggctggtcccagtttttcctttccatatttagtgcttccttcaggagctcttgtaaggccagcctggtggtgacaaaatctctcagcatttgcttgtctgtaaaggattttatttctcctacgcttacgaagcttagtttggctggatatgaaattcagcgttgaaaattcttttttttaagaatgttgaatattggcccccactctcttctggcttgtagggtttctgcagagagatctgctgttagtctgatgggcttccctttgtgggtaacccaaccctttctctctggctgcccttaacactttttttttttcattttaaccttggtgaatctgacagttatgtgtcttggggttctcttctcaggagtatctttgtagtgttctctgtatttcctgaatttgaatgttggcctgtctttgtaggctggggaagttctcctggataatatcctgaagagtgttttccaacttggttccattctccccatcactttcaggtacaccaatcaaatgtaggtttggttttttcacatagtcccatatttcttgaaggctttgtttgttccttttcattcttttttctctaatcttgtcttcacactttatttcattaagttgatcttcagtctctgatatcctttcttctgcttgatcgactcgactattgatacttgtatatgcttcacaaagttctcatgctgtgtttttcagctccatcaggtcatttatgtcctctaaactggttattctagttagcaattcctctaaccttttttcaaggttcttagcttccttgcattgggttagaacatgctcctttagcttggaggagtttgttattacccaccttctgaagcctacttctgtcaattcgtcaaactcattctccatccagttttgttcccttgctggcaaggagttatgatcctttggaggagaagaggcattctggtttttggaattttcagcctttttgtgctgttttttcctcatcttcgtggatttatctacctttggtctttgatgttggtgatcttcacctggggtttttgagtggacatcctttttgttgatgttgatgctgttcctttctgtttgttcgttttccttctagcagccagacccctctgctgcaggtctgctggagtttgctggaggtctactccagaccctgtttgcctgggtatcagcagtggaggctgcagaacagcaaagattgctgcctattttttcctctggaagcttgagcccagaggggcaccccccaaatgccagctggagctctcctgtatgaggtgtctgtcgacccctgctgggaggtgtctcccagtcaggaggcatgggcatcagggacccacttgaggaggtagtctgtcccttagcagagctcgagcactgtgctgggagatctgctgctctcttcagagctggcaggcaggaacatttacgtctgctgaagctgccccgacagccactgcttcccccaggtgctctgtcccagagaggtgggagttttatctataagcccctgactggggctgctgcctttctttcagggatgccctgcccagggaggaggaatctagagaggcagtctggctatagtggctttgccaagctgcagtgggctccacccagttctaacttcctggcggctttgtttacactgtgaggggaaaattacctactcaagcctcagcaatggcggacacccctccccccaccaagcttgagcatcccaggtcaacttcagactgctatgctggcagcaagaatttcaagcctgtggctcttagcttgctgggctccgtaggggtgggatccgctgagctagactgcttggctccctggcttcagccccctttccaggggagtgaacagctctgtcttgctggcattccaggcaccactggggtatgaaaaataattcctacaactagcttggtgtctgcccaaaaggctgcccagctttgtgcttgaaacccagggccctggtggcacaggcacctgagggaatctcctggtctgcaggttatgaagactatgggaaaagatactaatctgggccagagtgcaccattcctcacagcacagtccctcagggcttctcttggctaggggagggagttccccgaccccttgtgcttcctgggtgagacagtgccctagcctgctttggcttgccctccgtgggctgtacccactgtctaaccagtcccaatgagatgagctgggtacttcatttggaaatgcagaaatcacccaccttttgcactgatcccacagactgaagctgttcctattcagccatcttctgttctcaatcctgtttcttaaaagctggacaatatattaattaaattgattcattatgaaataataggatgatcttgcattccaaggatcccacttcatcataatatattaccttttatgagtgttgcaatatttgatttgctaaaatactttcaggatttttccatctatcttcatgagggttattggcctgtaactttttacttctagtgtctttttgttattgaggtgatgttggcctcataaagtgagttaggaaacgtactttcttctagaaagtagaaatggtgttatttccatcttgaatgtttggtaaattgtaccagtgatgccacctgggcctggagttttctttgcaggaaggcttttaatgcaatcttagtcatttaatggatggaaggttgtccaggttatctttttttttttttttttttttttttttttttttgcctttgaaagagtcaatttgtgaatttattggcataaatttgtttataatattctcttatcttctttctaattcctataggatgtgttatgatatcatattggtcattcctgaaattggtaattaatgtcttctcttttcctgttcattctgtctaaaagtttatcagttctattgatcttttaaagaaccagcttttggttttaatgatgtttttctattgtttttatgtttcatttttcattgatttttgctgttatctttcattttgttcctcatgcttgctttgcatttaattgctcctttttctaatttcttaaggtaaatgcctaattatttatgtgaggtctttctcattttcaaatatgagtttaatgctataaatttcctctaagcactgcttagctatatcccccaaattgtgtttttatttttaatcagtccaaaatattttctaatttcctttgtgagttcttctgtgatctgtgagttactatgtagaagcgtattgtttaattaccaaatgcttgggagattttctaaatttccacttgctgttagtttctaacttcattcaaaggacatagtttgtgtggtttcagttcttttaaatttactgagaaatgttttatgacccacagtatgatatcttggaaaatgttccaagtacatttgaaaagactagtagttccccacatggacacgcggaggggaacatcacacaccagagactgttgatgggtgggaggctagggaagggatagcattaggagaaatgcctaatgtacatgatgggttattgggtgcaacaaaccaccatggcacatgtatacctgtgtaacaaacctgcacattctgcacatgtatcccagaacttaaagtattataataataataataataataataataataataaaagattagtagttcccctttttccacagttttgctttccacagtttcagtgacccactatcaacaacggtccaaaaatattaaatggaaaattccagaaataaacaattcataagttttaaattgtgcacaaatctgagtagcatgatgaaatctcacattgtcctgctccctcccacatgagatgtgaatcattccttgtttggcatatctacaccgttcacactacctgcccattagtcatttcgtagccgtcttggttatcagatactgccactgtatcacagtacttgtattcaagtaacccttattttacttaattatgtcatcgaagtgcaagagtattgatgctggcaatttgggtatgccaaagagaagctgtaaagtgctttgtttaagtgaaaaggtgaaagttctcaacttaataagtaaagaagaaaagaaaaaatcttacactgaagttgctaagatatacaactgtaagatatattcttacagttggtaagaatcttctatgcatgaaattgtgaagaaggaaacagaaatttgtgcaatatatatataaggttcagtagtatctgtggcatcttctgagggtcttggaatgtattacctgtggataaaaggggactagtgtatattctgctgttgttaattatagtgttatctaaatttcattgattattaagagagaagacccaaataaataaaatcagatatgaaaaaggagacattacaactgataccacagaaattcaaataattattagaggatactatgagcaactatatgccaataaattggaaaatctagaagaaatgcacaaattcttagactcatacaacttaccaagattgaaccatgaggaattccaaaatctgaacagaccaataatgagtaacaagatagaagccatactgaaaagtctctcagtaaagaaaagcccaggacccaattgcttcactgctgaattctaccaaacatttaaagaagatctaatagcaatcctacttgaactgttctaaaaaatggaagaggagggaatatttccaaactcattctatgagtccagtattaccctgataccaaaaccagacaaagacacatcaaaaaaagaaaactacaggccaatatctttgattaatattgaatcaaaaatcctcaacaaaatattggcaatcaaaattcaacaatacatgaaaaagatcattcattataaccaggtgggatttattccagagatgcaaggatggttcaacatatgcaagtcaaccagtgtgatacatcatatcaacagaatgaaggatgaaaaccatatgatcatttcaattgatgacaaagaaagaatttgataaagttcaacatttattcatgataaaaaccctcaaaaaactgggtgtagaaggagaatacttcaacataataaaagccacatatgacagaccaacagctagtatcatactgagtggggaaaagtgaaaacacttcctctaaaatctggagcataataaggatgtccgctttcaccactgttattcaacatagtactggaagtcctagctaaagcaatcaaatatgagaaagaaataaatggcacccaaattggaaaggaagacatcaaattatccttgtttacagatgatatgattttatatttggaaaaaacctaaagactccaccaaaaatctattagagctgatacattcagtgaagttgcaggatacaaagtcaacatacaaaaatcagtagcatttctatatgccagcagtgaacaatctgaaaaagaagtcaagaaagtaatcccatttacaatagctacaaatacaatcaaagaactaggaattaaccaaagaagcaaaagatctccacaatgaaaactatagaacactgacgaaagaaatggaagaggctttttctagagatgccctgctgggagagtatccatggctttgcgtccccatcatggccctgcggtcggcggcctcctcctggagcacagcaaggtcaggtggcacctgcttgagtcctgcgttgccatggccacagttcctgagttgctgcagcagcaggaggaggaccacaggaagctgagatctgtatctgtggacctgaatgttgatccctcacttcagattgacatacctgatgcgctcagtgagagagataaggtcaaatttacagtgcacacaaagaccacactgcccacatttcagaatccagagttttctgttacaaggcaacatgaggactttgtgtgactacatgacactcttcatgtaccctagaacttaaagtataacaaaaaaaaaaaaaaaaaaaagaaagaacagaccatgctgggcttattgtgagtgttttagaaaatcaaataagctagttctttctgccttgctattcatttagtttaaagagacttatatccactttttataatggattgtgaaaattttgatttcatctacctactagagtatttgctaactattgggtaagtggaaaatatgtgaaggaatagtgttacagctttgaggtaatgcatacaggcttacattatttatgttgtaaagtggtataaacagtgtaatgactttagtcttatttacctttaggtttggtttttctctggtatgttctttccaatgtcagtagaattgatttctaggaaacattagtattggtaatagtatgtgataagatttctcaaaagtgctgaaggaggccatgcctgtaatcctaacactttgggaagctgaggtggatggattactgagctcaagatttcaagacctgcctaggcaacatcatgagaccttgtctctactaaaaatataagaaattagctgagcatggtggcacatacctgtagtcccagctactggggaggctgaggcatgagaatcacttgaacctgggaggtagaagttgcagtgagccgaggttgcaccacttcactccagcctgggtgacagagtgagactctgtctcccaaaaacaaaaaagtgctcaaggaggcagttttcagcccttgattgttaattcttggctgcaggaacagaggcttagctgattttaaaggagatttccatgcattttgtcctgccatgcagactgaagaatctgtccaaatgacaatttcttaataattgaacaaaattagtactgaagcttatatttagatatgttctgttcattcaaaatcaaagtccttgattatcctttgggattaggaaaaaaatcctttggaatactggagacttcataatcttgatggctaatcattggtgtttagcatttgttgtactagttttaggccaacattgaagcagtatagacactgttgtgctctgaacgattgtctgtaatggataaactgggcaaatgattgccatcaaagtgaatacaggaagatacctccttttaaatggccagaagaaataaggaaggttaagaaaaaacaggagttgacttttaaatagccccataggagtggagtggttgtctcctgtggaccagcaagagtagaacgaggcaccagctagaaaacatcgcttctgggacaagagactcatgagttcctgcctctgctgcagattccgcctgctcctacgaaggctgacttcaatggtccttgagagaagatgcagaaactgggagaaggtaaagggtctttgaccaaagaagaatttgccaagatgaaataagaactggaagctgagtatctcgctgtttttaagaagactgtgtcctcccatgaagcctttctttagtggctttcttctcaccctgttctcagtaaagatcgcaactttcatattttcctggaatatgatcaggatctaagtgttaggtggaaaaatactaaagagatgtttggtggcttcttcaaaagtgtggtgaaagtgctgatgcagtcctttttactggagttaaggaggtagatgacttctttgagcaagagaatgacttccttattaactattagagtaggatcaaagattcttgtgtgaaagctgacaaaatgaccagatctcataaaaatgttgccgatgactatattcacactgcagcctgcttacatagcctggctttagaagagcccacagtcatcaaaaagtatctattgaaggttgctgagctatttgaaaaacttaggaaagtagagggttgaatctcatcagatgaagatttaaagctaacagagctcctccgatactacatgctcaacatcgaagctgctaaggatctcttacacagatgcaccaaagccctcattgactatgaaaaatcaaacaaagctctggataaggcccagtttaaagagcaaagatgtcaagttggctaaggtacactaggaggagtgctgccagaaatttgaatagctttccaaatctgcaaaggaagaactgataaatttcaaacggaagaaagtggcagcatttagaaagaatctaattgaaatgtctgaactggaaataaaacatgcgaggaacagtgtctcccttttgcagagctgtattgacttgttcaagaataactgatatgccttcactctgaagaaaagaaatgaatgtgaaagaaagccaaacatcacttgcacttaaatcattaccagcggaagatttattgtcttcaactttagtttaaaattatgtgaataaatattttgatttctacaaatcttaacatttaaccatgttggtttaaaaatattgttgcttgctatttggacataactaatttttccttgtgcatttaatacctctgggcagaatctaaatactgagttctcctgtagtatgtctttagttactaagagaggatgtaggagacatatgccttctggaaacaagtagaagcaatcatctggcccatgtcctacaaacccatgaatgtcagggaggtgccagttacagcaggtgattcagcaacttgaggcaggtaacagaccttccattcctcactgaaggtggggtttgtgtttttgttttgccccctgttactcccctggtagtcatctggtgtttgtactataacaacagcaagaaaatctcatttgtctttatgtactcttggcacctcctttttttaaatcgagatataaatatttgaggggagaaaagtatctacgggtatatatggaaactgataatgtggtctactttataagatggccagatctacattaggaaaagtatgagctccttccatagtgtctgtgggaggtgatggggggagaggggacagtgtatgtctttggcgtttgtttttttataaagtatataataaaataatcatgctactaaaaaaaagaaattgaagaggacacaaaaaatggaaaaatagtccatgttcatagattggaagaagcaatattgttaagatgcccacactacccaaagcaatctacagattcaatgcaatccctataaaaataccaattatgtgcttcacagaaatagaaaaaataatcctaaaatttatgtggaatcacaaaagactcagaatagccaaagttatactgagcaaaaacaacaaaactggaggaatcacattacctgacctcaaattatactgtagatctatagtaaccaaaaaggccaagtactagcataaaaaaacagacatatagaccaatgggatagaatagagagccccaaaacaaatccacacacttacagtgaactcatttttgacaaagttgccaagaatatacattggggaaaagtcttttcaataaatggtgctaggaaagctggatatccatatgcagaataaagaaactagacccttatctttccgcatatacaaaaattcaaatcaaaatggattaaagacttgaatataaaacctcgaactatgaaactactaaaaaaaagcattggggaactctccaagacatgagactgggcagagatttcttgattaataccctacaagaacagtcaatcaaagcaaaaatggacaaatgggatcacgtcaagttaaaaatcttctacacagcaaaggaaacaacatgaagagacaacccacagaacccacagaaatgggagaaaatatttgtaaactatccgtctgataagggattaataaccagaatatataagcagctcaaactactttgtaggaaaaagacctaataatactgtttaaaaatagccaaaaatttgaatagacatttctcaaaagaagacctacaagtggccaacaggcatatgaaaaggtgctaatatcattgctcatcataggaatacaactcaaaactacaatgagatatcatctctccacagttaaaatggtttttatccaaaagtctggcaacaacaaattctggcagggatgtggagaagagggaacatttctacactgttggtggggatataaattagtacaaccactatgaagaaaagtttcgaggttcctcacagacaaaaatagtgctactgtatgatccagcaatctcattatcaggtatatattcaaaagaaaggaaatcaatatattgaagagatatctgcactcctatgcttgctctagcactgttcacaatagccaagatttggaggcaacctaagtgtccatcagcagatgtataaataaagaaaacgtggcacttatacacaatgaagtactagtcagccattaaaaaaaaaaaaaagagaatgacatcctgtcatttacaacaacatggagggaactggaagtcattatgttaagcgacataagccaggcacagaaagacaaacttcacatgttgttctcacttatttgtgagatccaaaagtgaaaacaattgaactcatggaggtagagaatagaaagatggttaccagaggctgggaaagatagtgtggttgggggtggagggctgaagaggaggggggatggttaatgagtacaaaaagaaatagaatgaataagacgtagtacttgacagcacaacatggggactatagtcaataataatttaattgtactttttaaaataactaaaataatataactggattgtttgtaacacaaaggataaatgcttgaggggatagatactcgattttccatgatgtgattataatgcattgcatgcctgtagcagaatatctcatgtaccccataaatatatacacctactaagtacccacaaaaattaaaaataaaaaaattaaattaaaaaaggtacagcattttaacccttccttggaacctaagctatgcatctgaaaggggagtttttaactgtataagtctgtctaaatgccttagtaacgtgatgaattatagtaactcagtgttttttcctccctatttgcagaatgttaaccattgctatgttttccagaaaaaccctatattagttaggatgagtaaagttagctgctataatacacaaacatcacaacctggtgtttgatagagcccagtcagatgttcctggttggcagatggttttccttatgatctttcatatgggtggatgagttccttccatcttgtggctgcatccccttctggatcttcagcattctctctcttcattcagctaaagtataaagagagcacagggaagatatacctacttcttaactctttgtccaaaaatgacatatatcacttcttactttctattagcctaaacttggtttgtggacacatctgagataaaggctgcaaaaatataatcaaactatgcctaggaggataagaaatcattttggtaaatgcacagcagcctgccacaaatttatttgaaattgataataattgttctatttaagaaaataccataaaaaccctagaagaaaacctaggcaacatcattcaggtcataggcatgggcaaagacttcatgactaaaacaccaaaagcaatggcaacaaaagccaaaattgacaaatgggatctaattaaacaaaagagcttctgcacagcaaaagaaagtaacatcagagtgaacaggcaacctacagaatgggagaaaatttttgcaatctacccatctgacaaagggctaatatccagaatctacaaagaatttaaacaaacttacaagggaaaaaaaaacatcaaaaagtgggcaaaggatatgaatagacactctcaaaagaagacatttatgcagccaacagacacatgaagaaatgctcatcatcactggccatcagaggaatgcaaatcaaaaccacaatgagatatcatcttgcaccagttagaatggtgatcattaaaaagtcaggaaacaacagatgctggagaggatgtggagaaataggaacgcttttacactgttcatgggagtgtaaaccatttcaaccattgtagaagacagtgtggcaattcctcaaggatctagaactggaaataccatttgacccagcaatcccattactgggtatgtacccaaaggattataaatcatgctactgtaaagacacatgcacacatgtttattgcggcactattcacaatagcaaagacttggaaccaacccaaatgatagactggattaagaaaatgtggcacatatacaccatggcatactatgcagccataaaaaaggatgagttcatgtcctttacaaggacatggatgaagctggaaaccatcattctcagcaaactgtcacaaggacagaaaaccaaacaccgcatgttctcactcgtaagtgggtattgaacagtgagaacacttggacacagagcagggaacatcacaccccaaggcatgtcgtggggtggggggcagggagagggatagcgttaggagaaatacctaatgtaaatgacgagttaatgggtgcagcaaaccaacatggcacatgtatacatatgtaacaaatctgcacgttgtgcacatataccctagaacttaaagtataataataataataataataataataataaaagaaaataatagggtgtggcctgaagaacattcagccctgtcccttttgtgtctgtgatgggccttatgagacacccttctcaacggtctgtgattctgaaccaagagtgtcctggtatctgaacactaacctgcctgaacactacccctgatcctacctttacttagagagtggaatcctcagattttcctaatatgtcgactaacgttgtgagaagattgctatttgggattggcattattaacacctcagatgaactttatttgtgggtatgtttttatttttatttttatttgtgggtagattttatttgtggataggtaggtacatggtggaggtgaaggtagaaaatggagcagaaaaagcatgcaaaactctgtcttgtaaatacaattaatcgagtgtcagatgttgtggcttgagagtgtccttttctaagatctgtgagggaaatggtagacaggttgtttcatcttcatgccttcaatgcaatgtcttagtgaccaggtgacttcatctccattaaggtaaaatgcctatgttcattaagataaggttagatcgctgtagcacaaaggcagtggctttgaaaaacacagaaattaatttctatcacatgtataagtatgaagtgagcattccaggctggcagacagctccactccacatggtcactcagggactcatgttcctacaaaagagctgtttcccataaccccagagcctgtcatcactttcacggtctcactgggtcacctgggttctacccgtccagaaggggaaagtggatacggaaaaagcaccccgcaatgttttaagaagtcaacaggcaagtactacacatcatatcacctgtgctcatatttcactgctgagaactatcctttggtcacatctaatgcaagggtatctggaaaatacaatatatgtaggcaaccatattctcagcaacaatcattttattgtggaggaaagcaagaaagaatcttagaggacagtcagtagtctctgccacagggtccatacaaccaaataatgagagtgatagttagaacagaatcacacttttattgcaagacaaaagagaagcataataagcttcaaacgttgatactattattaagttatttaataggccctggtgtgtaaagcattcagaaagtgtagctgcatattcttcaaattcatatcttaatttcttataagcatatgaaaatatttagaaaattaagaatagttttccacatttgctttcattctcaggacagcatttcatttatgcatttatggagcctctctgcgtgccagttgctgtgctagactctgaaggtataaagacaactaagatacagctctgctctcaagaagtccacaaactagtcatagatatgatctgggtttgggtttttattggttttgtttttacagtgctgaatggtgtgattagcgctgacctagagttgtgtgcacaactcagcatgggtgcacagggatgattcagggggcgtagttacagaacacacggggctaaacctgaaagtgagggtaggagttgaccagatggacccaaatagggaaaaacattactcgctaaggaaatggtgtgggcaaactgagaaagtataaaacagctcatgtgtgaaagtgttagtgagttagcctggagtctgaagtgcaagtcagggcagagcgagttgggcttatgagctttgcatcgtgagctgctaacagattttattctataggtgatgtggctccactgattcccaagacacctggttggatctggatttagagaaatcattagcaatgtaaaatgatagattggaatctaaggagttcaaaatgccagcagtaaggctaaacatgctgatgctttagctgagaaaattcttgtggaaagagttccatgtgccaaaagaaaaaaaaaaaaaacacttgacaaaactcttaggaatttcgtcttttgagaacaaagtcataaaagaaatacactttttaatcaaacttatcatagtgccaggtagtataagagaaatatatatatatacacacacacacatacacatatatctttatataaaacataaagatacatatatctttatataaaacaaatatatatatctttatatatatatatataacaaaaatatgtatagcataaaccacctttgaaggagacaagaaagtgtgagctcatgacataagacagtgtataactaggcacactgaaagtgcaggggctcccaaggctgtgagtattcagaggagggagtttaaaccatggcataatgagggattggaactttgccttgaaaagagacaacctgtcttggtttgactacgtttcataggtacaaatagaggcagattcttcttcctcaaatgaatgggcatttcacccaaacataccgacaagggaatggcagttgcacaagcagctaatttcttcttctcttcctattgagtactataatggaagaaaggagaggattattagccaaaaaagggaatattatagtgtgaatatttatgttcccccaaattcatatgttgaaatcctattctttaaggtgaaggtattagtaaggggggcctctggaaagtgattagggcatgagagcaaagccatcatggttggattattgtacttataaaagagaccccagagagctaactacctctcccaccatgtaagggcacagctggcaggtgccatctaagaaccagaaagcaaccctcaccagacaccaaatctgctggtgccttgatcttatatttcccagtctccagaccagtaagaaataaatttctattgtttagaagctacccagtttatggtattttgttacagcagcctgaacagactaacacagggaattaatggttagaatctctgtttcctccaggcaggattcagcaggaatactgaagaagggtgatggaataattgtgacagccactggctcatcttagaagtcagttccctcagatgagaaccatagagggttggtagggcgtagtgagagcagcagctgccagtaagacagactggatgtgaatcctatggcctgaggctgtcccagaatggtcccccatcaagtgtctttatgctcatggaggtacctttgtgatttttatggaaaatagccacatattcaggggctgggccacttgtctcttcaagaacagggagaccctagagaccaaggagggaaagtctttataaagtggcatttgcttgaggggctagaggacctgataaaggaaatatcccagggactctgtgcaaagacagtttggtgaggcagagggcaagcgtgcagcaaagagttaacacagcaggcctgctttagaaaggcctgcttgcaagggtggcccttggctggtgtctgggaacttggctttcaagacagtttccaccaccctgactgctaagggtaactcgtgatgcataaactacatgtgccaacaatacaatttatgctttctccctgaaactctggaattttagtacatgctaagcagctggtgcctatgtgaccagcccccaataaaaaccctgggcactgagtttctaacgagcttgcctgtcaaacagcatttcacatgtgttgtcacagctcattggggaggaattaagtacatcctgtgtgacttcactgggagacgacttggaagcttgtcctgtttcctccctactttgctccatgcaccttttccctttgcagattttgctttatagtgtttcactgtaataaatcttagccatcagtacaactgtattctgtgtcctgtgaatcttcctagtaaatcaaacctggggatggtcttggggattcctgagacagcaagactcactggaaggactccagtagaaaacagctgctcagcattgacacagataagcacatatatttgttttaatttctatcttccagaataagacatttgattattttaggtgtatcttccttaacaactgtaactactcagaatctttcagattttaggaaggcactgaatataccatatattattaaatgccccaggaggcctggggaatacatactaatgtactcaaatacattagtatggctgcttttaatacatgaaaagtctcactaagaagaataaatagaggttatatgtagcctcacatcagtccaggtcagggctcaccaccagatgagtttctgccaaacttaggggaaaaacacttaaaatttttagagcattttgaattttcgcattgcagataagggattgtggacctgtattaccctccttcttttgcttatccggaaattaaggcttagaaaagttaattgatttgccaacagtagcacagcttgtatctgatctggatttcaaatttaggactgtctaggctacatgcccgagaactcttatctatcactctagactgtctttctagctacttattttaagaatatgtcttcagtgtctgcatactactaaggaggaagtaatgtgtgaacaagggagaatagaaaagaagaaagtaattatatttttttgacatggccatttacataatttactttccttcatgaaatggattcctaatatatatttattgttaccttctgtaagtctaactgcatgacaaggcccaaaagagaaatatccacccattctctctcctagggtatgtctgttatatccttatagtcattctcagagtgtgagtgagagagtgtgtgtgtgtctgtatgcatgtgtgtgtgtgtgtgtgtgcccctgtatttgcattttgccttccaaggcagcaggagtgtgtcttattttctctctgtttctcttttattgcataatgctcaataattcatttaagttgatatgctttcattaaattgagtagaaaattaccttggctgaatgaagataactcccagatttctctgcatggggaggccagccacctcgcacttactggagaaagttcttaatagacttacccacttttaccctcattgtggcaacaaagaaatggtttggagaaaagagaaacaacaggactccttccagtaaaacaggaaaatatattttacataggtatttgctgtgaggaggatttgaagggacaggaaatcactatcaaatacatgtgaactgccaagtttcattttgacttttctgctcctacctgcctctcactttaaaaaataagtgcttgcttacccatgtttaggcaatagaaaaaataaaataaaaaaaaataaatgctgtatcaattagatagatgtcggtaacccagttttctgaatcctgacatcccagaatgtaagaatttgtcattctaataagtctgttctgcctcaacttgtaaatcagcttaattcaattctaagtgaaatctctcgtttttcattatgtctgacacaagcttagtaattctcagaaaatagtccttgtgaaatgaagctcagctggaaattctgatattcgatgatgcttacactaacaactgtcattcttggcaatggcttcattattcagtgacacagttaagagccttgttttacttttattcaaaaatgtctttgtctttctctgcttgttccagcaacagttttcctggagttttggaaaagacggcgagcagtaattgcttatgactgggatttgatagactgggaagaagaggaggtttgtatcatttacctcagaatgttgtaaaaagcaaatcacccagaaccacacgacccccccccaaaattgtcactctctgttctgtgacggaagtcaggtgtactcataaagcattttcaattgccttttcagaaaatttcaagcagtataaaaatggactgacaatttttgtaaatttttgattccttagtggaatcaaatcccttgattaagtggagaattccacttgtaggtagaggcaccagaagaattggtggtgtagctttttttttccattttcttaaaaatcatccttttttctctaacttcagcagaaaaagagcattcatttgacatctccaggtacatggaagcaatccttccaagagaattacccaaaggcagtgtgtctgtgagcagcacccaggaccgtgcccaggtgtgcacaggctctgaagtatgacatcaagtgttccgtgctggggacaatccactctgaagcggccaccttgggagacgtggttaaatggagggccagctctagacaaaactgccaaggagggccagactcagcccaccactgtcccttagcgtcttctaggccagtccgttgttctcctcctgacctgtcttgttctaatagtctcttcttgcccctattcctgtcggaagtctgaagtacccacactaggcgtggtcaccacggtcccctcttggaccctgcttcccttgacagttggtccaggcctcagccccactctcctccctctcgttcattatctcttacccctcctgagtctcatttcctcagagccttgctgtgccagtaaatcagataaaccactcatatgtgtaatagttttttgatcatggctattaatatgtgttttccttgaagggaacacatgtatatattttcatgtataaaaaagaatctttcagaaatatgaacgatgtgaattttagccctgtggtaggcttggtgggggaagtaattctgagaggtatttttgttgttgttgtttgtttccttcacactatgcctcctcaatggctgcctgttccccttctcccatgaacatgtttgggtagttttttggtttggtttggtttggttttgaatgtacttcaggtgtacaacaggaggttttgatacatgacactgagattttcagcaatccttgttctcctgataaggctttctttcatgtttttataaatattctccaggccaggtgcggttgctcacacctgtaatcccagcactttgggaggccaaggaaggggtaccacttcaggccaggaggaggatttgaggatagcttatagatggccatcttctccctgtgtcttcaggccaggagttcgagaccagcctggccaatatggtgaaaccccatcactactaaaaacacaaaaattagctgggtgtggtggcatgcagctgtgatcccagctacttgggaggctgaggcacaagaattgcttgaacccagaaggtggaggttgcagtgagccaagattgcaccactgcactccagcctgagtgacagagtgagaccctgtctcaaataaataatgtgtatatatattttttctaggttctagatatatatatatatatattatatatatatatatatacatacacatatacatatatataaatagattttcttcaagtggccaattttcaaacatatatatatatgtgtatatatatctagaacctagaaaaaaaatatacatatatatatgtatgtgagtgtgtgtatgtgtgtgtgtgtgtgtatacatatatattctaggtttgaagaagcttcccaggctgactatgacatctattggtagcagccggactgcattcagaaattcctcttgtgtggtgccattctgctgtttctggttatatgtgttcatgggaacagttcccagtgggatggaaaatattctttcctgggaatcaccttgggcaatttacttcacctttggactttaaaaatctctaatgaaaagaagtgggactaaattttccccttctatctgtaaagtgtggccctatttgagtaactttgactaaaccagtctacaatcattgttggcgtttgtggtgggcccctgatgtgggcacccttctggggaacgtatgtatcccttataagtgtggagccttctgtcttcccagcccctgataaaaagcgtggagtgctgaattgtcctctcactctgcatacctttgtacaggagcctacatacgtagccattcccagcttgggattccttgtggaaatgcctcacttctagcccatgatttctaccttattgtgcagaaaaacccagactcgctgcagaccttctggggcaacctcgcacattagtttgtcagggctgccataacaaagtaccacagactgggtggcttcaacaatagaaacttacatgctcacagttctggaggctagaagtccaagccaaggtgtcagcagggttggttctttctgagaaccatcagggaaggatctgttctaggcatcttttcttggcttatagatggccatcttctccctgtgtcttcacatcgtcttccccctgggtgtctctgtgtccaaatttcctcttcttataaagacaccagtcatattggagtagggtccaccctaatgacctcatttgaacttaattaccactataaaaaaaacctgtttccacatatggtcacattcagtactgcgggttaggacttcagcagatgaatttgggggaagcaagacacaatttggcctataacacccagcgatatggtttggctgtgtccccacccaaatctcatctttagttgtagctcccataatccccatgtgttgggggttggacctggtgggaggtaattgaatcatgggggtgggtttttcctgtgctgttctcatgatagtgaataagtctcttgagatctgatggttttataaaggggacatcccctgcacatggtctctcttgcctgccaccatgtaagatgtgtctttgctcctccttcaccttccaccatgactgtgaggcctccccagccatgtggaactgtccattaaccctctttttctttataacttacccattcttgggtatttcttcatagcagtatgaaaatggacagatacatccaggaacacagacctgtctccatgattggccttagttctcggatgactagctcaagggctcttgatgacacttatggcccaataaattgaaagtttcccaaagaagcagaagattctaggtctgctatgtttatctcctcaagtataactgcctaaaataaatgaaagacagagcctgctcctaatgtatctcctgctgatcttacccatgacctacccctgagggaagtccagccttgggctaattcagtggcaggagccaggctgagccatgtgaaggccatccttcatgctacatgggcaggctgctgccaaactgggctctctctccatgacctctcttctgtcagctcgttccttgctttctgccagtaccttcatccgaatcttgaccatttctgcctggattaactcaatctccatttcagcagagtttctgctcatttgccatcctctcccaacactctcaaacataatgcatgcttaattaacgggaaccacatcaggttcccttgctgattgccttttcctaatctcataattggtttttagtcagaagcttttcacattcaggaggctcagctaaatgaaataaaatctcagtttgatttagaattggaggaaccttgattttaactggttttgaaaggtgcttaccttgttttcaattaagaattaagaatatacctaaagtctattggttaaagatgaatgactcctataggaacttattaaaaagtagattcaccatgtttttagtgaactaaacctaaaaatgcaaaaaaaaattgctggagaaaactaagaattatattgtcattataacttacaaaatggattttgaacattttcctgtagagaagccttctttgtcctggtgtttcttatcactctctggtaataaaagtaaaagcttattagttgttccaaaccattaggacaggacagcttgtcccttttaaaataccattctcagggtggttttttcttcaaggttagttttataagataacagataaatgtaactgttagtccaaatttctttgcttttgatgatagtaaatcttgatcttcactctttagattttcttcaagtggccaattttcaaacatttaagcctgggcacccaaacccacttcattggttgactaattagtgtggcagctgttgactctgttttatggtggggtaaaatgatatttctttttttattgtgtgagcacctctttagtgcattaaaatgtgtctgcttgtcctttaggaagaaatacgaccccagtttgaagccaagtattccaagaaagagcggatgaatccaatttctggaaagccagaaccttatcaagcatttacagataaatgcagcagacttatcgtttctgcatctggaatattttttatggtttgaaacttttaaaaaaatatttgtttcataaaatacaaacctatagcataataacagtaatcatattgggcatttgcattgttctacaaaatatttttgcactttgttatttattcctcacagtaacttcgtctggtggtcagggatggtattgctatccccatattacagatagaacaactgagactccaacaggttatggggcttgcccgaggtcagccagtaggtagctaagagctgagaccctctaatctgatattctttcctcttgccatattctactgtgtgatgctgaaaggagtcaaaaatgtgagacaggatgtacagtagtgtttttcaaacttttcaccatgcccatacagtaagaaatatattctctgtcataaccccgaatatgccaagcaagtagatgtataaaacagtgtaagtaaaacagtgctcacctttataatatgcataagctctgattttgttttattatagtatatttttaatgacagattagcctcctaaaattaatttcctgactcactaatgatcatgtcagtttgaaaaacagacctcagtttttagcttttcctaaaaagcagtcttagtaattaactttaacactgttaattactgaacaaaacatatgcagatgtttctgaaatgtcattttagaacagtaaaggatgattaggatcctcctttccttttttcaaatgatgagtatataaatatatgcctagaccattagagtaggaaggacaagactatagcaaattcagacaggctactccctttttccagtgaagaaactggggagatgaagggctgggcagcttacccagactccttggctcagaccaagattcaaatccatgcctgtctacagatactgcttttaagcaactgtgtcatgctttgccttctatgtacatattcatatttattgtattgtttcttacaaagacccatagacatagattaagcttttcctgttctatggatggggaacttggaacacaggaggctggagctatggaaaggacaagcttgcccaaggtcacactgctgggtgatagctgagctagggctctaatctctcttctgactttgaatccagccagctgtccatcctacctcattgccatccttgtctgaatttcagcatagattttacctgtctcctgatcaacagcactacaattaagatctggacaggtttttgtttattttattgttattttggccagtctgagctaggacttgtacttgagcttttagaacatatctcccttaaaagtaagcagaaaataaattatgtgcaaaacaggaatacttttgtgaagaaaggaatctctaaatcagcagaggccttcctgaggcctggcttcaaggtctagcctttgataattaagtgggttaaggtctctaagacatgttaatattaggtaatcatctaatgaaagtcacaaaactttttggagtctcagatttgcattaaagtcagccctatgtgtctgtgggttctgcatttatgaattcaaccagccacagatggaaattttttttaaaaaaaggttagttgtagctgtactgaacatgtacagctacatgtcattatttcctaaacaatacagtataactatttacataacatttacattgtatcaggtattataagtaatctagagatgatttaaagtatataggaggttgtgtacaggttatatgcaaatactacactattttatagaatggacttgagcatctgtggattttggtatcatggtgttggggggtggttctgggccaatccgtcatgaggatactgagggacaactgcatttcatagagaaagaagatatgctgtattgttctcaaatgccatgaaatcttcagggaaacatgcttcagtctgtgtgaatatcagattaacaagatatgtacctatcacgtagttggttcactcaacagcaaataactgagcacttactatgcatctgtaattatgctaaggtgctgtagaaaccatgtgagcaaaaaagactccttccctgtccttatggagcttactttctagtaggggagcctgagaatagtcaaacagattgttagaaattataagtagtgtcctgaaaaagatgtaaccatatggtatggctaccacatgacaacacgaaaaacaaatagtctgggagtcatgaagaacttttattatgaagtggtgtttgagctgagaagtgaggaaggatgagtaggtgttaactaggctgtgtgtgtgtgtgtgtgtgtgtgtgtgtgtgtgtgtgtgtgtgttcggcaagagattgggtgggtaggtattacaggcaaaggaaatagtcttggcaattaagggtgcttagcccgtttgatgtaatgagagaagctgtggggaccccagagggaaggaagaatggtgcccaaaggggctagagagagggtcttgcaggctgcgtaagggttttgcttttatcctagaataataggaaactaataaacaattttaaaccgaagagtgacatgataggatttccatatgaatatttgtccatctgctcaatgtatattctgcattaaaaagtgttgtcccatagcttacacagattctcaactttcaagcgtgtagttcttttattttaattaaaaaaaatagaaaaaggcaagagaaagtattaaccacaatgaaaagtatgcatttgattgtgatctcttgagcagtactgccatggtgttacttccttttcccatcagaggatgttccaggaatgtgaatcctcttcctgtaacattccaccaagaggttcaccgggtgtcttgtcttcctgccagatctgcgtggtgattgctgccgtgttcgggatcgtcatttaccgggtggtgactgtcagcactttcgctgcctttaagtgggcgttaatcaggaataactctcaggttgcaaccacagggactgctgtgtgcatcaacttctgtatcattatgt

SEQ ID NO: 15412 - DNA, 302599 bp, Homo sapiens
atggcctccctcaccgcatacggtaactggggccgtcgcgggttcctggggcggcggggcggaagggaggggcccagggagccgtcgaaacacccggggaaacttcggggttcgcctctgcggaggggtctggaagggagggagacggcggccgtgcgcgccgctcctgaggggccgatgttccgcggggtttcgggccgcgggtaacccgggaaccgggtgtctgcgggaaaaacgcttcaaaatttgggaggatctgggagcttcgggactctagaaacattcccctcgcttccgaccactcaggggaagggacgcgggtgttaagtcctcctctagcggggtgaggcttggagttgggagatgtgcgttcagccagcgcttatcttgtccctgactgaccttgggcaagttatttaaacttttcagcctctgcatttctccgtctgtaaatcagagagatgagaacatctctctgacagatgctgtggagttaaaataatatgcactgtaacatgtttttaatgcaaaaaaagaaatcagtttggaaataaaagtttatgaaaaaggaaggcattcatcgttcccctgcccattgttttgttaaataaatatatatgaatagacatatacatatatacatgtgtggtattgcatggttctgaaggaaaacaaaatcactgtgtgaaggtttcaggctcagctagaaatcctagcgcgctggggaagccagcaaggcttcttatcaacgttcttgcttgtgtggataaagcaattctctttagccctttatcagaaatactgctgagacttggttataggaagcagaaactcaagtagacctccctcccttcctcttgcttgcagtcagttgttgcgataagatctagatttggcattttaaaggggaaagctgtgagcaattgatggggaatgttctgcagggacatctcaaagcctgggatgggtgggacggaaattactattctttggtgtggaatcttcattctctaggccagtgatgtcccctgctcattttaccaaggttaacagggtcagtctctttctctggatttaaattgtttaaaatgatcatttaggtggctcagagggtttgcaattgatgcctgggaaccagtaacaaattgtgagcagattacaaatttcagtctggtggcctgttttttctttcctccaacccccttcccccgtgctcagaacatttttgctgggatttaagttgttcttacctgcacgcacatttaacactcaacattgtggttcctgggttaccatctggggataattcaatatgctgatggcattttaggcatattcattggcaaaacatctatttttacaccttttcctatcagagggatctaacttctgtttttttacatcattttagattttgtatgctgccccatggatactgtcagtaataggtttacgtaatgatcagttctgtacgtttctagaagctttaaaagcttaattgagcacccaggtggagaaaatgaagtcagaataagtgaaatcattttgaaaagaagtatatttcagtaattaaaggaaaaaggtggcagatctttgtttttggtgattaagaattacacaggtttctcattagacccttaaagagaactgaagcatatttcaataaaaatatcaattagaatttctgcttgacacattctcctcctgcatccatccctaaaatgatgcatatacttggccacaaattccacgttaattcttagatctgtagcagtgtgagctaaaccatgacagaataaattagtccatcagggttttcaacctagtgaacaagttaaggagaaaaacattgagcacatttaatacattcttcacccactggatactattgagatcattatctgatgagagcttggtccagccctggaaccctccgcaaatcttctctttgacaattgaattccttgtaaaaaatgtcccctgtcaattctgttggatttgggtttaggcatcatgatgggggatgatctaaactttttgcctggaatttatagggttcaatttttgtgtttaattgactgatttaataaatgctttattcttatctttagcacaggggctgccaagagaatgaacagttacactgtagaccatgtgttttaggttcacaagatgagagagaaatttggcttatgtaggcatttcattagcagcagcctctagtaatcctcattagcttcccttctaatatgcatttctgatcccgttctttctgcattttgatcctgctctttttgtcttttgagcttgctctttccgcattttagtatgaatttttactttcaggccaccatctagactcacattctagaaatgagaaatgagattagggtaatcagtaactgtaatccccaccggtaaaaatatgttcaatgaatgatgttatttttagaattctgggtttttaaggcctcaaccctttatactcaccactgacatttattttcttgtcctttaaatggtttaggttcttaaccactttaactcattaaataaccatgcgcatgagactaaggatgggagacaagtattttttagagagaaatgactgggactttaattgttcttggccatgcaaaggaaggcacagaggctgtgtccccacctgaaccaggaagggcgttgtggttagactcacagacctggcctggacctgtcagccgtgatgaggcttaataaggagctgaaagagctgatagagcacagtgatggctgtttcatatagggaagccctctctgaggagaaacttaagcagagaactaaatgaagaaaaggaatgaggcattccattacatggggaaagaggattcttggcaatgtgaacagtaagtgcaaaggccctgagtcaggaatgagcttgtcatgttcaaggctagctagaaggtcattgtggctagagcagagagagcaagcagaagacaggaagacagtgcagtctgagccggtgttgttatataactcctctcccctcattttcctcctacctcttgattttttgtgtgtggactccttctgctaatgctgatgtttgcctgggttctctcaaacttttaaataatttgactctcaaccatttggatgacattggttagatacctcccagatgctaaacaatgaccccatgtgcagagtcagtctcgtagtgggagacctgtaaactggagcaagaaagttttcagagttgtaagtagaagtgtggggtgtgcctgggcatgaagataataataatggcactttatgtgaattagctcagttaatcttcacagcaacttttaagacattgatccaaagtcagccctatattcatttgaagaagttgaggcacagataggttaaggaacttatttagggagtgtaatgagagctaagcctaactgtggaatgtgggaatcaaatggggtgagaagacatgagagcctaggacatcatttcccctcccatgacttcatctttattcaggtgactcccacatagaaatcaccagttagaacttctttcttgcatgtgctatgcttgtatagttagctgccagactatctgtatgctcttctctctttgtgttagcatcacaaactcaatgtgtccaaaacaacccccatcttcctctcctgtccctgttttctatagagtatctccaactactgagctctaactatgttccaggctctagccttaacccagggttactagaacgaataagatctcccgctgtttctgtgacagatggcagagtcagctggaggagacagactcctaaatggagaattataatgcagtgttgtagggaagggctgggtagggtaagggatgggccaaaacagtttcctggaggaggagattgggagaaggccaactgggagaaggaggtcattccagggagcaacagcaacatgaatgaagatgaaggggagaaatgtcaggggtgtgaaggcagccactagtagcatggtgctggtaggtggaacatgacatctgaaacagagtggctagaggttgaaaggggccagcatgctctacccagtcaccctggaatcctggaagtcattgtggagtcctcccttaccagcacatactaacagtgaccttgagtaaatttttgtttgtttgtttgagacaatgtctcactctgttgcccaggctggattgcagtggcatgatcctggctcattgcagcctctacctccctggctcaagcagtcttccttcatcagcctccatagtagctgtgaccacaggtgtgggtcaccatgccaggctaacttttaatttttttttttttttttttaagtagaggcagggtcttgatatgtttcctaggctggtctttcctaggtgatcctcctgccttggcctctcaaatccctgctggaattacaggtgtgagccaccacgcctggcctgaccttgagcaaattaattcaccttctgtgtctcagttttctcatctgtaaaatgaggtcactaagaagttaaaatgcaatagtactgtcaagtgcgcaggagcagtatgtagtgctcagtaagcattaggtattattatcaactcctgctcctagccagtatactctcaatcaccaagtcctgttggtcctttttccttaacatctttcaactttgctttctccttgccctgccctctgttcttatgctagtccaggccaccatcattgcccactttggctgcaacagtggcctcccaactggttcctctgcttctagtcctggcttctttgaattacacttgcaaatctgatcctgttgttccttgtttaaaattctccagtggctcttctctgtgtagggctaaaaattgaacttcctgcccttctctcttgttgcctttgaccctagcatcccaccctctgggcgggaggttgtttgaggccttctcaggtttctggaccttgatgcatgctctgaacgactccctccttctttacaaggccccctctcttttccccttgacattctctgtctgacttggtgcttcctctgggacttcttagggtaagccctttccatagcaggttctaattttgtactgcggtgagtaatcccctctgtgggttgtaaaactcagatgacaaggaccagctattttatctttgtgttccttgtgcctcgcacagtgcctggcacatagtaggtgaccagtacttgggtgtgtgactgagggagtgaatggagtatagtagggggcagtacaccatgtggaagttttaaaaactcctttttcctattgcaaataataagcataataacttttacccttcagaaaagacaaacaagcaaaagaataaaagcatccagactacatggtgagatcaggtacatgctagctggctgggacttatgctttacctactagataaatccaaggagctctttaatgacttctcttgttttttccctacaccacctgacatgcttgttattatgcaagcaagacactcatggtcaacatcgattaggatccttttgattaagaagctgcagcaaagcatgtacagattattttttgaccttcagcccttcatattttgtaaatttctttgtggggtaaaattaaattaaaaaatttttttgattctgagaagcagcattttaattctttcctttaaaacgttatgtttttttgtaacagtgtcatagtctgctctgggctgctatataacaaaatgccaaagtctgggtggcttaaacaacagacatttatttctcatagttctggaggctggaagtccctgttggaggtggtggcagatttaatgtatggtgagggcctgtttcctggcttgtagatagtcatcttcttgctggatgctcacgtggcctttccttggtgtgtgctcagggacagagtgggatctctgtctcttataagggaactaatcccatcaccgggggcccatcctcatgaacaagaagatagaagagatagagattacccagctaggaggaaagaataggtcttgaatattaacttttttcgtaaacctataaaatacacgggaaacgtggactaaatcaacacattgatatttctgaggaacacactcatgtatacatgtacatacacaagtttacacaagtaaactacatttttttcttactagtcagttctctagaaccttttataaacaatttagagtgcttttaaaaatctaaaatctaaacccaattatgtcccaaatgccccatccccaaatactatcacactgggggttagtgagggccttaacatatgaattttgggaggacacattcagctcacaataagtaacaatgtggatttttctactagaatgtagtcctagacacacagtccacagctcccaaggaagtttctagaacaaacaatttaaaataggctttgtgagtgcttactgtgtgtcaggcactgttgtaggttcaggaagcaaaacaaaaacaaacaaaaaacaaaaaaacaaaaaaaccttgcctgtttcatggatcttatgatgtaataataaggcatgaatctttacctcctgaagataatgaaaacagaatataagattttcaacagtgaatcaagtaggtgtaagtaggaaaggaaaggcttttctctaattagggttcatgaaagggcttttgtcacagtgcctgctgctagaagtggaatcaaagggacgccgggataatgagcaccagacacagtatttaaaatgcaggaaaggtgattcaagtatttgaaagcttacgggaggctttggcaaacatttcttgtgccttctatgcattaggctgagacagggtttgaggatgcaagatgagtaaaagatggctttgccctctgggagtctgggtctcactcaggtctgatgcaggttgcagaggagaatactactagaactattactacttcaactagtatctctcctgcctgtcttctagtgaagtggcacataataaatgaaaaaacgttatgaaaacagcaatactgtctttgttttatgatagtaacaaagagatctgtttgcataggaaaagctcttcccagtggaaacacactttatatcctctgattgatttttcagcaccttagggagagacctcccaagccaccactttctacctaggaccagcctgtgtctactatatgttttttgaatggatgaatttcagtcacaacaaaaagaaagtccaggcccagggaggttaggtgaggagatagagattacccagctaggaggaaagaataggtcttgaatattaacttacacagcaaacatggactaaatcaacacattgatatttctgaggaatacccacatgtatacatgtacatacacaagtgaactacatttttttcttactagtcggttctttagaaccttttataaacaatttagattgctttttaaaaaatcagatgcagtaagtagttataactcactctatacaataaacatatattttgtaaattaaatggtatttctagtgcgccagtgtaggtagttattaaaggaatcagatggtgaatatttttgcaaagtcagtagttatgcatcattcttctgtttggtaagttcttggctttcatctgtccctgtatataagcaggcttgtaatatgttttgaaaggtttaatgaaaaccttttctttgtaaaatttctccttactttcttgtgagtgagatgtttgtttgctcagcctttgtggattgtggattccaggagaaggctttacctcagcttctagtccctgtgtctttgtcagggaaattggtatctttttttttttttttttttttgagacggagtctcactctgtcacccaggctggagtgcagtggcgcgatctctgctcactgcaagctccgccttccgggttcacgccattctcctgcctcagcctcccgagtagctgggactacaggcgcccaccaccacgcccggctaattttttgtatttttggtagagacggggtttcaccatgttagccaggatggtctcaatctcctgaccttgtgatccacccgcctcggcctcccaaagtgctgggattataggcatgagccaccacacccggccggaaattgctatcttaactgtcaacctggcctatgcctaaaataaggactttggagcttcatagtttataaacaataatcaagcaattataagaattagtgaaatttccccaaatcagagtgaaacggatgacatgaagatgaataacttaaaacaattgcttcagtaaatgctacttacttcttgggctagactcatgtcaggatatcagttctggttctcccactttctagttgtgtgatgaagagcaaatgacttaaccctccaggtgccattacctcaatagaaaagaaagggaaggagcccatcattcttgtatttctagcaatctgagcggtcacccctcagaacccagcctgggtttggctgccagtctaacttgccatttacctcgtgatgtgaaagccactcagcatttcctattatgattgtcaggtaattctctcaagtaatgtcctctcacctgaaattacttggagatggacttctcctcatggtagttacgtgatgtgttcattttgtgataattttcactgagttgtgcacttgggatttgggcattttattgtatctgtgttaaacttcagtaaaaaaaaaagtcctttctttttatttttaaggcccttctgccttggggcaggtctttcttaaaaagaagctctttgaatcacacgatgcatgccatttctcttctcagcctcagtctatgaatattctgaactaatctatttcttgtgtttctcccttcctgattacacttgtaattctcccattcctagcgcagggcagatcatacaggtccttaaaaagtctttggttgattcctaaggccttgagagttttgcttatgggccttaaagttaagctgtagatcagtgctgctcagtttaatgagactgcaaatcatttggatatcttgtgaaaatgaaaatactgatttagtagcttcgggggagcctggaattctgcatttctaatggactctcaggtggtgcagctgctgctgttcaagagactgcactcggaggagcagggtggtagagaacagtagttggtgcttatatagtgaatgctaccatgacttatgcatgtgaactgtataaagtggccctggttaaaggaactagacttggaattctgttcttttaatttagacatttttggttgtgttttgcttgatagaaatatgcttatattctctgttttgtttggccagtagtgcaacattaaaaaaactttgaaaaaaattggtaatttatacacacacacacacacagaaaagtgcagataataatatttaatagttgccccgggaccccccccgcccattccctaaaaaggacttctactctgatttttatcatcacagattagggttgaaaaacatggcctgtaatgatattgatttattttttaattgttgagatttgctttatggtctaaagtatggtcaagttttataatacttcaccatgggcttaagaagaatatatattccctgactgtcagatgaagcattcagtaactgtccattaaattgagattaattgtactgttcaaattttcagtgtttttactaaaatttttcttgcccaagcaatcagttattaagtatgttaaaatcattcttctcatggtaggtttgtctgttattccctgtagttctgttaatttttgcttcataggtttcagattattttattctggccatatagatttaacatttgtttataccttcttggataattgaaccctgaacctttcatcattattactcaccacctttatccttaataatgctttttgtcttaaagcctttttcctaaaagtaatataggtaccctggctttattttggttagtatctgcttgctgcatctttataaatattttactttcaacatttgtgtccttaggttttagatgtttctcttacaaacagcatttagttttttttggttgttgtttttagaaatccatctcatagtctcttaaatagcaaatttagaccattaacatgtattgttattactactatatttgaacttatttttaaccattttactttgttctttctctgtatttttcctatgactttccccctcatttatttcctttatcaaagttgaacttttttgttatattccttctcccactgttcctcaccaccctaccccatccttacccctttgaacacaactaactggtttggaaatgtagtctatttctgctgttttaataattgcccttgtacttttacttcaatcttacttaacaaattctacacctattcattatattttgtttaactaactctaaatttaatatgttaacctctcctccaaacaatactttgagcacccagctcctggcttgtattctattattatttagtattttacttttattctttttttaaaccctcctatattagacattaaaattattattttatattgacagtagagttgcccacatatttacaagaattccacattcagtggaaagacataaataggcactgtgttttctttttcgtggcggttaggatgaaaggtaagatagtttaattgttgagatgggctttattttcttttgttataagattgtgttgtttatgaacacgcccccaaataatttgagataaataaaatgtgtgtagttttgtccacactttttcgctaagcagtcctctgaaaacagtagatcttgttctgtatggagcctcaatgcttagcacatcagataactgactgtcaaagatgtaacaccagatacaggaggaacctgcctaacccaacttgtgatattaatctgtcctcctgtctttgcctctgctctcaattgcttttctagtgtaagacaaacctggattctgattccagctttgtgacttcctgtgagtgtgactctgggcaagttctttaattttttgagcccctaattcctcatctgcataatagagttataccttaaaagagttgttttgaagcttaaataatgggtataagtgaaataataaatgttcagcatagtgcctgacaaagagtgagtgctcagtaactgatggtgtctaattccaccaccttttctttttcctaggtacttttacagaatttgtattctaggtttgccctgccataatttccgcacttctctatttctttaaaaaagttatagtgaactataatatacatgtagacaagtgaggaagaaaaatgtgtaatgtaatatataattataaaatgaatgccatgtagccaccacctcggttaagaaacagaacacttccagcatccccgaacccacccctgccccatactctttcataacgcaaactcacttcttccccgtcagtggaaccaccacgctgacttttgtgctaattattttgttgcttttctttatagttttaccatccattatgcagtaataaacaatataattcagttgtgtttgttgttgaaatttttataagtggattcacagatattattttcagtttgctcctttcattccatattttgcttgtgagactcattcataatattttgtgtagcttcactttaattttctttgctatgtgggattccatcttatggatatcctgtttcttataagtatgaaataaaaatatagctggaggttgcagtgagctgagatcacacaattgcactccagcctgggcaataaaagcaagggcaaaactctgtctcaaaaaaaaaaaaaaaaaaaaaaaaaaaaaaggtaacactaattgaacacgttctatgtggtaggtcctgttatataaatactttctcatgtattaaataattgaatgctcatataatgttataatataggtgcctttattattctcattttacatatgaggaaacaaagccacatagagaagaaataatgtgtccaggggttggaatagactgtttaatctggatactgactctagaacccacaatgttcattaatctcattcatagtctcaagttttcccactagttacatgattttatcatttaactctaggtggttcttaaaggattaaatggatattcaggctcttctgtaaaatctagcctttttgttttaattccagtaggtaagaataccttccttcaggtcatcactttgcacttggcaattgccacggctctttgtacttttgctcttggagtcttttcaaaatactgccaccaaaattgttgccctggttttaccattcaggcttgattcaaattgccatagttttgctgttcatagcctcttcctaggcattcatttcctaattcaagcattctgcttgtttgttgattactgatttctcattatgctttttcttcttcattccttttctcctcctcattcatagtcatttctgtgcttataaatctctctctctctctctgattgtatacattttttggtgccattgacctgtcctatgaaagtcttcttccttccaaaatcttataagtatagatcaggatagagccctagagaagggtttagaaagaatgaggaatgacaactttagagtacttagtttgatatgttttaagtctgaattttattgattcagcaaattccacaaatatatacagaattatttgctaactatggatttcatgtagctgatttatttttttaaaccgtacctcctcccctgccccccaagagtgagataagcactattgttaccatttgcaggtggaggaatcagtacttaaggaaattaaacagcttggccatgttcaaagaggttatgtgtagcaaagctgggcttccaacttaggtcttctgactctcatcccagtgctttctctttgatcacagcaacctctctgaaattaataggaaggagaattaattatttgtttgttccttctttaattttgttccttccttttttaaaaccaacgaacattcattgagcatttaccttatgccagccacagcactaaactctggaaattgcaaattggataacatgtgggtcttccctggacaagctcatggttgaggagatgtgtaaaccagtgtaatcttgcatgcccagtgctattattggaggtgtggctagctgttcaggaagcattctagagattggagatggtttggagatgtttcttagggaaagagttggccacatacacttgctagaattagttttcccatattaaaaatagttttaaaaatatttcctagcatttacctttctgtttgtgaatgtgcactggcctctgagagccaccactgtttctctgtcctctggcttgccacctgcttttgtcaatacttcccaactgctttcaaaccaagggcacctatagaaaaccccttaaagatgactcctatttcctggcttctctgtccaggtacctgctgttctttcctgctaagaacattcacctacaaagccatcttctctgtcaatccacattgtgttcccattaaagtctgaattgatacgtttctaggcaccttttctctttggatgcatttgactaaatcctaataattacttcttcccctcagacctatactttccaccattatagatcagaattttcttattgtcacataatgttcaaatgttgcctttagaccagtgttgcaactatttaatatgactcttgtaacctgtagtggtttatattagacaaaatgtatttattgtaatattttaaaatcacttataccctatgttaatttttttacagcagttttaggttcataacaaaattaaaaggaagttacagaagagttcccaaaccctcctgtccccacatatactcccctgttatcaatatctcccactggagtggtgcatttgttacaattgataaacctacatcaacacgtcataatcacccaaaatccatagtttatattagggctcactcttggttgttgggtaatttaataatgacttgtatccaccattgcagtatcatacagactaatttcattgccctaataatcctatgtggtgttgctgtttattccttccctccactctgacccctggcaaccactaatctttttattgtctccatagttttgccttttccagaatgtcacatagttggaatcataaagaatttggccttttcagattcatttctttaacttagtattatgcatttaaggttcctccatgtcttttcatgacctgatagctcatttcattttagtgttgaataatattccattgtctggatataccacagttttattttccattcctctatggaaggtcatcttggttgcttccaagttatggcaactatgaataaagctgctaggatatgccacagttttattttccattcctctacggaaggacatcttggttacttccaagttatagcaattatgaataaagctgctataaacatctgtatgtaggtttttggatgggcgtaagttttcagcttctttcagtaaataccaaataccaaggggtgtgattgctggatggtatggtaagagtatgtttagttttgtaataaattgccaaactctcttctagaatggctgtaccattttgtattctcaccagcaatagaggtcctgttgccagcatttggtcttgtcagtgttccagattttggccattctaataaatgtgtagtggtattttatgtttgttttaatttgcatttctctggtgtctgacgtggagcatcttttcatgtgtgtatctgccatctgtatcatctttggtgatgtgtctgtaaaagtgattggcccatttttttaagtcagcttatttgttttcttattgttgttttaagagttctttgtatactttatataacaatcctttatcagatatgtgttttacaaatattttctcccagtttgtgccctgtcttctcattctgtttgtattatctttcatagagtagcagtttttaatccagtgtatccattatttttttcatggatcttgtctttggcgttatatctaaaacatcactgccatctagatgtttttcctatgttatcttctaggagtttttaaattttgtgttcctgcaatgtttcataaacaatttcaaatactcctgatctagatttgagctctcttctgccacatgctgtcagtgtgaccttgggcacggcactcagccacctggattctcagcctttccatcagagatgtaagggtggcacctacctcgtgcacgaaatgttgtgggtgaaaatgctgatatgcaatgcacctgtgaggctttgatttcttttgcccccctctgcctagaacattttctgttcacggtaatgaggaaattgattcctgtgctgcacttttagcttttgagggcattgcatctgcccctctctgtctccactgccactcctcccatggtttgaccaccactatttctcgtcagaatactgcagcagcctcgcaaataagtccttctactctcatctcagtgtcctccaatctatcctggaaactgccacaaagtgatcttcctaaaacaaaaataggatcctgctttctaggcagaagccaaacttgttaacttggtttacaagacactttgcaacctggctgctgctcatctctccttctcttactgcattcagctgctaacccacgaagctgcctgtggcctctcagcctccagaggatggaggatggggatgatagctcccctgcctgcatcgtttccctcaattcatccactttttgcccagtcagatagtactcaccttttaggttttcattaggatgttaaatttcctccaggaaaccttacctgatactctttagtctatagtctgggtcaggcaccctctctcctgtctaactccctgcccccaactgcccaagcacccttcactctcccattgtaataatgatgacatgaaactgcaattgcctgtgtgtagctgtctgggttgtttattgatatgttctaagtgcccatcccagggtctggcacctggctctccctaaacgttgatgggtgaaccactgaatgagtatgagactacccgtgtcatagacaaggagagctggtttatttaccaccagtcatatatttacattgtggtcatggtgtctactaagttataattaaccttcttgtcttttattttcttaacagacaaagatgtgagcagcggaagttataacctttcctctgcaacgacgggcagctactacagttgtgtcagccagatcaccataggtgagcactagtgtcattttgatttttttaaaaaaatattattgcctggaaaagctggaggtcaagggggtggctggggaggagagggaagaaaatataaatgcataggcatttattttcagaatcagagcaattgcttgtggactcacttttctggatcgccctcttgtggatttctactgcttttgcatggaattagatggaggaaatgtccagggagataagaagtcatctcttgttcccagatcttcatcatttgctttaacccttttgtttttgtagcacctgtactattatgcacttgatagtacaatcgaattactttttaaagatttatattaatctatttttaaaagaaataagtgcaaattgaaaatgcatggtaaaagtctactctttgctgtttggagaacatgctaagcaagtgttagagtgctgctgaaaatcaaagtgagactttctccttgttatgctcactcaaccttaaacactggttactttggtcgaaagtagaagagtgagccgtgccatttttcttttggttgaatccttcttctcctttccatttcctttcaaaactttcttgattctagaatgttgggcagtgacttagagatcagaaaagaaaagtgaagataatagctacagcttatgcttattttgcacttattgcctgccagctgctcttgactccctgcatacattattttacttaatcagaactctatgagcaagttactgttatttctccattttacagatgaggaaacttgcgctttgccacccagctagaaattaattacccaagatttcattctaggtctgtttgacactaaatcctatatactcttaaacactatgccgtggcttctcaaactccagcaatgtggatgcctatgcaaagcattaatgatgaacctctaaaatggatttaaattatttttattatgaggttacttaagtatgttcaaacatagaactatatatagacaccttgcattccaaatagccattaaaattgattttgcagatgagatttaaaattcagtaacccaaataaaaatacaaatttaccacactaattgaatatgatgtatgttgttattttgctgaaatgcagtcactgcttgtaatgcaatggggtactggctgcagtgatgttggttctttgagtgcagtacagttttactgctaggtacttcatgatgactctgcattgctgccacctttctgagttcaaccccctgtgaaatcaatgttaatgctcactgatgtgaggttattgaatcttcatttgccatgaatgtacctcggcatatccatctctccccttttctcattcattgtaccaattggtgccaaacctgatagaaacacaaaagtaaacccaggcattaaaattaagtggcaggacttggttcagaatatgcttgtattaatttttaaatgattaacttttaaatgagaaacaaagatagtttaaaaattctcgtggagagctcgcagaccctggtttgaaaacactgagcaacctaaaatgccattcccagagacatcagtgagacattaaacattagctaagtagtaggaggacatttagggttcacagtaggggggtgacaagacaaatgtatggatgagagaagattattatggtggtgaacaggatggagttcctatgggagaatctggtgttgtaacagagttagtggctgtgactgtggtcttgacatgagacagaaatcaactagggaggtgggatgaagaggcgggtctagggggagagggatggaattgctggcaggactagtcattggctggatatggggatagtaagtgttccctgagattttgcatcagggtgacagagtctgagctgttcccaggaatgtggaagtcaggaagagggaggatgtgatggtgataggttagatgtgttgatttgatgtgcccgtgagacttctcacgtcagaatgcctcacggaaaattagaaatatggagaacatgttcaggagatgaagatattggcactatctgcacagagagttcagtcaaatctttggaagaagatgagataataagagtgagaattagtacgttgtgtgtgtttggaggaccaaggaccaatctttgggggaagcacggtgagggtagaaataatgacagaggtaggagaaccaagcaagcacctttcttggaaagcccagagaatttctaggacagactgaggaggttgaaaattaaagtctgccttggtgacatcgtgagagccacgtgagtgggtggcgggatgggagccacgttgcagagctctgaaaagggagaggagggctgtgagtagagaattctcttttaaggtgcttttttcaatgaaaatggaggggtagatagtgtgaggatgattcagtagctaacaaacactttggggagctttctttttgccaagcactgtgttctaactactttttctgtatttactcatttaatcctcaaaaagatcctgaggtaaacagtgatattttcccccattttataaatgaggagatggagtccctgagagggtaaagaattgcctgaggacatatgagagtaagagctgcaatttgagcccaggtcattgggctcctattggatgacactcttgttacctgacatcttgcagacttgggccaagtggccttccctggtccagtcagctttagctaccatgtcagggtgttgggttgaaatgtatcccccaaaaaggtactttgaagttcgaatccccagtacctgtgattgtgactgtatttggaaatagggtctttgcaggtgtagttaagttaagatgaggtcatctggactagggtgggccctactccaatgtgactagtgtccttataagaagggaagagacacagagaccatacagagagagctgtgtgatggcagaggcagagatatgagtgatgcatctccaagccaaggaataccctgggatttctggcaacaccagaagcctggagagaggcatggaacagattctcctctagagccttcagagatagcacagccctgctgacaccttattttggactcgcagcccccagaaccatgagagaataaatttctgttgttttaagccacccagtttgtggtactttgtcacagcagccctagaaaactaacctctgaaggggaggtaggtatgacagatgcttaatcttcccagaaggtgccagtgtaacaagaaggctcttgaatactgcttcagttccctggctcaaattggctgaaacgataggaaatttattatttcacataacagggacaccagaggcaggcccgtctttaggatgggttgattaggctgctcagtgacattgtgaaaggccttctcccctgtgccttcctctctcaatttatcttcatggtggcagccacatggctgcagggtttcaggaattgcattcagacctgacaatgatcacagggtaagaagttttggtgccctcctcaggccattgctctaggagctgagaaactttcccctgcagctccttgacagactcctcctatctcactaggcaggtctgcgtcccaagaccccatccttgagccaatcattgacaagggagatggcattatctttggccctatcaggcccacctgaggcttttggacagggatgaggatgggaaggagccttgtgtcctgggtcacaaggctgtgtggggtgggacagattcccaaatgaagtcgtggctctgttgggagggaggaggggaatgattctgcataggcaatgggcaatatccactgctcacagtctgtccagtgcaaagcacttttgcaatatttatagtaagaacaaaaatactttacaaccttagactcaaagcactagagggaggacagatctatggatcatccaagaggtgttttctaaaatctcctttgttttctttcatttcttgtacttcagtccttctcttacagaatagtcatctcacacagaagtgtcacatttgtgagggtgttccatttaggaaaatagcatatgtgtggatttcctagtaatgtggttcctagatgaacctatgtcttgcccaaagcaggggggtcaaaaaatccagggaacagaagaaagactcctcctaaaactattctgtttatccatgagatactcgattagctccttattttctagataaattcccattttagccatgtatgagagatttaagaaccacatagttaacattattttttctcaagacagcttacaatttggggtgttctttctctttcttcacaattttgggttcagtgggaattgagacccctattcctgcctccctccccaagaggggacatgatggtgggtgagggaggatgagcaggctatcaatgctgccaatgtgacatttctattctttgccccgtgggtatcagctgttctcttggatggttgtctcttcaaaatactgtggcttcattgttgcttttaaattgagactcatctatttatattccatcataattatgcagatcttgtcatagctcgtttatatcaataatgcagattaaaatatttgctaatgaactccattttcagagtaaatgatgtagaaatttcctaaacaaaaaagacttgttagctgtgtgaactatattttttcaaaattaaatatatgctataaattagctataattttatataagaaatgctaaaacctgaaatcttagagagtccagagttccttagagactttttatttttttggaaaaagaacatatatttatttattaagtgtttatgatgaatcagatactatatatttatatatttaaccgcatatatttaaggtgcacaacataatgtcttggtatacatagtgaaatgattactacagtcaagcaacttgacatgaccatcatatcacagttaccttttttaacatgtgtgtggtaagagcacctaaaatctactgttagcaaatttccagttcacacaagatgaagttattaactctagttctcatgctgtatattaaatctctagacttattcatattacataacttaattacaacttggtacttttttacttacgtcttctgatcctccttgctcctggtaatcaccggtccactctttgtttatatatatctaaatctttatatatatataatctctaaatctttatatatatatctaaatctttatatatatctaaatctttatgtatatataatttgtatatatataaaatctttataatttaatgtaaattaatccttataatttatatatatataaaagtttatatatgtaaaaattttgtgtataagtgagatcataaacttattttctgttatttcacttagcataatattccccaggtttgtccaaattcatgttaccttccccatgtctcagaccctatccctagaaagcctccctcccctgaactcctgaggagcagtttctgatctactttaaaatggtttctttcatcttgctttgtactgtagttagttgtagtttatgggaaagaacatagattttggagtcaaatctgtgctgaagttctgcctctggaacttgatgtaggccaggttgagatccagttttctcatctgtaaaactgaaattgtgatagtccccttgtacaattgctgtgaggattctagatcagttctgcagtttctatcttatagtaggccttaagtaattttttttattatgaacacaggtcttatttcctttattgattggactctgagctccttgaaggcagagtgggcacttagcatgcgcttaataaacataagttgattaagtgaacaagagccatcaagagggatgatgcctgcctgtttattatgaacatgcattcttagctcaaatggtatttggtttgactaacagctaagattttggggaagtatgaaaataagcacactatatggctttgattgctgccactcacctaatatgtttatctcaccaggttatgacgttgcggggcctgtggcaattgggcttacccactggaaaaatccatacgtacaaggcagaccaaccctcccatcagatctgcctctcttcgtctccaaagatgcaggcatccctgtgtaccaccgatccttcacccgcaagactgaccaggccacacctttgtcctgtccagcctcactgtctatcactccagtgccttcttacagcagtagcagccaggaaaccctgagtcaagacacaacaggtaagtgttggcttcctgttggagattcgggactgggtgtgtataagattccttcatgcatttgcctgctgaataaattgcatttgtatttctgcttgtgtgatatgatggaccccaacaatacctctatgttcatactggcttttctttttaatgagatggggtctcactttgttgtccaggctggtatcgaactcctggcctcaagcaatccctcccacctcagcctcctgagtagctgggactacaggcacgcacaccaccatgcccagctctcactggcctttaatagctttgctataccagaaggaaggttgaatgtgtatagaaatatttgacctaagtgctagttctgtttggtaaaatgttatctagaaatcaactctgaatcagaatttcaagatatgtcatatggctttaatttattgaatgctctatttagtgacaagatatctatcttggactaaactcgtgtattcaaaaaagtcatcaaaaagtcatctttgaataccgtagttaatatcaattcatgttgctccaccaaattgatctatttcaggggtctgcaaactactgccaaatctggctggctacctgtttttgtacagcccgagaactaagaatagtttttacatttttaaatggttggaaaaaaagtttttaaacaatattttgatacacatgaaagttacataaaattcacatttcagtatttatatataaggttttcctgggacacagccacactgattcatttctgtattgtctatggctgttttcacataacagtggcagagttgagtaattgtactcttgcaaacgctgaaatatttattatctggccctttatagaaaatgtttgctgactgctgatctatgtgatccttggaagtcatgagttaaacagtcagggcaagaagaatgcttacaacatcctgccttaaaatttatcgcttatatcacactggaaatagctgcagaaatggccatgcaaggatggccagttaattgtttttatttctaaaatctgagttggaggtttaaattatgcaaaatctatcctgccatgttttccttctatagatacagcacttagaggtaatggtttagtcagccaaatccaatgtgtaattctggttctggaaataaatctttgaatgttgggataccacgacactcaacaatttatagatgctgccacctagaggtaagatgctgaggttgcagaagttccagattatcaaaactaatctttaaagcagtagattgcagacttcactaaaggttaagaatcagcactgcacttgttaaaaatgaagattcctgggtcttaccccaggggatgctgtgtccatggcacagggtgagcttcagcaatctgcatttggcaggcttttccttcctgggattttgattcctgcggttcacaaacatacctggaggaccccctccaaaggctctttagtcaaatggctgaattgaaatatcagggattggtaatgaagagcactggggaacatttgcataccatcagttctgcacatggcaaaagtaatcatctttctgactgtccttgttgaaggtcagtttgacagcggaaagaaatcactatctggggcttgaaaatgtttctgtatagtaagtttaaaattttctgggttttgcttttattgtgaaggaaagctgactcttcttgctttagtttaataaaatcagaagttaatatataaagtacctcctttatatattaacccagggtagctgaaagcttatggcattttttggcaaagaggggtgtgaaatggcagctgccagattaacattttatcatggttcccttagttgactttttttctcctccatagagcactatactcagagtcaatctgatttttggataaaggtttctgtgtttaacttggaggttttcacaaacaaaagcctataattctcttcattcctggggactttccattagcaataaaatattgatttgttccaagcaactgcttattattattcttactattagtatcctaacaaagtaagcctggacatccaaatatatactacacaagcatgtgataatcattttatcatagaaagttatagatgctggtatagtttttgtaagtctcgacaatgactatgtgtaggccaattattacatttatttgattttttagaacaaattgttgattttaatatgtatttttgtgtgaaagcttatagtttcctttctttttatttgtgttttaaagaataaagttaatttcattttgtttaaaaaatacagttttattactcatttatacttaattttttgcttcttttgctagttaaaagaaaactctgaggtgagataagtcagttcagctatactaggataccctacaaattccagactttgccagacatcccttcacaattctaagctatctctcttctctataaacttttggactgatatagaggagctgacaagttttaggcacaatataactatacaattattcatggattgtgagaattttcttatgtttaagaatttcccaaacacattataaaatcatttttccattttataaatcccaccattctgcagtcctagaaagaatgcttaatagcagaacactaactaaatgactagagcttcttgagctctcattttatttagctgtgttcgctattgtcaccatcctattccatcattctttcccttcattgtgtgactaacttctatagtagattctcttgtattagactttacttaaccctgcttgtcaccttgtgcagtgaacaacttgtgaaactgcatagtggtcctgaatgtagttcttccttatgacagaaaaactgtttccagtgtccagcttggtccatccatctatccatccatccactcacccattcatccatccaatatacactaagttaccactccatgttatgtattgtgataagtccttgggagagaaaattaagtaaggcatcacctctatctcaggagctcagagtctagtggaggaggcagacaagtaaggcaagcattctgattcagtgtggtgttaagatagatgatttcacaagacgtgatcacatatgtttttgttttaaattatttaattaatatattattaaaatactaatagtattaaaatattttaaaatatatatctaaaatattagtacaaatacactgaatgcagaatatattattaaattatttcttcaattaaaagaaggtaaatttgagacaaccataggaggaaagcttggaaatgatctctatctcagatacttttagtaggtttgacacacaatttttaaaaaagtaaatgatgatagtattcaattgatattaaattcattacaaataatttataagctttggtttaagagaaaagtaattagaaactttacacttcaaaaagttgctactagatactggactttgggatatactgtaagaattctggttaaatcaagaaatattttgaggacaaaaataaggcatgaaaggtattttaaaaattaaaatggaaataactccttcttgcttagtaagtgtcatagaaaaagagtaaaactattgtcactttatttccttccaatttttattttaggtttgggagtacacgtgcaggtttgctacatggccaaattgcatttcgcttgggtttgttatacaaattatttaatcacccaggtagtgagcacagtacctcataggtagttttttaatcctcaccctcctcccaacctccaccctcaagtaggccttggtgtctgttgttcccttctgtgtgtccatgttaacatgcaatttttgataaccaagatttgtaacttccatcaccactaccacctccgcctcacaacttctctttctagtcattcctatatccccagctgatcctcaatcactccattcctttctatccaatccccagctgcatactgatgcccccaaagccatattttcatgtctgatttctctgacaagttttacatgtgtatttataagtgcctactggaactttcaacccggatatatcccatactatcaaaacttatatatcccgaatggaacttccttctggtagctctcaaagttgaatttattattctatttaatgctggcatagtctcattgtgttagttggactgccatagcaaatatacaactgggtggcttaaacaacaaacgtttctttctcacagaaaagaaaaaaaagaggctaggaagtccaagattagggcactgaccgatttggcgtctggtgagggctgtcttcatggtttctagctggctggtcttctcactgtaccctcacaggatagaatgagagcgagctggccctctggcttcttattataagggcactaatcccatttatgagggctccaccctcataacctaatcacctcccaaagtccctaccttcaaatgccatcacgctggaattaggattccaacatatgaattttggagagacacaaacattcaattaattgcatcatccacagtcctaatccagtgttttgggttaaccccctcatgcttaaccttctgctggccatcagcctccacagccagctggctaacttattaattatgtctattttagaaatattgctacttcaaagcttcgtctccatccctactgacattatttctgctcaagctctcactatctctccttagactagtgctgctagcagtcttgttacaagtcttcctgaatcttaattcttccatgaccatagtttagctttcccaattcatctctctccctcctttccctcactccccctcactttctgtctctcccttcctctctctccccttctctcttttgctctttctctctccctccctctcccaccttttcttcctctttttccacctcctcctgccctccacttgaaaatctctgttgcttctccataatagaataaagtctaaacacttcatacagggtacaggtacgtaagggccttcctaactaattttaactgactctccagcatgtctcaccgctctgtacagatgtgtcagcatagtacttacacttgattctttactgttccctaaaagctcatgattttgcacatctgtgccatctactttgatacctttccttacattcttctcctagaatattcttattcttcaaactcaattaagagtttgtgaattctttccctttttgcctcagcatattttgttattctttctgtttccactggcaattcttatgcacagatttaattttgctcttattgtactccaatacagttttttcatatggctaccataatagacgtaaataaagttcttgagttaggaattaatgttttgatcatgtacttgttcgctcagtgcagagcttggcatgtaagaagtatgttttctatgaccattgaaactgcatattagacacagttgaagagagaactaggcctggaagatagagctgaagaaattaccccattatcagtacagagatatatgagatacaaaaacaagaaggagaaggttgaaatgtagaaagcagaatgaaaaagttcaacatccatttaatagaaattctgtcctgctttaagataatagaatgtatatatatgaggaatatttaaaaaggcaatgactgaaagtttccccagaattgatgaggagacacaaattctttgatgtaagaaacatgatgagtgccaagtagaataaataaaaatatatccatatgtaaatgtatggtgagtcagcaaaaatcagaaacatcttagaaataacctgagagaaaagacacattacctgcaagtgagaaacaaattgtggatagactttcaagtagtaatgatagaggctggaaaacagcagcttgatatcttcaaagtgctgaaggaaacgaaggtcaattcagaattccagatacagctaagtgatcactggagagggaggtcagcataagaaattatttggaaaaagactgggaaaaatgtattctatgcacacctcctgaaagaatgactaaacaacctagtttagaaaagaagggtcttggctgggcatggtggctcacgcctgtaatcctagcattttgggaggctgaggcaggcagatcacctgaggtcaggagttcaagaccagcctggtcaacatggtgaaaccccatctctactaaaatacaaaaattagctgggcgtggtgtcatgcacctgtaatcctagctctttgggaaattgaggcataagaattgcttgaacccggcaggcggaggctgcagtgagctgagttggtgccgctgcactccagcctgagcaacaaagtgagactctgttattaaaaagaatgatcttgaatctagaagaaacgatgaaataataagaaaaatatgtatataaaaattcaaaagatcccacttagaagaatgatttctcaagcagggatgatgttgtttcacaggggacatttggcaatgtctgcagatatttttggttgacacaacttggcaggaggtatcacaggcatctagtgggtggacaccagggatactgctaaacatcctacatgcacaagacgtggtccctaactcattgtcccatgttcactgtcaattcttaactctccttcctccctgggtgtttcttgtcctgtgtgtagtaccttgcccttgcaatgggtcccctcctttagggcattcccagggctctcgtttctctcctagggctgtgcttggtgaagtatgattagcacctttgatttcccctttctcaggtttctgtgttctttaactctccctaaattgtatctcatgctgcacctaggcctttcttttttgctaataccagtttctcaaccttggtgccgtggacattttgggctgaataattcttagctgtgggggttgttttgtgcattgtaggatgtttagcagcatccctggcctgcacccaacagacgtcagttgtgatatctgaaaaaagttttcagacattgccaaatatatgtttgcaggcgaaatcacccccagttgagaaccactgacttacaccaaagtctgatcctgttctctgaagctctgcttagtggcagaagtctggtaccctaatcattgataatgggttcatgggttttaatgcatttgatcctattttagcaagggccttttgccaaccatactctaatcaaaaacatggggggaatttttttccaaagaggaagatttttttcccccttaagactacaggtaacacctttgacacttgccctgcctgcttccctacaccccacctctctgtgaaattatgtcatgaatcaaacctcctctgtatgtgttcaagaccattggtaatctccctgcatttccataagcaggaatcattgagaactcttccctttgccttgtgccctccttctccggcctcaccatcttccctttagtggtcttctggtgggattgtgtttctaaaaaagaacactaggctgggtgtggtggctcacgcctgtaatcccagtactttgggaggccaaggtgggtggatcacaaggtcaggagttcgagatcaccttggccaagatggtgaaaccctgtctctactaaaaatacaaaaattagctgggtgtggtggcatgtgcctgtagtcccagctacctgggaggctgaggcaggagaatcacttgaacccgggaggtgaaggttgcagtgattcgagattgcaccactgcactccagcctgggtgacaagagcataactctgtcttaaaagcaaacaaacaaacaatactaatgaattccaaacattccttatggactttacaaatatgttcctcatcaggaaaggagttgagaaatgactatcttctgttccagatcacttcccaggagtctagcttttacctgtgcacctaaggtctgagcagagcatggtgtcttatattgacggggaagatgttcactcacctttcctggtgaccttaccgagcttactggtactccatatatgcaagctctgaaatcttaggtgcccaatgttatgttgctatgaatttgcctggggtatagaataccttagaagaggtgcccatttgatagcatgaattcaatgtcttataacaaattgtgaccagatactttcagaacggatgccaaaggaaacaggtttgatttcagagatagagtgccgcagacagtgaccctgcaacctgaacaactgatgtgaccacgagatgcagagtaattggacctcaccaggagactcatgtgctcccttgtagagaagctgagagacactccttgtcctgtccctgcttgcacaccatgtgcccagccagcctgagcctttctgctagagtgttagttcagctaaatctgtggcacagagtaatggaagatcagctaccctctacaaaaaccagggcaatataaattagaaagtctctaaaccattatatttaaagtgggtttcttctagagaacatagagttgggtctagtgtttttatccattctgacaatttcttttaattgatgtcgttagaccattcacaagtaaagtgatgattggcatagttgaattagtatctgccatgtttgtaaccattttctattattacatttgttcaccatttctttttttttctactttttctcttgccttttctgattttaattgagcattgtatatgatttttaaaaaatgggatgtcatcttcctacttccctttctgcttttaaaaatttcccttttgtcaaaatagccctgaaggggtatttagattttaatcgtatgttatggaataaattttccggtttggtttatatggagtgtgaatatgagggttaacttacttaagttaggatattgtaacaagtagggcatttttatgcattttggaaggtgatttgtggtttcctaagatgctggctgggtagaagatgtcacagtggaagggaaggcaaatttgagttgaggctattcaggtgagggaccagtgttccaagcagcaggacagtgtgcaaaggctgattccagaggagctgggggtaaatgtctccttcacattgaagttgagtgctgaatgtgttatcaatagaggtattgccgcacagggtggctgggttctctggggctgttactctggtcttccatggtgcattccatgtgttaatggacatttgtgagcaagcccagaattttaacctccatgtatactacttctctgtgaaaaactaagttgggaaccgcctggactttagaactaagaggatcattggaaatgttcattttgacaagagcattggctaagagaaatacattgctgagctttcttcaaatttcctattttcctaaacttgcctatattgttcttttcagaattcaagaacatttcttgttgtttaattatcgattccagcggagtcctgttcattcttcctccatgtgtgctggttatttagttttagaagactgaaaacaccaatgaatcagggaatgattggtggcaaatgatgaagacaaagtcaatttaatgatgtagctatgaagttacttggggatttctaatataagagactgaagaacttgaattaaagctgtgttgaatgtgatttgcaaataattatatatttcagccataaaatcagatggctttaagatgctccaataaagtcatccattcttctagtcatctaaactcttgctactcaaagtgtggtccacaagagctaagagagcctgagtttggatttaaaaatatcgtccaaaagggataatgcgagggacattttagagatagcttcaatagcacttcgtaattaatgggatgtgatatatgactgaatggatgtcccgtatattttcaataaggttaaaatatgatactgaagcttcatagtttaggccagtgattctcaaactttagtgtcaatataagcccagtggacttcttgttaaactgcagatcctcatccagtaggtctgggcaaggggtagtgagattctgcatttctttttttttttcttttttctttttctttttctttttagacagtctcactccatcatccaggctgtagtgcagtggcatgatcttggctcactgcaacttctgcctcctggattcaagcacttgtgcctcagcgtcccaagtagctggaataacaggcatgcaccaacacacctggctaatttttttttttttttttgtatttttagtagagacagggtttcgtcatgttggccaggctagtcttgaactcctgacctcaagttatccacctgcctcggcttctcaaagtgctaggattacatgcgtgagccaccacacctggcctagattctgcatttctaacaagcttccaagtgatgcccatgctgtcagtcatggagcttgggattcagtacaagacacaggtaacaaaaaatattataccaaataatttgtggtcactaacaggcagatgctttgaaggataggaataatcctcttcttaaagattcttggcaatactgtttttatcaaaacacgcctctgagttcccaaaacagtactctataaagaaaattttctttaccaccagttataagtgggaagtctgcttatgccctgttacaggaatattatttgtctgtgatatataagtgtccaaacgtttccacagacattgttttgatattaaaaaccaaatgaaaatcccagcaaccatggtactgactcaagagggagcttagctgtcttagttctggttctctgggaaatagattttgagccagagatgtgcatgcaagaagtttcctggggagagcagttgggatccgtatgtatggtgtgtgtgtgtggtagatggagggaagcataaccaggcagagggaagatatgagctgtgatgatgcacaaacatggcctcagccctcacagagggatacctggagctgggacagtccttcaacattgtcccacaacaaagctattgtaacctgccatcattgcctggatgcaagctgccacgaggaatgaatgtgaccctggggaattctctttgcgggcagtttcccaagaaagattcagccgagagccatcagcagctgggggtgtaccatggggcccacagcatccatgacatcagctgatggaagtgaagtgtttagaaagatctacgcgggaaagcaagtgggagagaatggtggaattctcagtttgaccgcaagcatggaaaatctctgctgacctaagaaaaaggcccagaatctgagcaggttttccaacccccaggaactgctgagtatctggattctggttcagtttgtagttctctccagcaaagaggcacctaacagattgggaaacaccctctggtcactattcctcctggttatgtgggtatatattttggaaactatgcagtttttgtctttttcaggcaaataaggatacaactgatttgtggttgtaattggagaatggaagagttggctcactttccttgtcccaggtcgtgtaactcatattcatttattcagcagctatttattgagtgcctactttgtgcccagtactacattaggtgctgggtgtactggagtgacccaagcagacaaggctcctttcttatggaatggcagtgggataggctagtagaagagagagatatgaaataatcacccaaataaggaaatttcattagctcagtgaaggcaaaggacactattagggggtgtataaagagggcatttaatttggattttgaagatggggaaagactgaggatgtggtagtaatttgagagagatctcaaggatgtgttggagctggtgaagatatagttggaatgtggaataggagacaaagacctggcttgtcttctcagctttgtgacttatcatgttaccttcacactaaagacttaacttctttgagcctcaatttcttcatctgtaaaatggtgcagttataagactcaaatgagataaaataggcaaagtgtttttcaaatcctaaaatgttagcgaaagctacttttcctattaattattctagcccatggattccttctctcccttctcttaactgtctccttctcatatttcctgtgctgggcttcgatgctgaggtttagttaatagtaaaatgctatgtagttaccttcttttagcctatggctttcaacatttttgaacaatacctaaagtaagaaatatttatgtattgtgacctactactactactacttctccatcccttccttcctccctctccctcttacacacacacaaacctgaaaaaaaatttaaggaaataattcttattatttattacatactctgatatttttcattccattccattctgttccccaaaaacaacaagtcaagatccattaaacagatgtcactgcttacgaaggaattgcaactcataatttgaacaagattgatttagataatataatacctgaaatcctttggaaaccttataggggtcacgcaatctttttttaatgtgtgtgtgtgtgaggtctgttgtacaaggaaattatttctctttgagactgattattaatgttcatttcaaaacatctatggtgcctatggcaatgagactgtctcccagagttggcaaagatgtgatccctcaaaagggctctgtattccctgcagttctgacatctctggagtcagtgaagaactgtggcaaaggatctatatccattaaccattattatgataatactgaataacaaacaaccccaaaacctcagtggcatacaggattaagcatttactcgtttatctagaatcagctgggacttggccagagctctgctgatcttggctgggctcactcagtatcttggagttggctggctcttggctgatctaggttgtcctcaatgggagcaattgggatgactcagctgtgctccataagtctctcctcttccagtaggcacaggaatgtgcttcctggcacattctcatgacagtggtggaagtgccagagaaggggccagtccaatcatgcaagcactccaagcttctgatggcagcgtatttgctaatagttcatcagccaaagccatgccacatggatgagcccaaaattaaagatggggcagaatgtcttattctcagtggaacaacactgctaagccacatgatgaaaggctgtggaattagggaactgtgaataattggggccaaagacacaatctatcacagcctctctatctcacgtacatgatctctttcaccccaaagaggccattttatttttcaagtgggctcagatctgagtcctttaggctgggccaggaatatttatctgaaagagacatcatgctgtcctcctcataccctgggtagattgtcctccttttacctattccaacctgaagttgcctataaaggccctctcttcctcagtgtacatcactttaggaaggcagacacttgcaggcagcctgctctgccaatatctgagatgtgcctgggcctacctgcaccctagctacaggcaaaatttatattaagccataacccacactgtatttttttctcccatttttcagttcttcctaggaaaagatttatagcattatactatagtagttttagttgattcatgaaattagatatctaaatgagagattttaatgcgtaaagctatcaatagtacagtacatgtcaaaaatagccttttgttccgacttttcccctaatatttagctctgaatttctggttgtctattggacgtgttcccacatgttcccacaagcacctgtccaagccacttctgtgttccctgtttcaacaagctgcgtcatcatccatcctgcttctgaaacacagagcaaagagtcatctttaaccaaccactcatttgcagtcatcatccctcagttcttttgctcttgtgaataatggctggcaccattattcaaccagacactgaaattgttctttgttcatttactgggccaggttctatgctaagaactggggatgtgagggtgactaagacatgactctctcttttagaagctcagtatctagcaaaggaggtgaactgtgaacacataactcacaatgtaatgtgcacctatgaacacagtgttctcttccacccttcccacatctaattgctcatcaattcttgctcattctacctcacaaatgtccctcaagtctatgctcttttctttagtcctgtggtcattgccatggatcaagtctttctactttcttgccggggcaggggtagtagttcctggctggccttcctatcttcactcttttcccagtctattccaacccccacccccaccacgtgttgtcattgtctaaaacactgatctgaatctgtgattccttggcttataagccatcatggacttggtggtcctcagtaagtaaaacatagaattaccatatgacccaactattccactctgggtatatatccaaaagaattgaaaacaggtattcaaacaaacatttgtaacaaatgttcatagcagcactagtcacaatagccaaaaggtaaaaacagcccaaatgtccatccatggatgaatggataaacaaaatgtggtataatatattatacaatggtatattattcagctgtagaaggaattaagtactgatacatgctacaacatggatgaaccttggaaacatagtgctaagtgaaataagccaggcacaaaataccacatcttgtatgattccatttatatgaaatagagtagtcaaatccatagagacagaaagcagatttgtgattgccaggggaggggagaatgaggaatgactgcttaatgtgtacagggtttccttttgtggtgatgaaaatgttttggaactgggtagtgatgatggttgtacattatgaatgtactgaatgtcactaatggtaaatttgatgttatgtgcattttatcacaataaaataaatgtgtgtccttctatacctgcaaaacccatcaatgatctctggcaacctgtagtttgagtccagatttcatagtgtggggttcatgcccctcatggtctaacctggcctatctttttagctctgttgctctcaagcatcctgcattccagctcttcctggtgtactgttaacatttttgcttatgctcatccctcacctggagtgccttgtttcccttctttcttgcttggtgaaatccaaagtctggttcagatgccgattcctcctcaagggcttcctcataccccatgcttcttcctgtgtgatcccatagcaccttattcagatgattagccaccatgaatcatagttgagtgtgtatctctgccttgccagatggtgagcaccatgcagggagaatgtctgatttgaatttggatccctctagccttgtgtttgatgcataatagttgatcaatatttattgaattaaatgacttgattatttaagtctaggttctatcctgaagctaatgctgtgtccctaatccttaatttaaaatgctgtaatgatcactatgcctgtactttgtttacgatcattttttattatcttcatctaattaccattaattgtcttagctaatagcaaatttcttcctagtttgcttgcacctgcttaacccaaatatttgttttcttggcagtttgagcactcacttagctttcacctgttttcaagtttgctaacagtgcagctgatgttctctcctctccctttgctatccaaagtcccttgaaaccttaacatttaaccactttctctgtgctagggggaatgtgacagaggacgagtcttccactgttttgttagaggatctttgggtcttaggatgacatagtttgcaaagagattctgaatagttatcactaggagaaataaagtagttttccttctttaatctcaagtcagggagtcttcacatgtcattattttaattacgtttattattttttcaagtgtcagatacatttttcttattaattaaaatgcaattacaaaattctaaaagttatattgaagtgcttttaaatgctttatattatccatctatactgctggtgtcgaattacaacatagtaagggctgttaaaatgtttttgaaagctttaaaagggccaatatttcaatattgtgtgtcctgaaatgccactttactttggagccttcctacataataagcagattagtgaagattcaggaagaaattgaagataccattttaaatgtatgtatagaacattatttatttttatttttgaggtgtagtcttgctctgttgcccaggctggagtgcagtggtatgatctcggctcactgcaacctctgcctcccagattcaagtgattctcctgcctcagcctcctgagtagctgagactacaggtgcccaccaccacgtctggctaatttttgtatttttagtagagatggggtttctctatgttggccaggctggcttcgaactcctgaccttgtgattcacccaccttggcctcctaaagtgctgggattacaggcatgagccactgcgcccggcctcaacttgtttttttcacttgttttctctgactctttggtggatatttcaactcttgggagatctcctccttgaagctcttcagacgtgggttctgtcccacttctctgttctacttcttcttttccttgcctaatccttcttcatgtcacttaaatgtcagtgcgtctcaaatgcttgtccttggctcttctttcttgctctctctgcttttcctggtcttgtccaccactacccctatttcacctgcaatctgtattctgtacttttatctcagacctccaacctgaacttctctgacttccttctagacatttccatctgggatgtcctgcaggcactctgactcagattagccaaaaatcgtcctgttgcctcagtttttttttatctgtcccttctggaaaatgtggaactgttagtctgacggtttttaaaatctgtcccttctgcattttccagaagggacagataaaaattggtgaatgtacccagttgcccaagacagaatcataggctgtcctctgccctgctcctcacatccaggtggtaagcctgttgagtctatctccttctatccccaatctccctgccttggttcaaagccttgtcacctttgactggaccattactttgtcacttgtcttccttggagtccctctcattttccatatggctgtcgacttaatctctctaaagcgcaaatctggtatgtcacttccttttgtaaaactttttagttgttcccaattgtgttgtctagagaacaaagtttattctctgtaatgcttcatgattgggcctctgcccaatattatcttcgattactcctacatactcttctttttctcttgtaactacaaaggtgggcctgattgtgaaggccttggataccgtataccatgaacttgactttatggagggtggagccactgctgactttgcattcaaggagagtgaatttcaatattggaaaaaacctttgaaggccactgagtccacttgctccgttagttcctgataagtggatgtccagtctctgaacacagactgccaacctgcctactgttctttgttcttctttataaaatgggaacagtaccaactttcacacaaacatattgtaaagtctaaagtgccgttaaatttatcaagggcaattgtctcacctttcttttggattcctttgcttttatggtttctgtaggagtttttcctcctctgtgggtcttcatccatctatgtctattttactcttttcgcccatctgctatgatcaatttgtatgtattgttcactccttcaaggactgtggattttaatataaagaaataaaattcaacactcaaaacttcctttaaaaagaaaaggcagaaaagatcgtgaggatcacaccatacccagaaatgtcctaaacaggctctttggatcagagactggcaattgagggccatgtgacaggttcttccttcttcagcctccagcttgtctaactgcaatgctctgattcagaattgcactgctcatggaaagattttggccccagagtcacctgcccgcggtcttggctcattcagaattagagtaaggctgacattgaactgtacttgaatgtgagttgttagtgcagatggtggccttggtgtgtaatgcttgccatgtgactggtgcctgggagcagatgggcaccttctttctgtaccagatgacactccaatcttcctcaaaggcacaagtgcaagtggagtgaggcagtctggagccagcaaagcaaggggaggcataaccttagagctagtcaccagcattctgtcctctctggagagaattgctggggatgtatccttaggtgcaagtctgggatttggttcctgagaggatttgttattctcttaaatgttgtgatcccataatgacagctgacacttatatcactctaaagaattgacagtgtgctttcccacacatgaccctgtttgatgttcatattgaccctgtaaaggagttatattaatttcttaggaccgccacaacagaggaccacaagctggatgacctaaaacaacagaaatctattccttcacagttctgaaggccagaagtttgaaataaaaatgtcaacaggctctgctctctctgaagattctgagggagaatcctttctttcctgttccagcttctggtgactcctggaattctttggtttgtgacaacattactcaagtttctacctctgtctacacatggccttctctttgtgtctgtcttccctttttctgtctcttatacaaacacctgtcattggacttaaaatccatcctaattcaggatgctcgagatccttaatcttaactatatgtgcaaagacccttgttcaaaataaagtcactttctgagggtccagatgggcatatattttgggaggcactatttaactcaccacacttggtattagtatcctcatttgaggatatggaaacctagagatggtaggtgttttacacagagacacattggaccatggactctaactcaagtttttggatgccaaatcttacatgctttctgctgcatcatattagtctctcaatatgtgggtgtttttgtgtggtgagaatgttgctttcctttcgtgtatttatttagcacctactacatgcctgatgaagtatatatatttttgttcaactaagaacagactgaaaaattggagctttcttatcttcgtggctgagactagaatcaggagaaagcaagtcaatgatgaattcttatcttggctcagtcatttctttctccttgttcttctctttcccacatcttcagggatatcaagagggactgggcacagcttagcttctagggttatgtggtcagtgtgattgagctaacttggtaagacccgagaaccctcccacatgcctgctaaatgggagctatgctgcttccttcattccctggacagaagatacctacatgccaagcctaaagcttgaaaggaagtgtaaatatgaactactttttcagtttcttagcacatttcttaggagggccaggtgaaactgtgctagaggtcaaggttgtgatgtaccattttgagcccgtttccccatggaacacccagtgtctattgctaacctgttctctgggcctcccctgctggggtagtttcccatgctcccaaggttttcctttcttcttccccccatataaagactttatagtctcatgtgctactttgtcaaacatttgtttctttttatttatgtaaacattttatgaaatatttcagacatgtgaaagggcataaaaacaatatgacaagaacacacatacccagcactcacctgcagacatcagacatgactgatagctttgaggcccccatgtacccctctcctccctgtcagaggtaactgttgttctgaatttggagtttgccattcccacgcatttctttacaatcttacttcattgcctctattcttgtgtgacacagtcttgatcctaaaggaacactggacttcagcaggctttaaagaaggtcatttggagtgacgtttaggagagattttgggggctaatattcattgaatacctactatgtattgccttctgtgttttccatgagctttcactgacagcagccctctctgtttggagtcattatccttgtttgacagccaagaaaatagaaagcagagatggtgaataacctccccaaagtctaacagctgatacctatttgactccatcatgtgtttctcctcaaattgaagctcctttctctctcagtgagaggtgaagagggcgctggtcaggagtgctggatgtgtgatttagactgagtgtccaacctctctgatctttcctgttctctaaaatgaggagtattgagtcaatccctaagacttttcctgttttaaaattctatgcatctcttagaaatctgtggatataaatgctttatgctgtggagtctcatttcaggcccttcccctctagtcttgtaaaacgttcaggtagatatcactttatcactcagaacttcgttttggttacacccatgtcagtttgcagctcctcttctgttctgcaggcttggaggaagatttctatacatcgtcatgggccagcccaagaggtgagaaatgccaaatactcaagctggcttgcccatcttctccttgccatctgtaccttttgggcttgtttggatagcgaagtcaaggtggagaaactcatcaaggtggaacatggtcctttctgggtaaagagagactcaggctaagtttgaagtaggcactctcctgcttctcatcctatgtatcttaactttctcccttcttctttctctgggagagttctttctcttgcccctttggctaccagggacttccttaatgcctctagccattaacggcaaagcctatctttgtggtgccttttgctccatccctccttttctttttcttttgttccaactcctaactgtatttcccccactccaagcaaaaccccaattctccctagatcctcagtggtggaggaaggaaggcatctgtctagaaggcatgaagaagttttggctgcttaagccccaggcctatgtctcatctcttggggtgatttccagtggatccttagcattaggggtccccaagaccacttccagatttggtgatttgctaggaagactcacaaggctcagcacatactcacagctaagatttatcataacaaaagaatacaaaatgaaatcagccaagtttccagaaaaggtggatggggcaaattctggaggaaatcaggaacaaacttttagaagttttcccagagtggaatcacacaggatgagcttaattccttcagcatgaattgtgacaacatgtgtgaagtgtcttccagtgaagctccttaaagacttagcacccagggattttattggccgtgtaggtacctctgcttagcatgtgcaaaaatcccaggaaagtgggtgttcaacataaaccacattgcctgcacaaactgtttaggcacagtgagccactcttatcagttagagatttgagaaaagccttctgaaatctaagttcttagatgccagtcatgtgccaaccctgcaagcaagacttcctaaggaaagcaatctcaggcctgttatgttgacttttctgcacaattctagtcttctttccctacctaggtcctagtttctcagctgttctctgaatctctccccacccacctgtacccatggctccaaagctgcccttctttctctgcttctgggtttttcctttccagagctcatagtggaagaagctatgacctctcctgccctccagtgtacttgcctctccttcactgagcacacagaggctttattattaatcactagggggaaaggggctgtaacaaaagtagtagaaaccttacaaagttcccttaattgtgagcatatcctgcttccatttcttactcttcaaaagtcatttttataaggtgctggaggctttccagatgattctaaatgctgggattttcaggacccagtaactaacccaccagagtttggaacagttgagaggcaggtgcagatgctcagcatatggaggtgaaaataccaccttttttcctgatagagctgtggggagaatgtggcccgaattggataatgcttccctctgcgctttccatccaggccccagaactagccacctcaggcacaatttgagccaatagagcaaccactgatatgtgctggtcccagtggagagggaagaaaggagaccagaatctctagtgcttttgacttttgactagactaccttttcccagttgaaaagcaaggctcccctggcaagggcaggtgaccagaaggatcagttattctagaaagttctccacatgaaaacccagagacatgagaacaagtgcttacttccctggggacaagtgcacatcttcaacactagatgatactgtagtcaaaggaaagtgcaagtgggctctctgcttggctggcggaggtctcaggcccttccagaacctgctcaatttctctctggatcaggccttagaaaaacaagaagttctaatattgacatgtcctgaacacatactctgtgccatgcctcgtctgtggacatgcattaatccactagaatgcagtttccatgtgggcagggagttcttcctgtttagttcgctgctgagtcctcagcactaaaacagtgcccagaacatagtaggcgcctagtggatgtttgttgaatgaatcatttattccactgagtcttcagaacagccttttgaagtactagatgagatattggtttcattttacagatgagaaatctaagtcagtgagattaaataatttgcccaagacatggaacctagtaaatgggtgagcagggatttgaaccagcgttgtctggttatagtcataggggtcttcaaaaaccatgcctgcttggcttgcctttagaattctggatatggcatactctactggcagggagtttgtcttgtgtaatttttgctcagtgtcagcattggagcctagtttctctggactccatatggccacaagggtctgtacccactgaacagaaacccacaggcgtggcagcactatcaccccaggagccagtgggtactgcccctgcaacagatttgagtaacagattttttcttattttgaagcagttgagccataacagaaacaaagtaggcatatttccaccaagcaaaaaggttaaatggacacatatttcacactaaagatcaagtactccagagggtatttgatactcaggtaagcagaatctctagtgcttttgactagcccttgctgtgctagcccagctctccagctccttacacatcattccccttctccatccacagtcacctgtttacaaatggctgactttcaaatgggcagctcttgccagagcctccttatctcccccagtcctgctgcaggagcagctggtgtctggtatactgctcccttttcagttcacataggcttgggtgttttatttcgggtcatgtgggctttcatgaattgaccttgaattttgccaccacttataaccccatttctcccattcatctatcaatccttctttattgaggacatgttgggttttgtgttatgatgtcctggcactataaggtgaatatacttactcccatagtcacatggagagcttgttttctgggttttaaacaaaaggcctaggaaccactttttttttttaaatttttaaatcaaagaccaactgttatgtatctcaagttcctttaggatttgattcttgcctttgtttcctgttggggtagagaatagcaggatgtagtacttgggtgagcactatgtcaagactcatatttttccattgctacaattccacaagatctcaagtagtgtgtatctaggcattctgcaaataagagcttgaatatcttctgctattgtcatttttaaatgcaatttcattacattaataacattcagcttctatcataaaaatggttctcaaaggcagctaatatacagtgcaatatggcattattggatatgaactacttagatttgtctaagattctctgacaaagcagttctggaactggaacttaactatctaggaacccagctcaagatcctgactccctccacaagaagtttactttgctctgccgtcaggacatcagtaatgtgtttatgcctcagagttctaagaaaactcaagattttgctaaatgtttatttcatctcaggacatttctttttataagtaaataaagcaatttgacatttttactcactttaattatccttctcagaacactttctccttgcaaactctaatagcaacaataacagtataatcaagcaagcaataccattaacacatataatcagcaatggttgctgaagttacctcttgcattctccaataagagtgtgagcaacggtatttgtttttactttatacataatcagcacatgtttgattaaatgatgctccaaggaagcatataaacaaaaatggtcacctggtaattaccttagctgtccatggctgttaggagacttttcccacagtttaaatgcagcctgcagttaagtatattaggtctccttagaggctgacttgatcatggtgtataatctttaaatgttctgtttaattcattgtgctgatattttgttgagatttttgcatgtgcattcatcaggaatattggcctgcaatattcttttcttgtagtgtcctcatctggctttggtattagggtaatgctggcctcataaaatgagtttggaattgtttcttcttcaatttttttgaaagggtttaagagggattggttttaatcctttaaatgtttggtagactttaccagtggagacatcagctcctgggcttttatttgttggaaggtttcgattgctgattcaatctcctttcttgttattcttctgttccgagattctatttcttcatgattcagtcttggtagtttgtatgtttctgggaacttatttctgttagattattggtgtataattatctgtactctcttatgaccctttgtatttctgtggtcttggtcctgatactttctcattcatttataattctatttgagtattctcttgttttccaagcctagctaatgatttgtcagttctgtttatattttctttctttctttttttttttttttttgagacagggttctactctgtcacccaggttggagtgcagtggcatgatcagtagctcatgcagcctcagccttccaggcttaaacaatcctcccactgcagcctcctgagtagctgggaccatagacataggctactatgcctggctaatatttttaattttgttttttgtagagacaaggtcttgccaggctggctttgaactcctgggctcaagcgatctttccgccttagcctcccagaatgctaggaattcagatgtgagctaccacgcctggcctttgtttatgttttcaaaaaaaaaaaaaagagttcttagattgatcttttctatttttaaatttaattaattagattttataaataataattatgtatatttatggggtacaatgtgatgttttgatatatgaatacattgtagaaggattaaatcaagctaatagatatattattcacctcaactagttttttttttttgtggtcagaacatttcaagtctattttagcagttttgaaatatacaatgtgtttttattaactccggtcaccatgctatataataaatctccaaaatttattcatcctatctaattgaaattttgtaccctttgactaatatctccctttaccctatccccagtctctggtagtcaccattttactccctgtttctatgagattgactttgtaaatattctacatataagtaagatcatgcagtatttgcctttctgtgcttggcttattttacctagcattctgtcctccaggttcatccaggttgttgcaaatgatagaattccttttctttttaaagctatatagtattctgttgtctgtgctcttatttctttatgctttgatcttagttctgtccttttgctgactttgggcttagtcttctttttctagttccttgaggtataaagttagcgtctttatttgagatctttctcttctttcttaatgtaggcatttattgctataaacatccctcttagaactcctttgctgcatcctgtgagttttggtatgttgtgtttccatttacatttgtctcaagatatttttatatttcccttttgatttcttctttgacccattggttttcaggagtgtgttgtttactttccccatatttgtgaatttttcaaatttcatctcgttattgatttctatttttatactattgtggtataaaagatactagttatgatttcaatatttttaaattttttaagacttactttatggcctaatatgtgatctatcctgaagaatgttccatctgcacctaaaagaattctgctgctgttggatggaagtctgtttgatctatagtgttgttcaagtttgctcttttcttattgattttctggcagaataaactgtttattattaaaaatggggtgttgaagtcttctactagtgttgtgtttctctctatttcacccttcatttctgttactattgctttatatatttaggtgctaagcactgggtacatatatatttacaattgttgtatcttcttgatgaattgacctctttatcatcatataatcatcttatttgtctcttgtgacagtttgtgatttagtctatattctgaacactcctgttctcttttggttaccgtttgtatggaatatctttttccattttttatactttcagcttatgtgtgtccttaaagctaaagtgagtctcttgtaggcagcatataggtatatttttttctttttaaatttattcagccactgtatgtctttttattgaagaatttaatccatttacacttaaagtaattattgataggtaaggacttactactgccattttgtaattgttttctgactgttttgtagtttctttgttccattcttcctttcttaactgtgtttctttgtgatttgatttttgattttttagtggtatactttgattccttttttcatgtgtgtagtagatacacaaaatattttttcatcttttcctttaaaggaagtactttatggcttctctttggcatatgcaaattgctagcatctcatttgtgtattttggggccattattaagtcaaataagggttacctgaacacaagcactgtgataccatgatggttaatctgataatttagacagctactaagtgactaatgggcaggtggtgtatacagtagtatgaatatactggataaagggatgattcattttcccaggtgtgacaaagtgtaacagcacaagattttatcatacattcagaatggcatgcaatttaaaacctatgaattgtttatttctggaatttttcatttaataattttggaccatattagaccatggattactgaaactttggaaagcaaaaccatggagaagggaagccactacagttataaaagtgtattttaagctgataacaactttactttgaccacgtacaaaaactttacactttccccacctcacatggaggctgggtccgtgggtgatggactagaaactagttctgagggagcagtactggaagctgagtggggagctagtggggcaagcctggaccctggatctagtggaacatggggcttcatcagtcagcctgtctctgtgggtgccgccctggtcccttgggccatgggggctgacctggcactggggcagttctgaagcctggggttgagggagttggcctgaagcctagggctctggagctggtttggcactggcataggcctggggcatgagttcatgaaaacaagcttggatcctggggccataggggctggcctggtgccaggtttcactggtgctagggtccgtagccaagttgggtgcccacttcctttttcttccaccattcagagggtatctccacactgtgctggctgggcttgggagaaggatgacatggataatgtgaaactgtccttcttactctttctaaatgtatcttctttctgtgctacacctagatgctataatctctcacctggattccttgactcttgtgaaggtatttttatgtgtgaataattgtttaaattgatgtttctttggggggaccagcactggagtgtcctattctgccatctgatgaacatcattctaccatactgtgtttaaatttatatgccaacatatttggctctttatttggtttctgagtgcctctgggtcaagaactttttcttatttctctattttcagtgtcttgcacagtgcccctacatagtaattcttcagtgtatttgttgaatttaattgctttacttggtttattatggctttgagtcgtaaatgccatacttttatgttaatggttttactagtatttctgaacaacataaaatttgatatttttgtgaaacttaaaatggtataattttcctgaatttttatatttcccatagtgagttgatatcacagttagacctttcagggagtgtgggtgtagaattaagtttggcatcacaattctgtttttataaaaatctcaaagacatgttgactctcttagattcaagtaattagcagatattaaaaatgtcatgtcatgaatctctgtgcctgtgatagcatctaacatgtgaaaaaccatctgttcaggtagctatttacaatgtgtcaagtagcttctctgttgaaaccaggaaacaaccaaaatacaatgacaaaaaacctattttaaaaaaacctattcacacaatcatttttcagcctaaaaatccatattttgtcacaggaggatttttgaaatcattttttggattatattcatttaattacaaaattattcatcctcactttcctcatcaaggatgaaagaatatcctgagaggtatgcatttgtaattttaatataaaggaaagatgctagtgatctagctggctcctgaaattgatccgaactcttaataaataatgcagaaaggtaaataggatatcatgaaggtaatagaaatgtaattgttactttggtgttatgatctaataaggagagtttatagtgtaggcatcccactggggtggaaagaggataccctggggtttcagtcttgcctctacccttaccagttgttgtccatgggcttgtctcatagactctgatcctagtttttctatttgtgaaatgaggctgttataaatttgcatagtattattatgatgcttaaaaaggatgtacaaggtaaaggattattacagaagggcaggtcatctggattatagattattcctaggaaataattaagtcagttctttggacatagttaagtgcagatgcattctagaatgatgtattttcactcattatatctaatatgacctctacttctcccaccccatagctgtgtggtagagctgcattaagttgcttgaacttaaaacacttgccacaagccgtctcttatggaagccttggagccagaggcaaaattataatagttggttataagatatttgcttaacacatatttccagtagtaaaataaactgaattttattgagtactatttgatatactttcacataatttttttcttagccaaattttctaaagttttaggagttaccatgtattgattccaagtaattcagcatagagattgttcattatgcagacagcaataaaacacgttatattacttttagaatttataaaaatgtttgtctctggttgaatattgcgatagctatgtaacaccgtgttttccctttttgctttggctaccaggacactcaaaactcaactttcagttatagaatgttttagccagtgtcagtgtttcttagagggctgtccttagactactgccatcagaatcaccgggagtgcttgttcatgtggactcgggttcttaccccagatgtactaatgtagaatttttctattatgggcctgaaaatctgcattttagacagaacactgtttattcttagacactaaagtttgaaaattactggcctaagagttcagattctttcttcttcctcccattacatggattttgattttctgtttctattttagtagctatattggctatcttatcctaaaccatccatagcctttttagaagtatgaaggacagaatagctgaaaacgtagaagttcaatgggaaaaggttatagaaaccaagatagagtcaaactaaagagaatagtttctgccagtttccttgttttctctttccttaggtgaaagtaagggacacaaacacctcttgcattgaaggaggtgagaaggaggacttgtagctgggacctctgagctcatatttaaccccctgtttctggtagaattgatgatgcagatatcaaaaggccctggagatccatagatttcagaattaacagagtggaagaggccttggcttgaattttttttttttttttttttgcattacttatctgtatctactttgattgtaggatcccttcttataaaggggcagggactctgttttatacctcttagaaatagcacagtgtttagcacttagaacacagttgggaagatgaaaggatggaaaaatggaaggtaaattagtggagctggtgggcattgagaatccgaatttaacctattggtttaagttactgagaattcttgtatcattgaatatgccgatctttaaaaatacacattttagagccaaatctaagttatttaaaaatatgatcaaatactcttcatatcactgtcatattgaagaggaacgggttaaattggaactaccaatttttggccagtgaaccgacctgctgcaggcaggtatgggcaggaaagaagggtttgatgggggccatggcagacctgttcatcagagctcatctagggtcagatcagtgggtggacaggaaagctagaccatggaaatgacaggcagaaccaactctactgactcttgcatagaccagacggatctgtcatgatcttaactgagctggagatagctgagctgtcaggtgtcagggtagctgattaagttaacaagccaaaatgaaagcaacagtcaagcctttaactacttactgcaatagtgtaagcaagcagctaagctagagaaagcaccaccccccaccccagttccattttcccccatggactggtatacttgtccagggtcaggtttatcagtgcagacatgagggctatctcactgctgatggaaccctgaataaaagatttctgcagttttatggacccaggggctaggagaagggagaggggaagggataggagtgaaaagctactgagtactgagtcagaatggagaaaagcatcttcaaagttttccctacccctgacaaggaggtcttgttagaaggacctgaggaaggcctgggtgaccagtggccatagataaatcggcttctgcatgaagatgcctaggctaggaatgcgggtatacgtgagtgtggtcaggcaggagggcctgagtccttgactgcagctccctgcagagactgccatacatcatttgtgcaccaagtctggtgtggggagggcagcattccctgtgagttcttctaggcaaagcctttgtcattgcctatgatcacacatgaaaaatcacacataggattttggtaggagccagactcctcaagaccttcagtgggaaactgactcttcctggagggccagaactgagctggactatatcagggctaagcaggtatgtcagcaattaaagaatatttagtagggcctgtcatagatatagtaggtggtgaactcaaggccactattattaccaccataagaacattcagtttggtactagttgaggaagcatgacatgggactatagctctacagctgtcttcagatatgtgaaggaatgatcatgtgcttgtatgagttatgcaatatgtatttgttgatgagtttagaagatcgaaagggcgtttagtgtggattcaaattatagaattacgcataggcccttgtttccctacctcttttctttaaatgcctctactgcttctactcctctgcctggcacattacatcccctcaccgccaaatctctgcttgtccttcaaaacccaacacagacgacatgtgattcccagggagtccatgtggcatagtggagtgagcatggggcaggaaaacctcaaccctgggatgtcaaatcctcagggagtcctgatacttcccgaaatatgtgaccagggcagatgctgctaattgattgcaaaattttccctttggagcctgacgcagctgcagatcccaaggcagctcatcagtaaactactaccaaccgattaagtagatacaaaggaaaaatcatattgccatggtgaccttcagcctttcattcttcctggtcagaagaaacctcccaacccccttgaattctttttaaaaatgggttttcattaattattgagtagatagaaattatttatgatgtgtaaggaagatgtaaaaaatcacacgatctcaaacacttgtatatgcactatccagtttaaacaaaagaacgtgaatgttgcctttgaagtctcctgtttcctgtcccaattctatcctcttctttctctcctgttagaggtatccagtctcctaaatttgaggtggtcttagcccatttaggctactataacaaaatatcataaactgaccagcttatgaacagtagaaatttatttacttctcacagttttagaggctgagaagtccatgatcaaggtaccagcagattaagtgtctggtgaatgcctgcttcctcattcacagatggtatttttcagggtgtcctcacatggtagatgggacaaggaaactggggcctctttgataaaggcactaatgccagtcatgaaggctgagccccatctccaaatgccttgccttcaaataccatcaccttagggtttatgttctgtcttatttcttcaattagactacaagctccataagggactcagagtgtcctagatatttgtgttctcagagagccaggcattacagattgaacctggtcattgcacaagaatatttattgaatgaaataattaaagagggtcaattttgcattatcctttcccccacaccccacatttagacacattccctcagtggttaactgaacacctgccaggaatgttgcaagaggaattcctacattgggaaggatcttgtactacataagtttcttccaactccaacatttctcaatctctgggaaaatctctgacctatccagaaaagttccctttagtatacagagggaactgcctttaagtcttgaccaaccagcttccctggatcccttggttctttgctttaaaaaacccaactttattgtgaaatataacatatatgcagacaagtgcataaaacataaatgtacactataatgaatgattacgtagcaaccaagtaaattttaaaataacctctattgtgatgccaggttgaagttcagccctttagaaattcagccccttgatatgatctagaaagggttggaaaactattacctgtgtgctaaatatggcccacttcctggttttgtaaataaaactttattggaacgtaaccatgctcatttgttttcatattgtctatggctactttcatgctacaatggcagagttgagtagttgcatcagaggtcaaatgacctgcaaaggaaatatttactgtctggcctttttatataaaaagtttgccaagtcctcttatgtaaaaatttgccaactcctgttctaaagtctgtcttgaaaaaaatataaccgtctgtgcatcctatgtggttttaccctctcagtaaaacaagtctagtgaatctctggttgagaaaaggaagttaaataattataacattcaaaaatattaaactctatggtctattttaatgaaatcttaagaatagccagaaactaaacccaaagcaaattatctctaaatcttgacctccttaagggtctgctgaattgcatcaacaacattttatagctagaagactggagcaacccaatatttttttaggtcatggggtgtaactaattgaatagaaaaagagatcaacatcttgagattatatccctggagaaggcaacacctgaaacagattgagttttttgattaacttattccttagtgagtagaggttaaacatccaagtagatgaaaagacctagaaggaaatagagtagagcacacatcattctttagttgacatttggaaagtgcatttgcacagttacccttcccccacaacatatgcgaatgcacttgcacacacgtgaacacacacagacacaagaaatgatgcttagtcaaagacaaacaaaaacgagatggccactgtccacgtgttttctactatgaacacagaaacttttggctttaattctttcctataatcatcagtcactttccctatagcaaaaccgattttgtttccttggacaatcttgtaaatgaatatgaaaagtaggaaataacttaactgcctacaggggaaatgcatttgaagacaaatgattgtataaagttcattttttaagaatcaagtgtaatttcttatgcaaactgtatttcagtctaaagatctctaatgctcataaggaagtaccttttgttgtacttctttgaggcaaagagagaattgtaatctgagaaagagatacaccattcaaagcctgattacactgcctccttaaatcttctctccccaactgaaaaataattatatataaaaacatcttgcttttcaaatttgcatttaaagaacgcttgtttggggctgtccgagtgaaaaactgagcacactaaaatagcagtctttcaaacatacagaaaattattttttcatccccaaaggaggttgctagaagtgtacctccttgaaaatacgttcgttaaaaatgacatatagagcatagactcacagagtttgatatcagaaggagaccatagacccaaactgagaccctctcgtctaagagaaaaccaatccatggttgtgaatgcatatttctttttttattagttgctttgcattctttattaaagcagaatataaacgatacctgatagtgggacaagtggttggggaacagtgttatcaaacagatctgggctggattcctacatctacgctttataattgtgtgaccttgggaatatgtctgtctctcagaatctcaagtatctcacttgaataatgaaaacgatatggatctttaccattatgttgtttgaagtattaaatgaaataatacctataaaaagtcttaacgtgtagcctggaatgtagtaaaaggatgagaaataagagcacagcattcatgtgcttattagcagccactccaaggctagaagtgatgccactaacacctagtccagattttttcttcctattacgattatgagttcttagagataagagctttttatttgtatgtttgttttttaagaaaaaaaaaacctagtggctttcccccagctgttgtgtttttaagtacctatgatttcttttttttaatttgcagtctgtactaatgtgtactgcggccactgatttttcttaccagttgatgaatataggcagcactgagaaaaaaagctaacaggctgaatgatgataatagttaatacttagtgagtgcttactatatgccaagcactgttcattcatgaatttgtttctttaatcctcagaaaaccctataaggtagcagtgttattatccccgctacacaggaggggaaatggaagcactgagaggtaaagtaacctgtccagttttcatagccaggaatgaggagacccaggagtccaggccaggcagtctggcttcacgcttgctctgggcttgtcctatgtcctggatgcccaggttccccagcctgatctgggcagtgactggattgcttgctggagccgaggctctcagaaccacctcgcgagggctctttgtagctctccagaccgaccccagagcttggataagttaatggtttggttcataaccaccccagggattcagcatcagaaatgacccaggaccccacctgcctaagatgagagggttgcatttcagtttactcttgtttctagacctttcattgggggatacaggggcaagggctctagtataattgctagaatctgttgagatctcttttgtggaccattgtttgagcaagagtaacttttaatgtgaaggggctgcttgaatttgccataaaaataatggtagcctttaagagctagtctaaggattaattgacttaagatttttcttgtttaaatctccttcacctttagggcccacctgctggtcacttgaccttttgccttaatttattttgtaaatactaagccaacaagaggaaaagtgaataccttttacaaagacttccttctcttttgcattgggagtaatttttccttgtagattaactttggatgactggctggggatgagaggatgatgtgcaagagtgacagaatatgaggaaatatgcaggtagtggtatttacagtgactctttagggacattgcttaccaaatgtcatttagttggcacaatgggtattcagtccagttttagagttataaggcaccctgaagacaatttagtcttcatttttacagctaaggaagatgaagaaaagcaatttagtgacagagccaggactagaaaccagatatcctgattttttttttttttttttgagacagagtctcactttgtcacccaggctggagtgcagtggcgtgatctcgactcactgcaacctcagcctcctgggttcaagcaattcttgtgcctcagcctcccaagtagctgggattacaggtatacaccaccaagtccagctaatttttgtatctttttttttttttttttttttttttttttagtagagatggggttttgccatgtgggccgggctggtctcgagctccggacctcaggtgatctgcctgccttggcctcccaaagtgctgggattacaggcatgagccaccatgcccagcccacgtatcctgatttctatgccttttcattttttatactgtttgctgcttgggtagagtaaaaagccatgagaaggaggcagcccttagaaactccccttggctgggagacacagcccgaagattcagtttgcctaagcttgggttcttttatagattccattagttaaaaccctttttctaagttttatatgggaaaaggaaaaagttgtatataaaatatggcaataaatagtgccattattttgtaatattattgcttggaattcagatttataaatttaatcttcatctttccactctcacaaaataaattttagcatttataaagactattttacaaccttttactcatattaatattttctattcaacaattgtgatttgctgtcttaatattcactttgttcaggaatgttcttacttatcatcacattgtgagagtctctcacaagctaaatggtcttggtactttcttgtctttagaagataatgcttacaattttttttttttttttttgtgacggagtctgtctctgtcacccaggctggagtgtagtggcgtgatctcggctcactgcaagctccgcctcccgggttcacaccattctcctgcctcagcctcccgagtagctgggactacaggcacccgccaccatgcccggctaattttttgcatttttagtagagatggggtttcaccgtattagccaggatggtctcgatctcctgacctcgtgatccgcctgcctcggcctcccaaagtgctgggattacaggtgtaagccactgcacccggccgataatgcttaaaatttttgaaacatcattttcctttctctttgccataggaagagtttcagtggacttaaataccttttgtgacaagtgggggtgaatgtatgcttgaattttttctgggatcttaaggttcttgaaggcaatgtgaggtagtaaggtagacaagtataatttaattaactatataaaaactaaatattatggcagcctagttccagaacatttagtgttgcattctgctaccaggaagatgcaaaacgcaagaatcctagtcagataaagtccagcaaagacacctcccataagcctcctttctggatctggtttagggctgtctcttgctgctggaggttgtatggggtggtagaaagaacactagacagaagatccaaagatctgggttcctgggatctccacctgtgctttgggacagttaatgttacctctcttgcccaaagttctctcatttgtaaattcgggttacggcttagaccagtggttgtcagcacagctatgtatcctaatcagttggagatttcccaatatttcatcacaaagttttaaaacgcacagaaatgttgagagaattttgcagtgaacacccgccacgtagattctaccattagcatcgtattaaagttatttttatcacataccaatttatatatccattagttgggaagcttcactaacacactcatatctgttgtagaatatatacctttggggtattaggcagggtgaagaagggagatttctctttctcctttatatacttgtgtttgagatttttgtttaacagtgagcatgtattactactactatgaccaaaagaaaaaaaaaacaaaaaacaaaaaaacagaaaaacccataacaaaacaaatacacatatgcatatattcctgggccaccaacccccagagagtgtgatgcagtagatctgaggtggggcttagtattttttgaagtgtagccaggattgagaacacaggactatgcctctctgaagtgccactggggtttcatagtcacagagtttatgaaatctctttagtgacaacctgaagctcccctctgtagtagattgattccagcttcttctagtttgattccagattcttcctggttcatactgggcattcagccgaatgctgctattggcataacaatgagcttgcagccagcaaaggaactgtgtaggtggagacaacctcagaagcatgagatgcagctttgcttcttggcaatttcttttttattcttattgattctaccatggcagctgtttcagacctctattattgagcccttaaaaccacctcttttatctctttataaataatctgtttgcctcaattgacaccattgccagccactgttgtaggtggctccccagtcacactgtgtggctctctccaggagaaccttctctacccctcatatgtaggttggtatgccagactccccaaacatgctagcctttcctcctttaaagtatttttctcagacatgtagttgccattgcttgtctgttctgtcatctccaccatgctgtcccattcatctttgtacccccagttggtggcacatagtaggtgcttgccatgtaggctgtagatattgtccctttatatcagtgatcaatgtcattgcgaattgtttggtatccttgatagggctttcatgctccaaaaatactttgtatttcccagccattaaaaaattaatatttatttcattaatgttacaaattcaaaaacctagtttttcttaaagcttttaacttacaaactttattttccaattttcaatttgttttttttaagacagggtattaccctgtcatccaggctggagtgcagtgacacaatcatagctcactgcagcctcgaaatcctggactaatgcaatcctcttgccttagcctcccccgagtagcagaagcatgataccacgcctagctaattttaaaatttcttagacagatgaggtctcactaatgcaggaaaacccccaaattgaggcttagctcaggaggtttcttagcttcactcaggaaagaattcaagagcaagctgacagtgaaagaaagcaagtttattagagcaacggggtgcagcaaaatggctgctccacagacagagcagggctatctcatagacagagtagcagccaatagcactcgtggattgctggctagctgtatttatacctacttttaatcatatgctaattaagggacaggttcttcatgaactttctggtctgggaaaggattaggtagctcccagaactgtataaggtaacttctgggtcattgccttggcatttgtaaactgtcatggcactggtgggaatgtcttaaatacattataattagtgtataatgagcaatgagggcaactagaggttgcctttgttgccatcctggttttggcccatttctttgctacatcctgttttgatcaatagagtcctgactgagggtcggaacacaagtactgctgatctcctacctcatccctatgttgcccaggctggtcttgaactcctggcttcaagcaatcctctcaccttggcctcccaaaacgctgggattacaggtgtgagcctctgtgcccagccgcaatttaaaatttttaggtgttaatagtcacaaggaatctgttggtcattgtttggcttcatttatttaataaaattatcctaattattttaaggcattaataattttaatattctgtcttttaaacttcatttgcctgcctagcaaacaaaatctaattctcataaatctagtaaattaaatatatgaacacagtgaaacttagattctcttaaacattccgattttgtaacaaatttagcaaaattctgtcatagcttttaacttgaactcacaagtctcagctactcaatcactcaatttacattagtcacaatgctcatttattagatactctaatgtgccaaactctcttaaatattataaacacttttaatatcagacattaaaatattgataagaaagattttatttataacagtattggagcgctccctggctcagtagacatttactcactgcagtgggagcatttccactatcaaccacagagctgttttgctggttcttgaggttagaggcttcaggtatccaggcagatttttcttacaactacaagcaatgcatagacccctcttccttacatgctgtatcagtgaggtttccatatatgcctgtgcccatagaatggtcttatagtccccctgctttggattctggttataccttgtctagtctgatttaagtctgtaatcatccacccagcttgcttccctactagattggatttaattaatctatttactgcttgattgtattctgtttctgttttttggccacaacatttaaataatgtcttactgtattgcgtatttctatagctctggagaaatggcctttagttctaatgacagttaataactgttttgctacatagggctcctttcattatcccctgccatggatgcatgttttgaagactaataaaaaagacagcatttaattaatgatgtttaatttgtgatcactttcttctggttaaccaaagacaaattcaactgtctatcagagcttcttatcagcatgagataatcagtactacaaatgggttgatataattccagtcaaaaggaaataactggtttctgtttgtgtgcagcttgatcagaggcaaatacataatttttgtgagtctcattggcaatctggaaactgttcatcagcttttcatcacttcctttgtggacatcagattcagaaccacaacttaatcttatcattagtctgtcttctctcctttctcaaaagctgggtcatcccttctcagtatctcctggggacctttcttattcattgcctttacttcctacatctctgatctccactcttcactatttctgtgacccatatgcatctcacatctttccgatgttaaagaaactcatgcctgactttgtttctccctcttacaatcatctaatctctatccttccaatgaccatacaagtttttgaatgtggcccatagaaagaacctattctttctctccttacgttttacttctgtacttccttcctacttggccctatctaaggtcacctgattatggttaaaaaccatggattcctcttggcatttcctagtctgctctcattattttgggtctacttatttggcttctgcatcattgcatttatctgcctctcttctttcccctctgccagtccttagtcactttctctaccttctttttttcatggaggcataatgaagagcataggttttagagtcaggcagacatagggttgaatctctgctttttcgtcaccagttgtgtgaccttgggcaatgctgaactttgcccagcttcagtttccttatctggaacatggggataataataccttacttgtaagttgctgtaaggattaaaagaacaatcagtgtgtagatatggtaactgatattttatagacttccttccctttgtagtttgtaatactaagggtattatccaaagtgtactgaggctttctctttcccacgaagcagtcagctttcattctgtatattaactccaaaatttgtatcaagctcacatatttcccaacttccagacacatatttctaccaggtgctaattttcttcacttggatgcttcattaatccaaaactcaacataattcaagcaatactcagcctgtgattactttcattgttaacagaatctgaatcctcacagtggctccgaggttggaggcttcttcctcccttccttccttccttctctcttctatctacccaacaactgtgtcttgagcactctgttatgggccatccagtgtgctttgcacctacggtacaatgaggagtatgacaaaggcgatctgattgaggaagtgtggtgggtgctgatggtaggaggacagactgcagtgggggcacttcagaggatccccagcagagttgggatgaggtaatggccaagtttacatttcttctcctattcctacccaccccattttcaatagatcttactttcaatttatgaaatatcttgtttccatccttctttttcattcctaccataactatttcattcaatccaagtattccaggtacctcgttttggctggacattcgtaagaccttcccaaatctgtctctagtcaatccatctcctttccaatttgttttctaagaagttgtcaagatcacttcctgaagcacaaatctgatcatttatttcccttgttaaaaatccttatcggttataccagtcaggattcagtataggaaagagaaggcactctaagtatttaatcaggaaaggatttaatgtggggtgtaggtttataaaatctaagggtggctagatgagcaggcacaagaaccatgtgccaaggatctgcaagtctagaggtcaggaatttgcagctttatctgctgttcttggatcgggaaggcaatgatattactagcccacaactgcgtttcttcacttcagaatggtgatgtaccctgggtgttgctgcagaaaaacctcacatctctgtgatcttacttgtcaaagtagaaaactgtccataaagatcaggaagatggtctccctctcatttccaccttccaaatctcagataagggcaactaattagtgggacctaacctaatttgtggaggccatggagtgtagtgtggaagaacacactccatggctccatctagccaggctgtctgctgcctacggcaagtgcaatctaatgttcaaagccgtgtgtggtttttcactgttgtattttgcttaaccccttgtcttccgccatctgtttctgtcactagcagttgctaaacagatacttgttgaatgcattaatgaacgaaggaatccactcctgacccaattctctcttaccttctggccataatgttagtaggaatgcccttcctggcctgtaccaacttcttctacctgccagaatcctcctactctttctctaagtcccaaccaaatcttccctcttgtagggatcttctaactacacccagaacaccccttgtccccttttggaacacagcgactgtttccttcattgatatggtactcttcctctacccttaccttggggtttattcagtatttccttctccttttctccaggcaaagcaactgcagttctcttctaaggatattcattttcctctctcttattgttgtaattgcagttgagagtcaataatttacagatgtagttaaatcttttgtagctgattctctcgtttttactcttgcgtagaaccccacatgcagtttttctcctctgctaacatagttcctgttttagccctagacagaaatacaaaataaatctaaaatgggaggatcctccaaaggaaaaaggaagaattcttgtttataggtttctttttactttttcagtggaattcacgatatgttcccagtgttctggtttgttaggccttgaccagggtaagtgtattacaagaatattccattcccctaacattcatgtttggattcagtgctgtaaaagcagggctatgccgtttgtctgtgtgcttgccccagtggattccttagaacttgactttgttttatgtggggtgtagggaatcctctcactattttttttttcatcttttctttcttcttctattctctctctctctttctctttttaaacaaagccctttgttttctagaggtatctacttcgtaagacaacttaaattagtaaaaaggctacctagtcttcagggaaattcagttttgttgtatttaaatagactttattttctaggtttacagcatagttgagatgaatgtacagagatttcccacacaccctctgcctcccacatatgcatagctcccccaactaccaacatcccccacaaggttagtatatttgttacaaccaatgaacttacatggacacattattatcacccaaagtccatagtttaccttagggctcactcttggtatggtatattctatgggtttggacaaatttataaagacatgcatccaccatcatggtttcatgcagagtagtttcactgccctaaaaatctcctgtgctctgcctgttcatccctccttcctccttccaccttggcaaccattgatatttttactgttttcctagttttgccttttctagactgtcatagagttggaattatatcatatgtagccttctcagattggcttcttacacttagtaatatgcatttaagattccctcatgttcttcatagcttgatagctcattttattttagtgctgaataatattccattgtctggatataccacagttttatttttcattcctctacagaaggacatcttggttgcttccaagttttggcaattatgaataaagcagctatagacattcatgtgcaggtttttacgtggacataagttttcagctcgtttgggaagataccaaggagtatgattgctggatcgtaaggtaagagtatgtttagttttgtaagaaactgctagtatcttccaaagtggctgtaccattttgcattccttccagcaatgcagatttaggaggttcaaaggacttcttaaaaatttataaaaggaaaaattcatccctataaaggtgtagaatgttcagtggatggcctagttttattttaccaaaatatgagcatgtcacagtcctttaaaatgctcattctgctttctcctctcagctcaagtaatagaacttgaaattggttgcagagaaatgaggggaaattctatagcaatggcacactagctaatcactcctgtagcactgatattagagttcattcttaattttctgcttatggatcagcaacactgaaggaatggggaaagcaagctgggtccctgcaattgcctaagtgggctttcttgcttgcttgaatttaacccgaccaaggggagtgtagttctttaggcgctgatggttattgcagttatgagcagaggcatttaatttattccacttctttggatgcactatagctaacttcctgtgaggtaggaaaaggtgggggggaattaaataatcctcaagctggtgtgaagggtcccttgtaagccccagtcttgccctacttcttcaagccacacctgttcttggaatggtacctctgcattggggcagggcactgggccaccaaggaacatcagcagcccattgggatagccccagtctctacactgaaattttgtgctcaggaagacagggtttttttccctccaaatttgaatgctggtgaaatctctccatcaagccccttctgcctggaagaatcaatacctatttctctgccaggcaattccaactagaaagtgtgtttggaatgctttactatccccaaggtgcctcaattacttgggttagcattaaaagccaaggatttcagaggatgaatctttgtgggataaattaatgcctgtggtgttttataatctcaaggagaaggagatgttttagatttaaattttaataaatgagctaattagaaatcagttcagagggatttttaaaattctttgtactgaagaattttttctttttagccaatcatactctaaataattctacagatatacactgaggatccatatgtaccaggcatcacaataagctgagaggttagaaagataggtaaaaacactctcccatccctgaggaaacatatagtctagtaagagagccagacacacagagacatccagtctttttataatcacgtatttgagtgtctccagagagagtttatctcttgggatacaaagatgaataaaactcagggtggggacttctctgaaggaaacacatagtaagacagttatgctactgtgtgatcggtgccaaaacttggagatgggttactccattggggacatgcagatggactgtcaaggaatgctttaaagaggagaaagatgcttgggtggtccttggagaataaataaggattcacaggaggagggcagggaaaagaaagtccaagcattggaaaaagcctgtgccaggaccctgaagttttcaacagcttggtgagttttgcaactctgagtatgaggatgtaagtgaatgagaggatgcaagtggggaatgatggcaagaagaaaggtaggagagcagtcatggggcttgtgacaggtctcatcctgcacacagtaagacgcagaggagagttttctgttggagaaggcacgatggcatcttcatttaaaaatcctcggggttggccagagtgaggctcaaggcagggaggctgcttctgagactatgatattcgctctggggaaaattaatagctagactggggcaatgacagcacagtgaggatagaaagaagaaagaaatgttcaggaggtgatatggacaaatgggttaaagtgaggatggcactgagatttctagctgccctgtaatgtggccaaaacagtcatccatataggattttgataaatgtcattttctttgggccacagagtagatagcgatgcatttacatggaaaaatggaaagtcagaggaagtgcaagcttggaggaaaaaaagcttggatttggtattgggtctagggcatttattcctttaaaaaacaaagctagctgtttcctgctgatgacaaatacattcatatgcctatttggtagatggacatgctgttgctaattgaaaatgctctaattgaaatgaccgttagaaaataaccttcatactttatccctgattgccatggttatttatttattaggcctcctctaaggctaggccaatgagaaaagagggatgatgtggtcaggcttgggaggattttgtgtatctcacctttgagacagctccctgggaggaaagaaaagttgcctagatttctgggctccctgaagtcatttgtgctagttgataattcagggatcaagtcttcccaggatagacttggaccagatcgattttaacataaaataagagaagaaaaatgtgaaatgggatctattgaacttcctgacttattaaataaatgtaatttaacgtttttactcagtaccttagttccagttatagaggtgaggatcagcttgccattcttggtcattcctgtttctgtagggtgcaagagttggcatattatttgtaggttttcctgtcactggatagcattttaatctttgttaatgggtgttacacgttattatgtatctatataaacttgaacgttgttatactaccctgagctccatactaagtgatctccttgatttcattcctactcaagagtcagagatagctggaattttgtacagatgtagagaacatgggaacagttgcataaacattggtcacgctgtaaatattcaagaaatccatcttgagtgtatattgagtgtgtattatgttctggacactttttaggccctgagggctcagtgaggagcacagaagaaacagtccttgcctgagtggagcgtacatgatagtgtagaggatagacattaaacaagcaatcaaatacagtggttacagatagagataaatgtaatgagaaaaaaaaaaagagtaacgagctggaaaatgattgaggtggggagtcagggaagcgtttctgataagaagccattccaggatctaaggaaaaggggttccaagcaaaagaaacagatatgcagaccctgggatgggaatgatcttggtgagttcaagaaacaggaggacagtgattagggcttgtagatgtgatagagctggggagaaatggctaccttcttcccaccactcatggaatgcttattagaggctcaaaaatataatggatgtatgcataccatatataaatatatataccccatctcatgctacatagtcaggcattgttattctcatttcctagatgagggaactgggtctcagagaccaggtctacatagttaggaagtcacagagtgaggcagagtcaaggccttcccactccactctttccacctcatcctaactgcagaccagcaggactgaagcaaggcacttggaatgacataagtgctgagtcactggcctcctaggctgcttgcatggaatacctatcttaacaaaatttgcaatggcttttttggtatattagcaacaataacaattataaagcaatgatgacaacggtgacaatagctatgcctactaccatatgcttttatagtttgtaaagttctttatcatacagcacctcatttgtagctcagaaaagttctcaaagataagcgggacaagttttatgcttctcatttaggttaagagattgcctgaggtgacacagcgcactgagctgggacatggctgttgtgattctaattcagtgctctttacttaaaccatagaaactcctggttgaaggaggagatatatatggttcataagcttgtaggcatgaattcctggaaaacaagtttgtcctttcttcaaagtgctttggactgtaaggaagaggcatgaaagatggattcattctttgtgtacttattgagctcctgttgtgtgtcagacactggaaataacaaagggtcccacttaaataggttaaaaggtactaatttagcacagtgttatctgctatttgtatttgataaaaagacgagaaaaaacactgcggaaacacagaggaagaagcgattaagtaagtcattttggggaatttgaggatggcctcaccgtgaagatggcattgaactgggccttgaaggatgattgatagtggtggggagggattctccagggagagaagcaggaaggctattctaggaaaaaaggattatggcaatagaagaatacactctctgtggggaatagcaacaggtgtaaccagggcatgagataatataggaagtaatggtgggaaattatgctggaaatgtagactgaagtcaggttgcagagggctttgaatgtcaggtgcagaagtgggtgtatttggcctgatcatcccagacctgttacaaggggatggcatgattatatttgttgtattttagaaagaaaattctaatggctaaggtaggtcagattggaaccaaggagagtttagaaaccattataatagtttaaaagaaagaattggttgcagcccctaattctgtgttgagaagaagtttagaggtaacattggtaagacttaagtactgattggatgtggagacactccagttagattttaaatgcacacgctaattttctaacattggtgcacacacacatacttcttattttggcttcaccagactcagcctaattctccctgactatttaagtcagccactgatttatttttctatcttcagaaaaaaaaaaagaaaaaattataggtctgtgatcttatggattctttctgtatgatttgattttgatgatcccataggattcttcaggctaaggaatgctgactgtgcaaacaaatttttgaagacttggatgctctcattatatttatgtgctgcagatacctactatttggaatggttgttgctatttgcaaacccgcctactaagcactttggggaaattattagcagccattgacctctgatagggaaacattagcagttcaacctatcctctctccatttcaggtctcctgctgaatgctgaaggataattaggattttagaatttagtgagggaccatactttaatgtgtatgtcagtcccatacttttctagaatattctttccctctatagtattattctagtaagtaaggactattcctcttggccttaaaatgtaattcaaggctgggtgtggtggttcatgcctgtaatcctagcactttgggaggctgaggcaggcggattgcctgagctcaggagttcgagactagcctgggcaacacggtgaaaccctgtctctactacaatacagaaaattagccgggtgtggtggcatgcagctgtggtcccattgggtatggtggcatgcacctgtggtcccagttacttgggaggctgaggcaggagaattgcttaaacccgggaggcagaggttgcagtgagccgagatcgcaccactgcactccaggctggatggcagagcgagactctgtctccaaaaaacaacaacaacaacaaaaatggtaattatagggtcagagttgagaaacaaaaatcaacaaatacaaatcattttctctttaatttataagcattaggaattcattttttgttgcataaaagatttacatttaatctctgaggtaaaagaagtttcggcttcaacttggacttgtgtcattcccacctcatccaaattcatgtaacatggtgggaagggtcctctattgtctcatacatttagtctaaaagcattcttgggggaccccctcctatgttcaaatcagtgtctccatataaaaggaagctctgaggctgttccagttgttcctacattgtctttgccacttgggtgagcgttttcagcctccctgagccccaggtgccccagtgtacataatacttacactatgggtgctgcaaaggcctggaaagataggtggagccattggagtcaactctggcacatggtggggtttagttattttagacactggctttcagaagttagatggaagagacacagacttttccatatgcagattataacttagttttcaaaaccattaattggcagaaagttatttaaaagtcccaattctcatacctccattaaaatattctgatgtcaaaaatggaattatgtggccgcctaccctctcggtggtctggaaaatagtcatattttcactttttctccttaggctagttacagaacacagaacccacttcccatgaactgtgtctaccctggtgttgaaagactgagcttgaagaatacttgtcttttagcctttagaaagctctgtcaacaagcttctgtgaaacaaagttcctgaaaaagctatcttatttctttttaaataagtggcagatacaggtacataattcagtttatcttgtagtcaggaaaaaggcattaaatcgtgctgttgtagaattttagccacattcttttggccattcaaatggccatcgatccaacaaatactgattgagaacctattatatgttaagtactacaccagttcaacaccagtgaacaagacacaatcgctgatatcatcccaagtttaattgacttgtataaacaatctgtacattacaaaaattaatgttgttgctatctgaaatgggaggcattttctgtcatttttttagtagagaggaataaagagaccgaactttaaaaattaatggcgtttgagttaataactggaatacctatttttattgatcaattgtcatatagatgtgcagttacttaatccactagataatttgtatttctgcagtattttccatttcatgcatcattataatgctgtgtattcaaggtatgaacccgtttcatcaacagtattaatctcaattcatttaggagctttaaataatattcccttattaagtatattcttgatatgctgcccatgcttttacagtgtcagaagccgttaatgcagataaaaacaaacattcagttaaagaaccttctcatatattaattcgatttcagaaattatttgtgcatttatatttcctgaatggcttcggttatgacaaacatctaactaggctaattcagagctttgaggctaaagtccagcctcatggattggtttaatctgaagaacattaaaatagtagaacattttctgtcttggcaagaatcatagtgttgaaatttcaagaagaagatttaaatttgtccatgagactgtaaacttcttgaaggcaaggactcatctctgtagccctgatgcataattgatgttcttcaaatgtttgctgatttgagttgaactgaggagaataacaaaacagcatttgagaatcaaagtctcccaggttttccttatataatttacaaggacttccctggcaaactatcctttcttcttcgtttaaaaaatttcactttattatgttcatctttgatgtggaacattttttatggccttctgctgtgactcattttggtgctgagttatctgcttccttggagctcagcccttccttttaagctgtggtattcaggctccccaaagtcagcttgcctacgggtagagatcacagcaaaatgtgcaaatggtattccaacttctaggtaaaaacagacaactaaaattaaaaactctacatcatgtaagtcacctggaaaaaaaaaacagaaaacaaaacccgagggcatttgtatattcctgttaactcttgactgactaaagggagttatcttttctgcagtgataaaaaggtggcccaagacaatctccccatcttacaaaaagttctgaagttttactgtggagtccaattaaactggcatttaacttcagaaactacatccctatataatgtaatcatcacaaccaaatacaaattaattaatatatatggacaaagtttataagttcaatattagaataggggaaaagggaagtaggaaaagtttagagtcctccacgcatccttcatttatcaccaagagatttgctcctttgctccttctgttagtgtaagtcagaatttctcaattttcagtgtgtttatgaattgttattattgtttatcccaaacacatattttgtcttataggtgatttaagagctctaaaagggacatgttaactatcttcagaagctcacctctaacaatatttctatacctatattatacaagaaaactaatgaagattgacagtcaaattcctggagagacctttgacccttctctgtcttaaatttttcacttctgaaatagaaagccgggtcactggtcatcttatcctgcactttgggcataaagaagcttaggtccaaagcgccattactgtactcatgatgaccccttgaaggcacatcagtagggctgtctggactgtgacatgccatcagacatcatttaggggacttcaagtctggcttcttgcagagatgctgtgggatgcctcaaaaacttcctgcatggctagtgtaactatggggctttagatctttgttaaatacaagcaaacattaacagcagcagtggagaggataagttgccaatcctcccaaatttcttttccaggcagggggttgtcctgccgctctcagaactggctgtcatctgctgctctcttgtcacactgacacggccccctggctgggctgattggtcgctggcaataactgatatggaatactgatgttctctccggcagttccttccactctaaagagactccttttcatccctcttctcgcctttcctagcccagcctagtgcccaccctcccccgaccatgcctcccctgcacctggggagggggaggaccagtcctgggcgtgatgctctgagacggtggtgaaatccaccaggctgctttcactccggctcgctctccggagagtcctgttccagacttctcagggtttttacagcacaaacaactgcatacggcccgaggggaggctgaaaaggacttgtgtgtggtggttttattgcctgtcatcactttgctggcctcctcccgactggagcctggaggttcacagtggatttctttctgccgaagacaccaaggcactgaggaaggatcccttctccttctgttgactctttctatttttatggtaagtgcttacgttgaatgagctgctctgttgctgcagtgaactgaaccgttcgttccccctcttcccagctaagcttagtgaccttccttctgcatttcctctgttttcatggatcttgtctgggatgatccagcttcaaaaatgccaggggtcatttgcctggagtgtttgtctttttatcttttttccataaacgtgagctcttctgctgtgatacgaatataagtgctctgtctttgtccttgaagcagcagccggggaaatgtgttcacgatggtaaactgcagcagcgtgcagggaatctgtggaggatgactgacaaatttgggcaggatgaatcctcagtgtgccaggggcactcactcaggatcagaagggccgggggtgacctgcccacatagcaaactcttccatctttgtggataaagatgagcacacacgtgtgagttatgttgagtctgctgtgggcagctgtgttttctgcacctgcccgtgtgggtctgggatgaccctatatcttgtggggtttacaacttgggcaggaacattctcagcaggaggaatcctgagctggcagacggagtagactgcatgacctcattgcttctttcccttctgagtctcagggtacccagttctgcaaaccatattttacaggctcttcagagagtggtagggcagtgatgacaggaacatttttgagttgacaacatagttttgtcctcctgctaggagataaaatactttgaggttattagaatggttagacttttctaggagaacataagcaggtttctgacgaagactatggatgtggcagattgtttattccagggacattactcttacaatagtgctctaatttttcacctggtctcctgaggtttgctgcaaagagcatcacaacttcaagtctattactggcagcttcttgacgcccaaaggaaaccaagaacattttattagtttcactcctgtgcgttgcaggagtctctcttaacagggattttttttttttttttttggtagcaggtgtgtcgaactattttggtcaaagcatcattccaaagaatagcttcgcagttgtaattctatttagttattttcaagtcttggaccggaggtgggttatcttatttgtgtaggtttttccattctggtccatttcactctagagagggttcttgccaaatgtaattcagtctctgattcataaggtactgaactaatacaatgtgattttttgtgataagtgaggggagagaatgtggggtgaaatttccagtctctcctcctgctctttgggagtttggaatgtaaagttccctaactgcttgctcattttcactacttttatgtcccctgttcatgtggatttttcttgaaatagtggtgatgacatcagacatatgcctttaccttcttctctgggtccaaagtagatgcgtttgttgttgttctgtttttgtttgttttttatttcagtgaagggttccttgcatttgtaaaagcatacgtttaaataaaaaacaagaatttgtagatgtttacatgttagccctgttcaagagtaaaaccagcacagaggttaacagcaaaaaaaaaaaaaattcaaaacaatttttaaaatattatcagcattgcttggcttagctgttctaatatccactcttccctacactcgattgtggttcgcggcaatactgtattgtaatttgactgtcagactgctctgcttcctctttaattctttaatgtttagctgtttactttcatccttaatggtgtgttcttactttgcttaatctttttttctctttttctaattgaaaggatgttatatagtgcctggtaactcaactgaggatactcattaagatggaaagtgttagaatcagcttgggtgtcatggaaatagactcagtatttctcactgcaggcaatttcagaatcatttagaacatatttcattttaattagtagcaactttagccttgagaaaaaacattatttaggtttcctttattttgctaaacagattgtgtacctatgcaatcagaattgtatatatatgtgcaattgtttatatatatgtgtgtgtatatatatatatatacacacatatacaagcgtgtacacaaatgtactgttgtttgtactgtgtcaattgtatatacttaaaaaattgttgtagcatgcccatttggagaacagaaggaaaattcctcagatattgctttaactggcttttttttttttttggtaaggatttccccacttcctagaccccacttccagataatgcctttaagaatttctttgaattgggagagtgcatttttcagcatttccttgtctcacagcatggtgtcatgttaattcctttgcagggtctctgaaagcagcatagaaaactactgcaggaaaaattgataaaagctgtgctgagcggagcctgtagcctcttggtgtgatgaagtcactgcaacattttgtgtgtatttattttgctgctatgccttgcaactgattttgcttgcagacttagcaaattgaagttatttaaaatgggtctggaaacacctagattggtgtagatgcagttgatgcagttattctttttttttttacactctttaattacaactatcatcaaaactgtgctttcactgtttcttttggtggtggtttaatttgaaacttgcagcttaaattataaaccaagtctcccttttaaagtcctcttgccttctgctttctctcttcttcacttttgccattttatatatgtgaacatgcctacatgtacacagacaaactcagacagtgaaaaatgtacaacaattaatgaagagatgattacagcttttcttttagtaaccaaactccaaatgttgaaaccataatcatgtaactgagggaagaaattgtttctgttagtataaatataacctcatacttctgcaggcattcttatcattgaaactgttttccatagttgattaccaggaccagaaatagaattgattttgcattttaattaatgacattctggatctgtctaggttggactgccctcaaaccttgatatgtttactgtctaaaaggtctttgtgttaagagggggagtttatgggtgttataaagtaaaatcatttgattatgtgatacagcttttctttggtaactgaatgaaccatatcattagaatgttggctgaatttttatgttgcttttcccaatattatttagccaatataatcccttttaccatctctttgagccccttttacagagtacaaagagttatgtgcgactcccacatgaggcttcttagagggaagactgttcttcagcagagattcagaactacttctagcaccagctctggtaatctacttggaaaggaacttgcaattcaattggcaactcaggcagattgtataaaataggagaaatgcttcatgagctgtgttgaatactgtatttttgatctgtgcctccctactaaattcatttaggactgtctttactagatcagttttgcagggaaaaaaacatgtcctcagtagcataataatctatccagactgtcataaatgtttatattgcaagttatacttcttaggagttggagggagatggcagaattttggaggagaaccaaatcacagccccaaaataatgcaagacgaaaggggaacattcttcctatgtttagcatttaattctccagtcaggctgtttgctcttaagtctgaagagcgaagaaatgtaaaaacacataatgacaggttttgtgggctttttctctaatagaaatctttaacccttaattaggcatctgctgactgaccttttggtgtgtgtgagccagcagccattcttatagaaagcagacataatgtaatacagtaggaattcagttacttacatctttcctgttggtcccccacaggggacctcctctgagtgtcagagagggagtgagtgtctggagaccatcagagaccacagccagtcacagagagatatcttcaagccccttggattccagttcagcccccaccactaactggctgtgtgactcaaattctgtatctgctacatgaagcttggaccagataatcccagaggactgtaacccagccattaaaaattgtgaagtattaattcacttctatttgctactagatgaacgattatttctaagacaattgacccatattagacattcctggagggagtaggctgtaacttcctttgaccctgcaaagcccccagaactgtgacagtgacgtgagcatcagtgttactcagaaaagtgtgatcatggtacccttcatgaacagggcgaatatgtatatgatgactatctgcttatcctggcacattttggaaagtctcttgtgattatcaaaaaggaccttggccaggggcggtggcccatgcctgtaaatcccagcactttggtaggccgaggtgggcagatcatgaggtcaagagatcgagaccatcctggccaacatggtgaaactccatcttacgaaaaatacaaaaattagctgggcatggtggggcgcgcctgtaatcccagctactcaggaggctgaggtaagagaatcacttgaacccaggaggcggaggttgcagtgagccgagattgcgccattgcactccagcctggcaacagagcaagactccgtctcaaaaaaaaccaaaaggaaccttaaagagcaatttacctaatcctctcattccacagaagttaaggaagtgatatgacttccccaaggctggagactcacatagcacctgggccggatgactttagtgtaaggtgcattcatttactcagaaccctgctccattcccagtgtggggccccttccatgatacacagctgacactgtgccattcattgttcacaaatctgctttgtggcatctgtctcactggtgtccattatttctgggttcatttcatgcagattacgtggctgtaccagtcagagtgagtcatatcaagcaaatgtttatggtaatttgtttatgcttgtgtggaaatgcatttttatgttgaaattctgcttttcctataaacatttaaagaattttacaaaaactatgcatagtttttcccctttgcttaaactatttaaatgatcattgatttctatgtagagggggtgatgtttgtgaattaattccttcaccattcactcatttacctgttacttactgagcacctattgtgtccaccctactgccaagcagcagagatctagtggtgagacagccagacacatccactcctcttgaggagttcagagtctacttatacttcatggagttggttgtcttttcattgtcagccagtgttctatttactgattcacaatttctcaaagaatctggttgaaaaatagtttgcttgggcagatttttttccctgtggttattccattgagaaattcttttcgtagaagggcacctttgctgtcgtggtgacatatatcttccaattttcgaagatattatttttagcttctgattttgtgacctgactgaacagaagagacaaattagctaaacttatttgcactattgttgtgattcatgaaatgacaattcgtgtctttgataaaacttacctgtttcctagaatcttaaactgacagcctggatagcacagtgtccatggaacaaatcacagattaaataccacactcctttgccttgcatatcaggcccataacagtgtacagcccttgcttccttgttctatgtctggttccgaagttccatggaatgctctaggagtaccaaaaccatttgcaatactcagaaatttacagtgctctcacttgcctcagtgcctttgcacatgctatttcctcttctctcttcagactaaactttcaaagcaaatttgatgtcatctcccttggaagtgttttgacacttgccatccttattgacttcttttgcccagagctgagctaggtatactatctctgttgttctgtatccctcaggaccttacagactgtttgtctacttgtctctctctctctctctctctctctctctctcaaacagactttttgtttcttgagggcagggactatatgttctgtacctcaaatcttggtttagtgactgctgtagagcagataaccaataatccttgaacaaacagatgggaatcaccatctaaaacctatggtgctgtcattggcagcttctgctctatgtggagagtttaatttttcaaaccaatgtgactatgaattatactgagaaggataaagagattggcagacatcctgatgtagttcattagaaattctattcaaaaccccaggaaatgtttctgctttcaaatgagtttcagcaaagtaaacaatgaaaatttattaagtgccttctataagcaaagcattgcattaagtaccaaggaatgaaagatttttttttttttttaaaagcacaattcctatcctccagaaagccacaaactagtgagggtttgtcccatgtgtcaatgactggtaatgaggctgactgctataaacagagactgtagtcagctgtatacttgcagataaggcagggggtagaaagggcattctagacagaggggctggcttgagaaggaacttaaagttatgatggtcgtgccagcaatcaggtgactttgatggagcaggggctggggggtggggtggagggaaggtggaaaatgcaaggaaagatgaggaacgttgtgtggggagatgggaatggtatcaggaactctaaatgctgtttattatttttgaaagttggaggatagttaatagggtctggaaaatgccaaatagaaatttgtttggaatctcttctcaggtttaattaaatcaaaagtctgtattctgcagggaaggagagcagttgcgcagtacataactgcataacacgtttttttctcacccatcccttttgcccttgagggtacactttgccattcaaagtcatcacaaggaagtgaagccgggaagtctaacttaaatcaatcagtttagacctgaagggagtttagcattgagatcactgaggtgcctgttaacaaactgtccagggtgtggaaaaccccctgggtctttggtgctgtatttctactgtaaaaatttagttatttttttatttgacaattaactttgtgctatttacaaggaatacagttgttttatgaaccagtgagatatgcatgtgtaagtttgtttcatgtaggtgaaaaagtggcttggaaaattctgtctgtgatagattcaattcatcatcaaaatatgatttctgcttgccttgtccctcctttctttttcctaaaagaatgagtgaacatattcttagggaatggtaagttggtaggttttctgcatctcataattagatctgaccagatgactctccaccttgaaattagtctaaaaagattgaagaatttggaggaagatctctagatatcttgaccagagcatgaaagcaaataaatattgcttgtggagtgagagatgatgtggtagaaaagaagctgcattcattcattcatttattcattcatttgctcactccacaagtacttaatcgagcacgtactatgtttcagcttcctgccttcatggagctaacattctggtcagagtgggagggggagacagaaaaacacattagcaaatacgaagcaagtcagatggtgatcagtgctatggagggaaaaaaaatgaagaatgctttggctgctattatcttcacatttggttctctttaaagttatttaacttatgcattatggttaggttattttcttctctccactcattgtttttagctgcctatttttatattcactttctgacaattctatgataaaccaccatcttgagggtttttttcctcctagataaaagcagcttttgaaataattggagtactgtgaacaaaagttataatgaagcatttacttctggaattgatttaaagaaaagtactacggacatcaaagcccattagtatttttctcaagactaaagttgtcagaatttagaggaacatgggatggaaatggatctgtccctcacttaactctgagaggagcagtttggggtgttctgagaggatgggagcttggagtatagggaactccaaccccgggagcagagaaatggtgggatcacccatgagcagagctcattcagagaagagacgggagtgaattagaaagtgaacatgcaaaaattgagcaaggaatttctctttgggaggaagggaggtagggaggataaaaccagtgagataaatgtcagtgaataaacaacatttacaagaacaaattctgcccaatatagaacatctgagtgagctggttagtggaaatggtgcctcgagataaaaaacaatatttagggatttcccaatattcccatcctatattttgtgggatctttaattcagcatcaatgttccattttactgcaagcaagcctttagtcaatactttctaccttgcttctaaaataattaggatttaaaggaaaatgtctcctagcggtggagtgcctgggctctggggcagacattgtacccatccttactctgccacttactcacctttggaccttgggcaagtgagctggtctccttgtgcatcattgtcctcaattataaaaatgagattaactaattacccctacctcagagttgttatgagtgataaatgaaatagtccatggagagcccttagcacagtgcctgcaagatgattgcattatctaacaattgttaacctgttattaccatgacttgtctctctggtgttagtggtttagagaagttctcacatgtatatatgtattttcccccttagcagagctttttttttttcttcttcaacttttaagttctgcggtaatgtgcaggatgtgcaggtttgttacataggtaaacgtgtgccagggtggtttgctgcccagatcaacccaccacctgggtattaagcccagcatccattagctattcttcctgatactttccctgcccacactgacaggccccagtgtgtgttgttccccacagtgtgtccatgttttctcatcattgagctcccacttataagtgagaacacatggtgtttggttttctgttcctgtgttagtttgctgaggataatggcttccagctccattcatgtccttgagaaggacatgatcttgttcctttttatggctgcatagcattccatggtatatatatacgacatttcctttagccagtctatctttgatgggcatttaggttggttccatgtctttgctattgtgaacagtgctgcagtgaacaaatgcatgcatgtatctttataataaaatgatttatatttctttgggtatatacccggtaatgggattggtgggtcaaatggtatttctggttctaggtctctgaggaattgctacagtgtcttctgcaatggctgaagtaatttacactcccaccaacaatgtaaaagcagtccattttctccacaactttgacagcatctgtcgtttcttgactttttagtaatcacccttctgactggcgtgagatggtatttcattgtggttttgatttgcatttatctaatgatcagcgatgctgagtttttttcatgtttattggccgcatgtatgtcttcttttgagaagtatctgttcatgtcctttgcccactttttaatggagtggtttgtttctttttcttgtaaatttgtttaagttccttgtagactctggagatcagacctttgtcagatggatagattgaaaaaattttctcccattctgtaggttgtctgtttgctctgatgatagtttattttgctcctcagaagttatttagtttaattagatcccatttgtccgtttttgctttcattacaattgctgttggcattttcatgtgaagtctttgcccatgcctgtgtcctgaatggtattgcctaggttttcttctagggtttttatagttgggttttgcatttaagtctttaacctatcttgagttaatttttgtataagatgtaaagaaggagtccattttctattttatgcatatggctagccagttctcccagcaccatttattaaataggacattctttccccattgctagtgtttgtcaggttttttcaaagatcaggtggttgtaggggtgtggtcttatttctgagttctctattctgttccattggtctgtgtgtctgtttttgtaccagtaccatgctgttttggttactgtagccttgtagtatagtttgaagtccggtagtgtgatgtctccagctttattctttttgcttaggattgtcttggctatttgggttcttttttggttccatatgaatttaaaaaatagttttttctaattttgtgaagaatgtcaatggtagtttaatggtaatagtattgaatccgtaaattactttgggcagtattgccattttcatgatactggttcttcctatccatgagcatgagcattgattatacctatccatttgtttgtgtcctctcttatttccttgagcagtggcttgtagttctccttgaagtggtccttcacttcccttgctagctctattcctaggtattttattctctttgtagcaatcactttcttcttcctgtttgtgattaatgattttagggtaaatctttttggagggatctcactttttttttattcagtctcttagatagttattataatttggaatttacttagattttaagtctgtatcatagaacctaaacagtggaattggaggaccatgtggccacaaggtccctgggaggaggacccactagtcacagtaagtgatgttgtggcaggaaaagagaagagtagagtggatgagaaaaggagcaacctaacagcaaatatgatcaatgttctttttctctgttgccattcgggaggatttagggatgaaggctccttaggtggtgtgtagtgtagacaggctacagcttgcagtttcctggagggaatagccaggagagtgtgatttgtataaacaggggcaggtggctaaggaagtatagttaggtgccagtaagtttgtaggaaagaattctaaaagtggaatgcctggttcacagggtatgtgagtttaaaaattctgatggctcttactgaatcaccattaacagaagtgcgccagtttatactcccatcagcaatgaatgagaatgcctgtttcctcacacctatgcccactagcaagcattttgatctttgctaatctgctgggtgaaaagtagcatcttatagtttaatttgagcatcttttcatgtgtttactttgtattttcttcttctatgagctaactctttgttcatgccctttgcaggcccactttcaactattgagttttgattttgatttttaggaggttttttttttgtttcgttttttttttttttttttttttttttttttttttttgtgagacagagtctcgctctgtcacccaggctggagtgccgtggcgtgatctcggctcactgcaacctccgcctcctgggttcaagcaattctcctgcctcagcctcctgagtagctgagattacaggtgcccaccaccatgcccagctaatttttgtatttttagtagagacggggtttcaccatgttggtcaggctggtctcgaactgctgacctcttatctgcctgccttggcctcccaaagtgctgggattacaggtgtaagccactgcgctgtccaggagctctttatatactagaaaaattcacatttccttatgattttttttaccaagtgtttctgcttattttgttatttgtctttgatattgtttatggtatttgaggcataataaatttttatataaagttgtcacatgtttcttttgtactttctgggttttgtgtaataatcagaaaagcctaacccactctgaaaagtcatgcttctacaatttccttttgtatttttatgtaaataaaatcatacttatttgattcataattattttggattagtaatgaaatagaaattccattttattttcccccaacaactacctagttctctccaaacatttcaggcacgatgtgtcttttccttgctggctaggtggtgattcttgagaaagatgatttttacttgggccaaggcaggggtgacatggaagggtatcatcatctatgaaatccccttatgtagttagaactatttttggagagtctgctccattttcttgacttccagtttgttgcagttccacactgtgttaatcactctagttttatgaattttaatatatgatatggctagcctcacccctattacccttttgttccaggattttttttgatcttcctacatgtttatttttctgaataaactttagaaattgtctcattctaaaaaacaatcatgttttggagaaagggttaaattaaatttatagcttaatctagggagagtgttttttaacttttaagctcaggggtacaagtgtgggtttgttgcataggtaaacgtgtgccagggtggtttgtgacacagatcaacctatcacctgggtattaagcccagcatttattagctattcttcctgatgctttccctccgcccctgacaggccccagtgtgtgttgttcctcatagtgtgtccatgagttctcatcattcagctcccacttataagtgagaacacatgatgtttggttttctgttcctgcattagtttgctgaggataatggcttccagctccatccatgtccatccatgtccctgcaaaggacatgatcttgttcctttttatggctgcataatattccacggtatatatgtaccacatcttctttagccagtctgtcattgataagcatttaggttgatttcatatctttactattgtgaatagtgatgcagtgaacattcacatgcatgtatctttatggtagaatgatttatattcctctgggtatatacccagtaataggattgctgggttgaatggtatttctgtctttaggtctttgaggaatcgccacactgacttccataatgtctgaactaattgacactcccatcaacagtgtataagcgttcctttttctccacaacctcaccagtatcctttattttttgacttcttaataatagccattctgactggtgtgagatggtgtctcatttgatttgcatttatctaatgatcaatgatgtcaagctttttttcatattatcgttgccacatgtatatcttttgaaaagtgtctgttcatgccctttgcccactttttaatgggggtgttttacttgtaatttgtttaagtttcttacagaagctagatatagacccttgccagatgtatagtttgcaaaaatttgggagaattttttatgatactgacccaacctgtcgtcacacagggtatatgttcccatttattcagatcttcttttatgaatctccttagttaatgttttaagatattcttcctatatattttggcacgtattttttaaaacattatttgacatggtttataagtatttgtttagtcttcacatatttgcagaggtattgaggagtgaaaaaggaatggaagtgtttctttgacaccgtaaaatagattacctggggaaaaatattgaaactttgcataagtaaatgtaattgattcattttttcttttatctcttctgaccctatatttcgaattgttgatctaactataaaaacgtatttgttttaaatttgcaattgaatttagtaagtgtttttcacacccacaaattcaaagcaccaattgctgagattcttttgcaaagtgttccatatcattgtcttatattaattcattgactattaattaattagcttagtaagcacttaatgaacacttactatagaccaaatgttagaaatatgaagactaataagacatgatccctttcattgaaagatttgctgtttactcagagatggaatgaaatgatgaaaacaaagaattataataatataaggtaatgtgctttacactctgggaggccaaggtgggtggatctggatcacttgagaccaggagttccagacccacctggccaacatggcaaaaccccatctctactaaagatacaagaattagccagatgtggtggcatgcacctgtaatcccagctgctctggaggctgagggaggagaattgcttgaacccaggaggctgagattgcagtcagcagagatcgccccactgcactccaacctgggcgacagagcaagattctgtctcaaaaaaaaaaaaaagggtaatgtgctttcatgaaaatatgtgcaaggcagagttggaacatggagtgggagagcctcaagctgtcctggggcaatcaaagaaggctttactgagcaaccagcatctgaactgagaccattcggatgagttgctgccaggtgggcagatcaggggaggcttctccagacagagaaactagcaagtgcaaaggcactggggcatgaatcagttacaagttattcagtctatggggcttaggagattaggcttagccagtaggcagctgccagatctcaaaggctttatatgacatgcgcaagaggttgtgctatattctgtaggcactggagcaaattgtgagcaagaaaaggtcagattgtagactacataactctggtagccatatggagagcaaagtagaagggtatgggtataaaatcaggaatacaagtatggagattataacagtgggcccagttagagactgttttctcttaaactaggacagtgacattaggaatgacagagagcccctatggaagatttattcattcaacaatcatttattagaatcacctgtatgctaggctctgtgctggatgctaggcatgcagcagtgtgccagacagatatgctccccactcccaaagccatcccattcaaatgggaagagcctgataaggtgatatgtaagttgatatgttaagcagtggtatatgatgaagcagaatgcagcaggatgaaagggaaagggaacatggttaggagtatgctgatcaggatagtcctctgggcaaggtgatgtttgatcaggacatgagctggggagggagggagggtatgagccagggaaatggtgtccaagcacagggaaatggtatccaaaagagaaatggtgtccaagcagagggaacagccagtgcagaggccctgagaaggaactgtgcttggcatggttaaggaataatgaggaggccaaaagggctagagcagagtggtggaggaggtggcttaagtatttagattttatccagaatgagatggggagccagggcattatttttcatacggcagtagcatgatttgactggcagcctttaagaggatctcacctgctgctgtgtggagaatagagggagtcagggtgtaagtaggtcagttacaaggctggtgcagaggtccagaaagggaggtgatgatggaccaggatagtgattctggaggtggtgagaggtggtagaactatggatctgtcttgaacttggtactagaaggatacaggaaagtgtgcataggaagtaaaatgggcaagtgtagattagataactgctaagtgtagattagataactgctaagtgtagacatacaatattttaaagggagatgagggaagtatagccagggagggtcactttagcaagagcagtccatatggtcaataggtcaatatgatgagtacactatcatgaactcttgcaggctaaacttttattatttgtatacttatgagccacactggattgtgtgacatgactaaatagagaattcctgaaattgcctctgggaggatgtattaaatagggtcaatcagaagtacgtaaatggtgtctactcttgagcaataaaatttatagaagccacatctaaatttagctttaagcaatttcggagcctgagaattttcaggaaatagtaatcaaagccctgataatacaagaaattgacatcctttttggactgacatgggagaggaataatttgggcggtcacagaaacggactcatagatcatagatcttgggaatgtggggtcaatgaattaaatatggctgaaaattataaattacctcacatatccaattgcttttagctaaaatcaagagaaagggctttctaaagccgagatactttttttccattagcaaagggttataagatgttctggagacttgagtcaggctagttcccttatctttggaagatattcttgagtgatgcagtgctatcagtttcaaataagtatatttttgtaaatcaggtgatgttatataatgaaactgacatttgtaaaagttttttatggctcccagccaggtgccccttttgtcagaccctgacttttgaaggattttgggctgcttataaggattcagagttcccctgcaaaattgatgttggaaaccatacccacagtctgcgccagtcactgtggactggatacatttccacagtgtgagatgaaatcagaactgaatgagagtggccactgttctcttggccatacctgaccaaaggttctagtttgatgcagattattattctttagttaactgtacagtaaaccatgcacagtcctcattgtaattaggtgggttcattctttcttaattttacctgctgttgtcgtcatgagtcacaaagttgaataactcttcagttattattgtagccagagtgatggataagatagactcccctaaaccatggtagtcgatataaagcttttcttctcttgcccccatagttagcactaactggcccctgttttgtataaccttatacagacttatgtcatagtgctaatgatataccacatgtgtgtacacatatgcacatacctactcacatatacacatgcacacacatatatgtgtacacacacacacacgcgtaattcctcttctctccccccacagactgtagtaggcactttgaatcatgaatcgttcttattttccttttaactattaacacttagctcagcatctggcataaagtaggagctcaaaacatggttgtcgattgaaatctagaactgggttttgcattttcttgttattgctttgttgttgttctgttgattaagtaattctatacctagtttaggtttgaattgctttagagaccctgatgatggtgccttgtgttcttggccacttgattttatgtgacagtcttcagcatattcataactccaagctttacaaaacaggcaatattttatagggaagtagctctgttgcctttctggatgtagaggcagcatgagattataggataaaactccaatatgtttgtatttatgtatatatatattaccttattcatacataataatgtgtatacatacataataatatgaagtaaaagtaggtcagaagtaaagaagaggtgggaacaaaatgaaagcaggaatacaattaaattgcatgtcagaatgacttacatgtaagatacagaggccacctttaaaggctttaagctttcaatcagccagagggaaaagaacaggcttatgggggtaaagataaaccatttgctcaggttgattttaaccatactcttagcaccaacatcagataagaatttctcccaggagtccctatgaagagtacattgtgtttcgttatgaaaatcatcaagctttgcaaggctgattctcataagacaattttgtgttaatagcattgcctcaaggcaaaattttgtaaaagcagtcggcaaggttctgtttaggaatcagttctctgctggtcagtttgactcagggatatgaaaagtgggtggactacttgtctttaagcaatctttcctgtgtattgtttatctcaaataaagctttgaaaattgttttttaacattgaacttgaagtggcactattctccagcaagtaagggcctacagtgtagctactattctgtgtagctagttaaggagagacctggcgtcctagcagtgtcaaatgaaagctggtattagcatccatatgaggaagctgacttgcctagcaaagacatttacctgaatagcaggttgccctccttatttccaggggaagcatgggagaaccaagcagctcagccaggattatgcatagaaaattgtttggacccacgttattgctcagacaaatgggtgatcctctccaagggctttaaataggtccttttggggcagggaacccaaacacttagcaaagtacagaaggtttgaagggaatgaattcccagagtctggattggatgctcagtctcatttctcaccttcccgtttacaatccctctttttccattttagcaaagcaaggcatccttcttatccatctcagatcttactatagtgcattgtgcaggggtgtaaaaacagcctgggcaccaaacagagcagcaattggaaatatttctttgcagagaagtatggtagtgtgaacaataaaagactttccaatataaacatatgctacattgggataaaactctgtggggaagtgggctggatatgagttaaaggagaaaaactagcgatgtaaattttccaactgataaaaaggagcttgagcttggtcagatatcttaaaaatggttgaatgtgggatatgacagttgtgttttaaaacctcaatgtttatgtatgccataaattatattctttgtaatcctataagcttatgatgaagtcaacttaaaacttcactgagttggggcagatcttcagaaggggatacatagctttttgttttgttttgttttgaatctttgggccatgcgtgagcaaacatgtttgaagaccactcatctactgcatgtaatatggctctcaatcagtcctctagctcttgcatcgacctcaagtgttaggtcagcctctagctgtaactcccctccctgttcttaccactactttatatttactttaatataagtctaacagattgcatccatgattcctctaccaaataggaagatctttaattctcgaaaacggtatactatatactctgtagtttccaggaatttttttgtggtgccttatgtaaaggcaaactttaaaaaaattattgagatataatttacatatcatataattcacccatttcaagtatagaattcaataagttatagtaagtttaccaagttgtgaagtcatcatcataaatcagttttagaacatttttgtcaccccaatacgatttatcatgcccatttacgtgaatgttcctatgtttttctaatatttaaggggctacaagttcatatgacaacatgcgtagagagcagtaaggatggaggaaaacaagaggggcagggccagaattttatcatttatggaagcatgagtgctagcatcttctatttttatttttaaaaaaccactctgatgttcttctagtccttatatgtttttattgatacaaatataaccacatgttaaggcaggactctgtctatctcagttttggctaagatcccaatggccaagaatactagattaggttcccccatatcagttacctatttagaacatacaaaacattgtatgggagttagttattgtctgctccataatatgtatgaggttgatgttggggccctggtgaatgtgagggtgggagaagggtactccatcttcacttcaaaccaagtgagaggaatccttattgaacttgacattatctcctgatgggagtttggggacatgaggttcacctgaacctgtggaaggctgtgatgagagctgccgctaagaacaaagtgggagagggggctgcagggagatggccgcaagttggtgggacgaagatgtgtgagattttatcatggatcaggtggatgctctgggatcattttaactttggaatgcactcaagagggatgcctggagggaatgggggagaaacagagagagagagagggcatgagcaagtgcataagtgatggtggggggaatggttatcagttacctaactattctggatacgtaagaatgtagtgcttagagattagacagaaaaatgaaccatttgccatttgaccatctgggagacattattgtatggtctttaaatctgataaacctgaatttaaatctctccctgaccctcagcaagttactgtatttttctgagctttcagagttgtcatggccagtatttgtcgtaatgatataatcattgactttgacaagtcctggaacttgcctttcaaagtatttttgatatttgacactgattgatgagtagataaatatgaatattctgtatagacaacatctatgatctagctagagatctaaaagtcattgttaggtaccataagcgtgtaacatataacattcaatattttgcaaaatccatggtatttcatttactatactgccatttactttcttatttggattacgtaggtgataaatttgtacaagcctgttttcatatactttgaaagtgtgtgaaaataattgtatataaatggtaattctgattttctctagaatacaattcagatttaccagccttcaaataatattattttagatactattgttaataaataatattttttatttagcaaataactttacatatatatgtgtgtgtgtgtgtgtttgtgtgtgtgaatttatgcatatgtatttttccagccaacatgaaagtcttttgaggacaaaattgagtatttgccatcacaaaactataaataacttaaaaatttggcatatttaaatattgcagtaagcaataatacttttatccatttatgcaacttttgtacagaaacagatcttgtagattatcaggtaggatctatggagtgaagtttgataaacttttaaagacaatgaagttaatttttaaaacctcttaaactcaactcttaattattcttaattgtgttctttaatttcttaaattgtgttcccaaagcatttaaaatatataactatcgtagtactgaatgcatggcatagtattatttcattaattcattaatttatttaaaatgactgtagtgaactcgtatggtacaatctctgtccttatggagtctagagttcagtgggatagacgcatgaaacagacacatgagtaatatataattacaaattatgatcactgttatgagttacaggcaaatggcatgagagaataactgtggaagcataatttaattggagggaatgattctctgatgaaagatctgaaagatgagtggtccattatcagttgagaatgggtcaaagaatatttcagatagtgggaacagcatattacaaaggccctgtggtaggaaggagtatgaaatatttaaggaagaggcaaggagtggatatagatgcctcatttaggaggcaatgggaataattcattctggaaatgaggtaaactagacactagattagactagaataagttagtggcagtacagttagaagtgaatggattttaagaaatagtagaaattagagtcaataggacttcaactgtttataaaggagaaaggagaaggtgttgataaataaggctatttgtaaaggtggatggtttggattctagcacattgtactgtgattgttataccataatttatcttctgtgaacattgcaaggaagtttctgcacttattttcaagttttgatgtgtatatttttacaatactgttcacttttctaaacttttcaattgtaagtttcttataattgagaattgttttctctttctttggtatatgtccagagttcttagccctctaaattcagttgttgttgagtaaattttatttttttaaaaaatagagattagaacatctgatttcagatatttaaaaaaacttagatatttatcttgtggggaatgacttaggaacagttttcttgaatgtagagatttgaaataccaatttgcctttgggtcattattttgtaggaatgtgggaagatataaaattcaatgagcaatatgattaggcatttatataattccttaagtatatgctatgtagatctttcaacatatatattaaaagattaaaaaatgcttgattatctggctctggggtatacttgtaaaacttgcctatttgctaaggtcaaaacaggcatgcatgtattttatattctagctttatctatggtatattaataatataactggtttccagcagacacaacctagagtaatccctgcctaggcttagcctagttagagcctagttaggtcttcttgggtttggacatgatttgagatattgaaaagaaaataattgaggagattcaaagcagtattctaatgaagctatatgcaggtttactaaacagccaacttagccatttatctaaaaaaataatatatgtaaaatgtgggttttactgtaatataattaccgagtctccttaccaaaggatgggaaaactttatagccacgagtgacagaaagaaactattgttcagttgttggattccatgtttatgtctgctaaactggtcattgattttcatactgtgaactttcttaacattgccaggtatacagttagaagacctcttatcctaaatgcttaggactaatttcgttggtcagtggaaaaagatggttaaatgagggaatagttaaaacaatatgatacatgcatttcttgaacaatttattttaacctaaaacaaaaattaatttgctaatattttggtgggggctaagggttttacttcaagtaataattcattaatttttttgttttacagtttcttttttgcataatcatgcctggaattcattacctataaggacatagacacttgtgaagacaatcctagtgcagaattcatctaactttaatgaatcatttcattaaagatttcatgatttcccttattattattattacttattattgaatgtatgactcagccttataaagtgtttcctaaacttttagcttattttaaaaatagaaacaccaactttctttttacatttacatttcatttgtttacatggtacttaattaaaattatatagttataataataagtatgaatgacataaaaagttttggaaatgagcacaagtaattcttgttaaacactatagttttaaaaaagtgaagggaaatggaccattgttctaaagattagacaacttaagctatgaggcttggtgagctgtgggtatcagtctttatgtttaataaagggaatggagattgttggctaagttgaggtcaagtaacagagccccctttttgtgctggtttcagcccattacccttcaactttattcactaaatcagatagttacagtgctgcttagaatagctcctgatattaaatagtgtcaataataatactttagcagtcatctctgagcttcatcattataaactagataaataattaaaacaaataataatagaatgtttaatgggagaaataggcactgttgagagaacagtctaagattcagatcatttagctctatgcccagggatgccttactctaggtttgtgacattgaataaattgctaaacctttctggattcagcttccaaatctacaggctggtagttctcaacaaatcgtgattttgcctcccagagaacatttgacaatatctggagatatttttgattgtcataatctggggaatgttcctgatatttagtggctagaggccagcactactgctaagatcctgcaatacacaggacaggtcctaacaagaaagaattatcagttcaaaatttttgtagtgctaaaactgaggatccttgggctagctaatttatgatggtttcttcctcttccctatgtatctatcattctcaaacttaggctgatcatatatatatgtgtatatatatatgtatgtgtgtatatatatatgtgtatatatatatgtatgtgtgtatatatatatttctattttaaataacctgagtaatgacattagatgaattttttttgtctagtaggtgtttaaatgatgcaatagtaattttcaatgtcttatataacataaacagagaagaataaatatagccaaaatttactactctgtactttttctaattcagcattcccaaatgtaagttaaatataactgtagaaaacccacagtagattaaaatatttattctttcagtaaagggacagtttaccaatgctgtcaggtagataggtaccagcaatatagataggaaaggggaaaagctatgtaatgttggagagtttaaatactgtaattcagttgaaaactatatttcagctaatagcaactttgggatttatatatgtatatccctatgatttaaagtaagattcatcagtggtataaaaatgatattttagtgtgctcaattttatgacttgagaccagttcaaaacaagcatcactgctagtataattctaaattattttggaggaaatgtatattttaaaattcttggtggtaattagtgatgataggttcgctgctctatacttttttatgaaataaagtttgacttaaagaacctgagaacaggtttcaaaagtaacagcatagataccaatcacattttttctgagtttttaatttgttgacaaaattttttttaaaaaactgtgatgaaagcatgcgagacttgagatggctgtagaaggagaaactgagtaagttcctcttcttgtcttgtttcctctccctatttctccttctctgttttgcttactccaactccatgcacacttgaatcaccatgaatggtgcccaagttgaagcccaaatcaagttccttagttgttggggccgtgtcttatttgtcttttgatccctggtatctggcatgtagagtctctaagtaaactctctgcccttgacctttctgcatattataggctctgtctttgggttcctccctccctctatttcccttttttctgcttctctctcccttccttccagtttagtttggcatttatagttttcgtggttgtgtggctcttttcatctaacatttctagatgtttagagcagaagggggggccctcccacctgacctcagcctaccacattgttggaatccattcattcttcaacctattaaaatcttactccattttattaccaagtaaactctttcaaacagttaatttatgattctcctggttttattcttaccccattcaccccagcaagaaagtcggtttctcaaaaaaaaaaaaaaaatgcccttctttccctacctgattattatgtagcatgagaattgacagagcacaagcagggaatgattacacaacatttttaaaaactctgtgttgaaatgtatttgtggcattactgtctcaaggaaagccaaatgcatgcctcagaattgagaaaaatgtaagtcggcaagcttatctctaactccccatgataaaataaattgagtgttttagagctgtcagtagtacttgcgcagttctatctctactgctatgtcagttaatatttcctccctcaaaacaaaacgagtgcataggcaaaatgtaagccagcagttgagattctgaactacctccaccagtgggtttcaccccaaagtgtctcctgaaggcctattcatcctgggtttgcaatgctgggttgcaatgttaatcattttttcatgtgctgatgaggaaaatgataaagtgatggatgctgctcttccttctgctttgtcatcctgaccctgattgtgctgggtggactttctcattaacgatgcaaagtccggtgatttgcactgtgctcagctgggcatcatttcttgtatcttatttttgttggtcagcattatagctagttgttggaactgatttcccttgcactctctgtttgactatgccatggccagcacacttttgaatgaaaccgctgatggttgtcgaaactaaagggacattcctatattttggattggctcacgaattcacctgttgatgccctggaggtaattttcactggctttatttatagaaatggcttacacagtgtagttgtgtctagtcagttgccatatggtaccctaatatgccaccaaatggtaatcaaaacttagtagtaaattttcaggaactaataaaacaactgtgatggaggagcttcatttgggatggtagatatcagtggctggagcaatgaggaaggccttgcctttctcttagtgctatttgttagacagaagtttttaaacaggtatgtccagaatagtacttaatttcttaaactataaaagcaatatatggttattattaaaaatcgatttggaatggaagaataaaaataaaatgactcagttcatttttctgctatcccaataccagccttggagaatatgctttcaggtaatcatagagtcagagaaagaatagagatgaagacagagtcacatatgtgaagttaaaaaaatgtaaatttatcacaatatatatgattttccaacttactgttctcaatgagtttgtcttgaagagtgttacgtgtcaggatatataggtccacctcattcttcatagcagcagtgtggtactccagaccacagatgcaaaacgccataatttaggtaagccttccattatcgataaacataaggttattgccaatgttttacagttataaacagcaagttaatgaacatttttgtacatatatcttacagtatgtaggctgacattgccgtagtattaacacttagaaatggaactgatcattccatagttaggcatattttaaattttgatggatattctcaaattgcccctccccaaagacactatatgaaagtgctcatttcctccacatccccatcaatgcccagtcctttgcttgatggaaaaacagttttgggcatctttagtgttctggtccacagctcccatcctgaccacactcaccaaatagaatcttactttactcttggacagaacagaacaaattaaaacaaaataaaaataacaagaaacagctcaagagatgtggatcttttgagcagcttaaccaaaacctaaacaaggcaaataaagtgaccctttgttatcagcaaaggcctgtgcttcctctgtgctgctgagccacagtcagctaggctggatcatgtggagaactactcaacaaagctggatttccttgaccagtcagcaggtagaaggtttttcttcacttctttccccaaagtcccaactcgagtctaactacgattcgaagaaaatcaagagctccagtgtacaagtgacagagaccatttgttttaagacttagcagtcaccctgttcaggtcttcttaagggagacggcagctcctggacctggccacagagtgtgagaaagatggtggaagagagaaagctgtacatacacacgcacatacacacacgcacagggcgagacagaaaggcaggaggcaaattttttccaaagaaatccaaaacaataggtaaagaggatggaaaaaagagaatggtaactgggcattaccttaaccactgggaggagaacaaaagtaagtcttaaatctgatcagccatggcttattacttgataaggtgaggtgaggaggggaagatggtagaagaaacttgatcttccagtaggaatcaataaaaattgtattagatgttccccttatctttggggctcttgtcttactcgtacttcctttgtggtaactttaggattctcatgtttctcttccttgacgttgcaaaatttgatatatttccatttgttttgttatttcttttcagatctcaccgtttgctgtattttgctttgcgtaatattttcttttccttctctttctgcattatttgctttaaaacaacatatacactaaagaaatgtaacctcaaccttttcattcaagtgtgtatttctgaaaaaaaatcagatatttacagataatgaataacaccacaaaagttgttttatgctgcaactgtacttaggttcaatgtcatctttgccaccttctccctgtgttatgtaaatattccatttattgcaggcataaaaataccacctttcactgtactttatgaggaaatggaagccaaatgactttttttttatagtttaaaattcatttacttatatatgtggcaaattctaaggcaagccagctcaaatctgtgccaaattcaggaagaaaaggattatcacaagaaataataagtggattatcacaagaaagaaaaggattggtaaaatatctgttatttcacttacaggtggaaggccacccctttttgtcatttaaatgctaaattttcttctcctttttcatacctttcattttccctcttgctttgtttttgcatacaagcgagttgggacatatattgcttctatctatcacttttacataaaagatagaaatccgggaaattgcaaaaggtttacagtctttccatagactaaaatcacgagccagatgttttaaaacaattttatattaaacaattttaaaactagtatttgtataagccagtaaatctatttttttcataaatgtcctatcatgtttttccccccattgggcacttggattggaactacaaaccacaatcttcaaataattattaaatctgaaaaacctatgtcttgtagtttgtggtgactctgtaggtagccactgcaataaaatctatttggagaaggagctattatctatgcacaatgtgtatttgatgaaatgggtaggcaattacagttcacaaaaacacatactgtattagaatagttcacatatagcaaagataattagatttttcatacagtaaccagtcagccaataggagtaaaaatgctacaaatcttatttataaaaagtgccattaaaagataatcccttctaatgttgcttgagcatttttctggatatgagtgggcagatgagtaatagaaaaataacactgacataaaaattaagcctgggagattcctgagtttgttttgtgcaacttggagttttgaggctctgtcaggagaccgctggagacaagagtactggattagaagcaggaagatctggtgcttgacctgactgtactgtcagtcagtcatgtgactcatcccccaagtctcacacttctcattttcaaagagaagaaccctgtactgcagagtaagagatcaataaatgtttgttgaatgagtaaaagaatgaacaaagattttaaagattcctttccaagattctgaaattccactaggaacttgaacaagcaataaaaagacagcattgcaaattaagaacaaacaaacaaacaaaaaaaaactttagccaaacattctatttagtttaaatttgtagatatacagattttctaaatatcagttttcctcaaatggacttaagatgacttccagactcagggtacagtgtcacattagctggtttagcgagagtgttgtattctacagaaatgtgactctgaataatgccagtttgtcacagatggggatgaaatcagattttctccaaaacacccaaatgtgtgatgcataaagcaacattggcagccagtggggaagatcttatcaatgaagtacacaaagctctgaatgtttacttcgcagaggaaatggcttcacagaccggaaaatttaagttgtcatagaaacccccatgccatatattttgttttaatttgagtattggcagattaagaggactcagtgacaaaggagctatattaaaaatgttgaaattgagtgtgctggttttattttttaacttaattgatatctgttttcaaaaggacttttaatatctagaagggcaaaagtatttcatgcaaattgtgcatagatttctgttgaaaaacaatatggcattggaactttttgttataaaatggtgtgttttctcctgtttatttcttatcataaattatctttttaccgtggtatcatcaaaataacttcactggtatcaattagtaacataggaagctatatatcccaactgtctacatttttattccaactcttttacttaaggaatctgatagtagctgctattggtttaggaaggaaaattaataattagtttgacaatctacttgaagtcaaacatttaggaaaacaaacaaatactgaatcccttaactatctggagagctaatatttattgagggactgctctgggcctcgctgtgctagattctctatgtacatgatttcatttggtccttcaactactctgaaatataaattatttcatttcttgatatgtaaggtgagactaagaaacattacgtgatgctcagtaaaaaggaaaatctggaatttaaactttttcaacatccaaaatggcaccacactgcctcatgtcatataattaactagacacaaatgtctaaggagcagaacagacattttgtgatagataagacataactgattctgtagtaagaagaactaggaagatgtccaggcctcacatatgacggccccttctggaccaagttagaccttgagttagtcttcagtaactagcatcccagcttggtgtgaaaatttggaacacttaattatggacattaacatatttacacataattaacactaataccattttgataaatgattaaaaatattcctgcatatatcttcagcttttacaaagggaattatgtgattttgggttttcaattatgtgcaacctattgactggacattttctgatgtttccatggaggatttaagtgttattatgtataatatgttagctattaatttttaaataacaagtttaaattgcacaaaattactttattatagaagctgttgccaaaatcaactggcttgggaatgcacatcactgaggaatttgaaccaatcaaatcattagccagagaaatgtaattatttataactcagccaagctcttattatgggcaagttagttgcacttttctccgctcttttgtggttgatgtggtattttataatgaacgtagattagtgggaaaggagcaatatttataagcaaaagacagtgtaacagagtgaaaaattgaaatatgaaaaattatgaaagacggaaacattcagaaagcagattttctgaaattgtgtttaaagacagataaataaatatgtttgaagatggaattgagaaaaaaagatggaaaatggtcattgctcacagaaaaagattcactaagcttattcttttgatgtgatataatagtgatttgatggatgcagctaacaaaatgtctacaaaaagcccagtggtatccattaatattgatgcattgagtttcactaaccgtattcatggatgtattatttctagcaccttctgtgtttttctttttgtatttggtccataccagcgtgttgggtgctgtccatggtactggaccagcgttgcttgctagggcctgctgtttgggagattctagggatggtttcctcctcccaaccgcaatggccctgttcctttatcttacactgtgcttgaattgtaaatacaacttgtgaatttattagtaacatttctagttattgtagtttctaagtatgagatctcagtggagatctccaaacttaacctggctaaaactgagcttttatttttctccaaaccagttcctcctgcagtctcttccatctccgtcaatggcaactacatcctttgttactgaggctgaaatcttcttataatccttgactccactctttttttcacatcccacatctgtcaggtctgcctttaaaatatattcagaatccgaccagttttcaccacctcactgtggccatccttgtgtgagcccccatcatctctccctgtaatggacttctaactggccgtcctacttatgtccttctacttccccaggccaacttttaaagcctgttctctatatagtaaccagagtagtcttgtaaaacatgtcaggtcctattactcccttgctgaaaatcctctgatggctttctgctttagtcagatagtaaaagacaaagtccttataatggctcttacatcatctggccttcttgactcttcctcatgtaccctatttcagccacacaggcccttttgatgatccttgaacacacccaattatgtttttgctttaagacctttgtactcgcgattccctgtgccaatacagatcttccatcattatatgcatagctaatgtccttactttcttcaggtttttatttaaaaatatctttttcattgatatttttcctggtctttctatttaaacttgttaaaaagaaagaaatacccccccataacagcttatattttaaattaaatgtatctttgttgtttttttatccctctaagatgttggctcaatgaaagtaggaattttttctgttttgtctactgctatgcctagaataatgcctgcatagtaggagctcaataaatatctgtcagctgactaaatgaatggaattatgttaacagatgaatgattttagcggaaataaatgtcaatatttgatgatataaatatatatattagattataatcatttatcagattattattttagataataaaagcatttttagcattgcttgatttatggttaggattctgtatttggaggtgctaaaatgggtaagaagtccagccattgcagatgcagaggcctttagctgaagctctagagctgttggggtccccaggaaaaagctcacatgagatctcctgatgctacgcttctggccttcattattcacccccatttctaacatatatatgttggggggaagcttaaggttttcagtggtgtggggctacgacgggtgtcccttcacaccatttcaaatggataggggtaagttatatctagagtcttagttccagaaacaaggttgtgatacatactcctgttaaaaaatttttttttgattaatgtgcaccagccactaggggatgctagacactcatattcagagtagggtccactgtctcattgggcttggcaagaagtctggtctacctaccttcagaccatttcattatttgtattctttttagccttttgtgtaaaactaacatttatttaatatttcctccattcctccttttttcagcacattccccaattggagaggggtattttggatgcatctgggttcttgcttttaggaactgtgtttaatcatggaaacctcattcctattttccaagtggcagtgactcatgcggggagagtcaaggccctgggtctctgctagtgctttccccatcctttagcatttcttcactttgctaaaaagcgtaaaagtcttttcagtgattctgtctgtgggtgttggaaaaagattttaagaaaaatgattttcaaaatgactagtatttacacgtatgagtccctatcttttcaagtttttagtttcatgccactttaggaaaataatagcccatgcggtgccaccttattctttatatcttttacacgtgattgattgtaaaggcgatgaggataccagtatccattgccaggaggtaagcaggaatcagataaaagcaaagggtggaaggtggagatagaaatacatatatgaataacattcttcttctctccaacttcatatagcttatcaaatccttaatttagctttgggaggctggtggatcacttgaggtcaggagtttgagaccagcctggccaacatggtaaaaccccatctctactaaaaatacaaaaaatttagctgggcatggtggcatgtgcctgtaattccagctacttgggaagctgaggcatgagaatcacttaaacccaggaggtggaggttgcagtgagtcgagattgtgccactgcactccagcctgggcaacagagtgagactctgtcttaaaaaaaaaaaaaagcttaatttaaactttgatcttaggatgaaataccctcatagtgtgctctgctgttagagattcatgtgggaaaaacatatatcttggtttctttaaataaattagtagagggaaaagctgaatcgacatatgttatcatataaaggagttaaaatcatgttctttggtgtgaatagaccttggtttgaaactaaactctgctgcttattaggtgggtaacttcagagaaattactttttatctctcaatcctcagttttcttatcattaaatgagtttaataacttctatcccataaagttattgtgaagattcctgggaaatatgtatatacatatttaataaccatcagcacaaagaatggcatgcaatagttgctctatagaagttaattcctttccactttcatgtcaatatttttaacctagctgttagatgatctcagatctcagtcctagtggaggaatttgaactggactttttcctcccttaacatagtacaatgtgtatgtaaatcactagtaggaattctgtcattagaatttttaaagtgtaagttaaagttaatattttgctttatgaataagatatttttgttacttctgggtggatgtcaaggaagaaatcagtacaaggtaatcccttaatatttccttgaaatgtatgtttgtagtattatgcctgattgtaatagcatgggcaaaatcagttaaaatatagtgagctgcacacaaaaccttatatgaaattctttctttggcttgataaatgccaagacctaattctttgtgaagtgggtgccatagctttcagtgacgttaatatcattcatgtaaaatcattgttcctccagcatatttttatgggtctcagaggtcacgtgttcacagtttgtgtaagaaccagcattgtggtggagtggtgacagaattgcattgaaatcgtggctcttctactcaataattgtgtgatcttgaacaagtctgttaatctgtgtgagatacagctcttagacatataaagagtaggactatagtcattatgcctattgcatatcattgtattgatgcttaagtgaaagaatatacatgaaagcagtttatgagctctcaagtgttctccaaatgggagatggtttctcattgccacatttctggctgctgctttcacttgtcaaaccacattcctgaagcaacacagtttgctgttaaagggagaatatttaaggggcccgagatgctgtaggaaagccatctttctcttctttcttttctaaatggcagcagtaagaggtctgtgagatgggaaaataggggattaattagaagatgattctacatttgcctgagaagatgaatgatgtttaatgcgctttgagaattaggcagtgctcgggagtccattttatttttctacttgagtgttccagtgtattcgttgagtaagacctagacagattattttaccttatcccaacatgcctttctctttactttgggtaagcccaaagtgtaggttctgtcatcacagaccatcagccctctgttcttacagcagatgaactgccccgggactgcttcttgggtaataatggacatcacatgggccatccagccactctctgttggttcttatgtcatccttcctgctcagacagggatttcataccagatacttctcctgccatcattgtgatccagctgctgagataacgtttcttacattttatttcattactctagcatatttataagaaatggttaatttgacttgagtttatcagtgactgtactgtgagctcacttttagcttaagtatccactttgagcacaaaagtgtggatttttttaagttatttttttcacttttaatgagtataccataagctcttataaatattatatagaaatctgtctcttatggaaagtaagctagacccattcctcagtgactagcgtaaaaatctatttctgcctcactaagagtttaacatatgtgtaccttttataatgccttgtaacttggctaaatatgccattttgaactgatatttaaaactgtataaagatcctgtggttattgataaaagtacttgatagaaaatgctgtgacatttaaaattgtcaggctgtactggatgacttttccttgaggttgttgcagacactccacagtcgacatttagtttagttgctatttctggtggcacgtgtcttgcatgggcctcatgagtatgttgacacttgcgtattgtgcatttaagaagtacctggagaggactcctcccctgtcaaaaagttttctccatcagttttcctatagacatttgctacaattccaggttaatttcttttgattttctgtttttgaacaggttattttatgagtgaagtcactcaatgagtatttcttgtgttcctattatataacaagtcccgtgtagggtctatagtcaatcacttccacctgtggaaaaataattagcttgtttggatggggatagggagaaagaaaacaatttggggagggcactgggctcctcagtgtggtaacacaaggctgatggagaggaaaagagtgtatgaaactttgactgtaggagatgcttaatatgtatttattacataaaatgtattaaaataaacttgtggttctagcttcattaggttgtgataaggtggaagggccagtgtcctgagtgtcagaaaacatgggttttgcatggctagccctgccacccagccacttagctgtgaccctttgaacaagccatttcacttttctgggctgtgacttctttattagtagagtgatagagtgggactagatgatttctaaaattccagactcttctgatttttttcctgaagcatgccacttgcattttaatgaaaatattgattgttaatatttattgagaagtataaatgtagcgggctggtaccgtctttattcccatattacaaatgattccatttgtaagttaacaatccttaaatctgttctggtgtcagagccagggtttgaactgagatccaccagtttcaggtatgcacatgtttatgcaacacagcctccagaatgaaggctgatgaagacagggacgctcattccccaccccccaatcctctgtgtaagctttgaagatcactctggaagagtctacctgtcatgaaagaacgcagatgactttttaagaatatttatgtagtcttatatttcagggtacctgagaggccctttaaggtcctaaattattttttgttctatacaggaatcctttctgtaaaacccttgactaaaactgtctctgctaaaggatgggtattggcaggtgttggggtgagttgacgaaaaagcaaaacaatagtttctgtgaaaatgcatgttaaagagaattagcagtaaatgaacgtgtgtttccttaaataacccaacaccccaatccacctagaaccgatgacttttgctagtttttacccatcacctcaggagtcattctggtttcttggaaacgtgtaaagtatctgcttagggaaatattattttatgttgctgatgttgggaggtagcatctactttagttgaggaatagtcagctaatagttcttttctttgctgtgcttttgcttatgtatttgttcagacctgctgcttaatgatttcagctggccacctgccatgtcaaaatcactttcctctcaagatctgtggaaccaattttatctgaacacaatggaaaggaactcaccattttgagctacatatggtcttaaagataccatcttaaataaagagaaagtgaagaaaacatggtttcaatcattagtttctttcccagagccactttctccacctctaatatattgtttattttctgctaacactttaaacacttatactcagttaatatttcaactcttgtgtgaggaattggtttttatgctttctagcagacagattgcctgagactgacacttctgaccaagtaaaataagcatatttaaaatgctctgtagcttattttcgcaacgtatttgtgaacactagaacttccatatggaagggactgggggagaggatgcacacagtttgaaaaactattcaggaactggagagggtaatgaaaatgaaaaaatgtaacttatggcctccaatctatcttttcaaaaagtaattaaaaactgaaaagcaaaagaataattacttcttagtttaatacccccattctaacacctgatgtaatcattagggtttgatgcagctcaagataaacattgtataaaaagagtaatatacaaatggaatatattgtcattcacatgcataaatagattagcttactattttagagcactgattcactaatttatattcaaatttgtgtttcttacccaattcatgtttctagcctcacttccattcctgagtcatagtcaggatgaatagtcatagcctgaagatttaaatttagatgttctaccatttactacctcataattaatctcaagttttattcaccacccctccaattaagaggttcttctattagtcatttgatcttctatctcagtcttgcttacactcccttgaaaccacactttgatcttgtctcaaatctaagctccacctttgtcttactagttgtgggttcttgaggaaggtgtctagcagagtgtctggctcatagtaggagattttaaagtattgtttcttttttccttgtctcagagcctcatccttccccacccatccagatgatcctgttcattattcaaagactagatctgatcacttctcttacatggaccccatgggacttgcattcttctctgagccaaataaggaaacgtatttgtcccttaataaatactctgatttattattttctttttcatgttgtatcattggagtttttggatacaagcaatagaaaggatttggctgacatgggtaaagagaggaccttttgggagggctaaggtagctcactcgattcaccagtctagagaaccaagcttgggaatggatgggaagcaaagaggtatcacatgggtgagagacgaggaatctggtgaacagtctcataacaggagcagttgttgagcaagccaccaccaccgaggtgaatgagctctgactgcttcttccactgttgtggcaattgcttagggtgcaaataagaagagactgtgtgatgggttcagcccagctacaccagggcagttagtggaaggatctgccctttcgactgccctagtacgaggccaggcacctgaacttattatcaccaaagacttcacacagcaggagacacagaagtccctgaaaggaagtctggatgctgttaggaaggagaaactgaattgcagtgaccagaccaccaaaacgttccctaccatttttacccttcaaactctggaaattttcatttcctgaagagcatagattgtaattatgctaggttttggagttcctaaagtttgtatattcatgacatatttattaaccctttaatatacatgtaccaacatttatctgaggtgccgtgtatatagcagtgtatacataaacattcctgtcttcctggagcttgtattttggtggcaaggtgaggcagtcaatgagcaagattagaaaaatgcagcttgtattagtgatgtgtgatggaggaaaagatgacatggcagggcaatagaaaatgctatggtatatgacttgaagttttaaaaagtgattggagaaggtctcactaactaaggaggggacatttgaacaaaaactgatggatgtgaggaagctagcaatgcagatatatgagggaagagtgatccaggcaaagggaatggcaagtgcaaacacaggtgcatgtgttcccctggcacgttaaggaccagcctagaggtcattgcagctggagtggaatgaaggagaaggaaagtagtgggagatgagatcagaaatgtaggagggaaccagactaccatagatgcgacacatgaacaagatgtggcctctgcttccaatggccttgtggtctaagaggaggcacagatgtgaaaggacgtacttcagtacattgcagcaagcaccaaaattaggcagagggtgcaggctaactgcacccaggcaggaggatgggcctggttagatctctgcttgtctgtgagctctttgagggagtgatgtatcttattcattttgcatcctgggtggcttgtagagtgcctgacaaataccttttgtatatatttttgaattcattttgagtggttgaattacagatacaatgggcataatgtgtgagaaggagcaggattttccttaatcacagacagaggaggcttagggaaagagattaaggaaaataggaaagccacagacggttgaagagccaagagttgaatctctgcagtcttctctctactcggtactttttctgtccttggcatcattgctttgatgttgtaaagtattgaccacataaactactataaaagttttttgagaggtaagcataatgtctatattagttgcatgatctgcaacatcaaggtagttgattattttactgcaatttaggggtttgatttactggcttatttgtgctgttttttccccatgtggacggttttgtgcttgtctttatactttttctctacagggcactcaaggaacaccaaaatgtaaaatagaaccacaccattgtatagcagctgtagacagatatcagtgaggctgataatttggatttttctattgcaactgctactgccatctagtattatctaatactgagtggcttcttccatgatgacttcttgaattgtgaagtggaaatttggtagccttatgtaaccaagcacttacattatttaattaagcaaggtgctacatgaatcaacaaagcaacacaagctgaatatcaggaaaacacatttcaattagtgacagcaggaccagtgcctgaaggccctattcattgggtagaaaatatgacaatgccagggaaaaatgcaaattcatttcttataatattctgtgtgctgaactgctaaactaatatttattagtaatcttagagtcagtagtctttgcatatacgttttacttcctttcctttatatttcatttatcaataagtttttggagtccccgtgggtgaaaatgttgatctgttagggatttagaaaatctagtaaaagtttgcctgggctcagaagcttattaatctatttgaaaaatatgtgtctgccactgtactaggcattaagcatacaaaaatgaataaaatatgaagtctttttatatatatatttttattatactgtaagttctagggtacatgtgcacaacatgcaggtttgttacatatgtatacatgtgccatgttggtctgctgcacccattaactcgtcatttacattaggtatatctcctaatgctatccctcccccctccccccatcccacaacaggccctggtatgtgatgttccccttcctgtgtctttaagctctttctgaacaggagagaagccacaaactatcatatagtgtgatacgggctgtgatatagaatatctgggagtgctttgagaacctacaggaaagaggaggtcttctaatgaggtcataggcaatgcttccaagggagtttttcttcaaatggaggaaaaggaaaagggattctaggtgaagggaataggatgacccaaggtctaggagtttgaaaatgatggcacttgaagagatgcatacaagaatgctgggctgagggatttgcatttgccccataggtagtgaggagccaggagagatatgtgatattccaggttcctgtggatgaaccatccaggtgaagacatcagaatacagtaagagtcttaactttgactgcaggtctagaactcacaagggaagctggcttgataacatccccaaaggagagaatttacattgaaagaggaaggctgatgacaagacattagagaaaagcaatattttaataggtaggttgaagaaatgatatcagagaagccaggctttgccttgtgtttggaacaggcctgccagtagatgcctttatagtaaaagataaataacaataaatgaaatgcttttattgttaataaaaatgttgatgatgatgacaatgatagtagtagctaatacctattgagcacctactctgtactgggcacagctctaagaatttttcatttaatcctacaacaaccatatgagataaatagtactgttataatatcattttcgtttggcagataaggaaaccaagatgcagaggctttaaagtcagttgtccaaggtcacacggctaataagcaatgggtttaggacttcaacagtcttgcttcagagtttacactccctatctgctatcgtatcttttaaatagtctaacaactgtttgggagatgtcttatcaaaattgctctctcgaccgggtgcagtggttcacacctgtaatcccagcacgttgggaggccgaggcaggaggattgcttgagcccaggaatttgagaccagcctgggcaacatagtgagaccacttctgttaaaacaaattaaataaaaaagtgctctctccctgggagttcaagatttcagtgagctatgattggaccactgcactccagtctgggtggctgagggagaccttgtctctaaaaaaaaaaaaaaaaaaagctcgctcatacccaaagtcagggcaataaaggtttgagtggtcaaataaagggttgagtggtcaaagtcacataaaggtagagcttcaacagattatttttctttagattttcaagtcagcatgaggttgtctgatacaaacatcatagatgccatggttaaatggttctgtttctcagaaagccccctttcttcttataactgccccttcctttttaacagaccagcttagcctgctcagcatgagtgagccttgactattcaatattccacaggcccctatagggcctgttggtggccatggtagggggcatagtggacttgctgatccttgtgattattgagtatgaatttaagatgcacatggctgaggctggtggtggtgaaggtgcgaagatacagcagcatgaatccaggaggtggaggatgcagtgagccgagatcgcttcattacactccagcctggatgacagagtgagactccgtctcaaaaaaaaaaaaaaaaaaaaaagatttgcaagagttaccacctgctgctataagactgtaaagagcatggactaaaactgaatgggggtatggggtgccaccttggcaggagttgactgagcctcaaggtttgtttggtttttgatgattctaagctgacaatcatagggaaaaagaataagagtgcacattcagtttaaaaccaaaatatactcactatcagcatagcaggaatacagaataagaagtccacagggcctggaaaagtcagaaaagactttgtcaagggaaagagattacagctgaataggtggaggagaaggtagcttgatcaaaaatgtgctgttgggaatacatatggtaaaaacaaaagataaagagactggcccaagcatcaggtcagatgtgtggagaggaaggtggaaaataaagtttcataaataaagtgaggtcagattttatggggccttcaaaggagttcgatgttttagccatgggaaaaatggggcaggtgggaatgcttgaactaggaattaatgatgaaagaggtatttgaaggtcattaatcctaatatgttggattgcagagagactgcaggtaggaagggcagttagaaaactgtaattatcaagtgtttgagatgggttaaagcctgaaggaagatgtggatggaggactgagaagcaaggagcaagtccaatgggcagtatagttagatgaaacagaagggagactaaaagcaggttccctatcttgccttgaggattagaagactgaggacatcaccaatgaggtacttaggaagataagcctattttcattattagttagaaaactattttttttttctgaattgattctcctaagaattttatactgtattgttttcaagatggacatcattctgtctttgggatgtgtcttatacttctgctggccaggccgtaattgtgatatcattgcttttgattgtggatttgtaccagaacttgcagaatgggggccagtggctcagaagaaaatctcggagataatatgtgatctctctttgaggagatgctgtagtacctccctcttgatggcagagagaatgattttgtgtggagaagcacagaaactgaaaacaccaagtcacaatttatttagtagattccaactgcaaataaagaaagtttagggataccttaaccagtttatttctttgtaatgtaggtacaagaatatatattacaaaaaacaatctgggcaagtttaaaagcacattttaataaagataaaaaaattttaagtgataaagtattctttcatagtttaattggcctttttttcattcccagtacatatggcaatggggtatcttacaatcagtggcattttcaaataaataaggtaaaatatccaggacccactgcttgtttgaaatttgcttgctggagttaagagaagtgaacattttaaagattttttttttcctttagacagaaccttatttcatttgtgaaggctgactggacttggatgctgcccactagttaatttagtgtggcaaaaaataagaattctgtgtctgggcttcactgtctgcaaaaatgaatgcattattgtaaaatgtgcactaatctaaaaagtgtattgccttcctagaagtctgagtaatgtcttacacacataatcacactgcccgtcttcatatggacatgagtcctatagtgcttgagaaatggaaattatttgactgcatcagctagtgcatcgtacttctggttattttgaatttttgtaatcagatgctgctgaggctgtggccttttccccacctcctctctcatacatatatatgagtggtgtgttcagtgaaattttctgacatgaaaaagaagtccttaaaccaaaaataataataataataataacaataaagggaccactgtcttagaaaacattagttacccgttctctttccttctcaaggaggaatgacttcagtgcaattaacaatccgtgtctttgtgtcccagtttgatcttgcccagtttgaaacagcttgcactactagattggttcttgtaagtgttgaaagttcttaattacaaattaaatcttgatcctgtaacttggtagtaatcctaccatctatatataactttacgattttcagaggactttctttattgaaggcagtatgaagcaggaagggcaggcattgtgccactttacggttggggaaactgagacacagagagagtaaatgacttgtttgggtcatagcagttagtagtaaatgtcagaggagggatggaacctagattgggtgactccttgttcagtgctcttttatttttacttctcctgttcatattgaattgtttcagaggttggaattaggaacaaaataaacctatatcccattttctgagtcacagtccctcagacatgtgaaggcagcaatcatgagttgttgtttgttttccagccaaacatatctcttttccagactgtagtaacatagagaccccctcaaagatccctgatgtgacagaggtaaagacatttactagagtcagaggtcagctttcttacctgtgaattggccaaaggcatctattaggctatggaatgttaattatttcctgcatttgtctttggctagccttctctaaatgcaccataactcacctgaaaaactaccagatcatgttgtttttgagttaggtcaccagccctcatcaggatcttttaggcatgcctggaacgttggttgacaaaatccaatgaaatgaccacctatttttctctagccagtgagtcttaataggaggtgagcaatgggaacacctttaaaaaaaagatgcctgtgcctcatcatatagttactgaaccagaaatgaggggagaagatctcaaagatggatattatgatggtaaatacacttgggaaattctaatgtatccctgagataccactgtcatactactaaagcctaaaatgacatttaaaaaaatgctaccacctatttttattggctcatacaaatcttgtcatcatttgatattgtcatgacatccgccaaaattataactgacccaggtctccctactcatgtacatattcattcattcaacaagtattcattgagtacctggtacggtggataaggtagtgaataagacaaagtctatatcccacagagctcgtattctaatgggtaagaaggcagcaaataaataagcagaaacatctcttaggtagtggtaaatgctacaaagaaagatgaagctgggtgaggagatatagaataatgaatagggggttgcaagctaccaaaacagaatggtcaggaaggctgaggtggtgacatttgacagtcctaaataaagtgagggagcataggaagatccagggtgaacggtagtccaggcagagggaacagcaagtgtcaaagtcctgaggacaaatttggactgctagccttcatattagtttaaaatcattgtttgattttataagacatactagcctttcagaaatataggatataattgatcagggcctgaaggatgaactcattttcttctgttagctccaggtacttcttaacaatacttaatctacttttgctgtttgctctttgtagacaacaatgcagaagttggatgcatcttctatgacatttttggacttgtgttttaagagaggtacattgcctctttggggatctggaatcttcctgatagcgagtcagcaagattggtgggcccaacactggcacatgtctcagccaaattctctgtgtagcttctgacaaatgccaaactactggtaaatatccaccccccccccccccccactgaaagccaaggacaataatattctttattcattttctggctctgagtatcttttctttttgtttttgcagcctaacctttttgtcatctttggcatttttcacaggctccagctcattcctggctttagttgaacttttctgacattcttcatataggtcagtgctactcttatatttcattctttgttatatgattctccttccatcttttatgtggttgttttgaagcctgaacccctcagaaagtttcctctgtgaccacattattttctctggaagcctgctcttttatctcccctccgcagctgtttgcaagtgtgtgtatgtgtatgtgtgtgtgtgtgtgtgcctgtctgaaatgttttttagaggctcattcctttctgaggtaggtaggttcctatttagaacttctgagcctaacatcatgcttagtttacttctaattttaatgaacacttttattaagatcctgtcttagttcatgtgcactgctataacaaaataccttagactgggtaatataaagataatagaaatttgtttctcccagttctcaaggctcagaagttcaagatcaagatatgagcagattcagtgtctggtgagggctgttctctgcttccaaaatggtgccttgttgttttgtccttacatggtagaaggtggaagggtaaaggggcctacctcgatccctttagcccttttataaggcacgaattccatccaaaagagtagagcccccatggcttaaccacctcctaaaggccccacctcttaatactgttgcacggaggattaagtttcaacaagacttttggaggggacacaaactttcaaaccatggtatattctaaatttgtgtcttagttcatcctttctctttcacaaactccaggatgacataatttatttcctccaaaatttctgtcacaccagcatcaccttccagtgacttcttcttcttagaattatgatagaggagctgttaatcttcttttatagcatagcaattgagaccatgggaaaatctgggttcaagtccaacaccaccgcttactctctgggttggctgtaggcaaattgttatgaagactgaaatagtgcacaccaagtgctttaggaatgtgcttggtatatttttagtcctcaataattgctagtggttaccataatcattatcagcatcaatatcatgattctgagataagaaattattgtcaagctaagtcaagaatgaatagattcactaaacaagtatctggactgtcgacattcccctaactataatattgtaactctgtaaaaatatttctaatctatactcagaaaatatccttcacaccttctgttcctgagagcttcaatgtctttttatacagcagtttaactgtcctcaacttctcgccccaaacttacatattcaaacattcatcaagatgttcaacagaataaagggccttaccaatatcaaacaagcaccctttaaaagtgctctgtaaaattatcctgtaatttagaagacaggtagacgacgacatgaccacataaaatcctgttattgttaggaatgattactactccttcaaatacatacaaagtcacttttaagttggttaggcttttgaataaggagagaggaatggctcaaccagtcattttagaataaataattatcccatgctgatagagtggaatggaataatctgagagtgattgtgggagtttggacttcaatttgaaatatacaatgagttgttcatgttgaaaaactgaccaggatgaaagactgttggagttattagataattctcttccgatagaagctgagctaaaaataaacttcctgtttacttcctttcctttcatctaaagtcaagacgatgcatgtcaaagatggctgtgcttcattcattcattcattcattcattcattcagcagttatttattgagtatccactgtatatcaggtactgttctgggcattagaattacagaggtaaatgcaaggtgcctgccttcatggagtgtacactgtacaggaggggattagatttaagcaagagaataagccagaaagataatttcagatagtgttaaggcctgtgaagaaaagagaacaggccaatggaatgggtagtgcaaagagggaggaaatgagatacttagagacaagaatgatgataagtttcagatctggggagcattctctgaggggaaactggattttatattctatccagtgtggattgagaagccatttagaggttgcaagcaggagagtaacatgttctggatttcatctcacagcaattcccctgtgttcttaggataatgtattggaaataaatctgactggatgtgaggatgccagttaagagtctggtccaggagaaaaagggtggtggattggatgagagttggggaagtggggatggagaagagtgactagagtcaagatttattttgggttctgaagtgacaggaactcccaacagacacagctctgtggggtggtaaggtagagggatgtttctgacctgcctgtctggtggagggtggaaccctttgttgaaattagaaaggtagaggagctggctttttggagaggatagatatagagagtgaggaatgaaaaattaaagtcagggctttaaaagcctatgaggcatccacgtggaggtataaaatagtcagccggagggatagtcaaagcaagagggaaattggggaacattagcatgttcataatattaatactatgggaataggggagatcaacaaggaagaacgtagagagagaagaaaagaggacccaggacaaagccctggagaaattaattagtgggtagagaaagaggatgttgaagactgaaaaggaacagcagaggagttgggaaaaccaggcagatattttattgctaaatccaagagaagagctttcagaagttctgaaagttgtccaccatgtgaagttctactgggagattaagaaccggagagcaggaaaggcccatcatagtggccagatggaagtcattgtgctgtaagcaaaagtgttttgagtggggtgtaggtgggtggagaaaagattacagggagtgagagagtgaatgggacgtgaggaagcagatggagatggtgagtgcacatagtttttcaaagaagctgtgaatgggcggaacctggaggggatatgagtcatcacagaaatattagacatttctgagatggcacctgaaagaaaagttgacctgggagaggactggctggcatatagtaattactctggggtttaaagggtaggaatggcttgaggttaaggtctctgacctctttttagcttaggacaatctctcttcctcttttgttcctcccaagaggacgttgtttgagcatccatccatgactgaaacttgcctgtccttgtacattttagtaacatgagccaataaatttgcttatatttttatagcttaagatgtttgcaatagagtctttttattgtctatatggtacatatgtctgtatctatgtgatacatggctacataatcatataaatatattgtctacatggagtttctcagaattaagaaaaagcacaattactctgtagttcaccctaatagttatctaaactaaggaaagggggaataaatgaaaaaaagtaacattttatcataatgttgtttttagatagcatatatagcatttactttaccagttcattgtaagttggcaaacatttagaacttgaaatgaaatcagagctcatctggtttagtttcattgagtagaggaaatggaagcctaaagggagtgaatgacccatggaaggaaagaacctaggacctggctttcaacctaggaaccagagctttggagtaacacagacctgggtttgagttctgcctctgccacccatacccttgaaactctgggtgaattatttagctgctctgtgtttattttctaatccataaaatgaaattataagacattgatcttgtagttatgaggcatatatgagattgcaaattaactagcaaggcgtctagcacatagaaatcccttgatcagtgttaaatctgtagtgtcccaaaaccttgaatgaattagtagtaagctgaaaaacatgaagatcatcctagtatataaaaatcatactttcctctcttgtcttcttactgttagtttttgggtaaaccagtaattccatttttcaacaaattatttggataattattgattcatataaagttataagaaataacagaaagaacttgtgtacagtttcccccaatggtaacattttgaaaaacttaataaaatatcactcaataatttgatgttatgaacaacaaatattttactggtgctaatatctattaaaacatcagaaaattcaattttatgtaatttgggactaaagcaatatcctgaatttcagtatctgttggaaccattagacaaatggatctagtgccacagacagctgactttgctctgacttggtgaccttggccaaggcacttaatttttatgctctagagctaattataaattgggacaaaagtactcatctctgcttaattcaggggagtgttccagattaattcgatactgtgcataggtatcccctggctatctctcctgccacctttctttatatactgtctatgttttccttttccttctttgccaacccataatgattttctcagttttcaaagcacaccatgttttatctcgtttctatacattttctaatgctgttcctccatgtctatcttattcccttcctaccctgcctcccaatctatacatacacttattcttcctcctcttctttccttccacacccccccccaacttctacttaatttttgaaatcacaacttttacaaaatcttcaggggaagctctgcataacccccagaccagattaggtcccagtggtgtgttcccttagcatcctgggcctccattcacagcactttaccccatgtccttattgtgctttgtctagtgtttgtttttaccagtatgtgaagtgagggcagggagaagattgccttattcaccacttcattgtacttatcacagtgtctgccacagagtggatgcccagtaaatactcattgaatgagtgaatgaatacatttaataaacatacacttgcttttttggaaggaaacgctgtgcagatcaggtggaactgtgggtggtatttctatttagtatgtgactcatctatattgaaggctgttaaatgtttaaagtgtatctttgtatggtagtttggttttccttatttctttcttttgttttcatgtcagaattactgtgtaattatgtcttgcaaaacacctcaaatggtggccaagataattttttttttttttgaggtggagtctcactctgtcactcaggctggagcgcagtggtgcaatctcggctcactgcaagctccgcctcccgggttcacgccattctcctgactcagcctcccgagtagctgggactacaggtgcccaccaccacgcctggctaattttttgtatttttagtagagacggggtttcaccgtgttagccaggatggtctcgatctcctgacctcatgatccgcctgcctcggcctcccaaagtgctgggattacaggcgtgagccaagatgaattttaatagggaagacaaacccaaaatagagatgaatgtttactgtggtgcattaaagcattaaagagttgtgaatgtgaagctctccccagtctttagtaacatcaagttatcttggtacaggaagcaaatagccacttctcattttgcctcaggtggtgaaaaacttcccattttaggccagttgagattgtatgtgctgtatggctatgaatgccaaatatgagtcttaaactccaaatatgtggctgagctaaaagtaatgttaaattgtactgtctgctttggtgtcttataatgacttaaaataatcaaagtaagaagaaatttttgtacctatgtcaactgagatttcatttgttttttttctttttcttcctgtagattaggacttataaatgttccccttcagagtactagccttgatttatcccattgttcctgccttttgctttctctgtctctggtgttgggatagcccaataaaaccaactttcttctatactcagcaattgcattgggagggaggagcagagacttttccttgtttcatttctagtcactaagagggtattttgagccttgaggtgtatatatcagagatcctagatacctagatcctatagttggtttactatcagaatcaccaggcaaacttttaaaaaaagtgcagattctgggacccatgcccaaaaattcttattcaataagtttagggtgggactgaaaatcaaactcttttgatgatactgatgtataaccaagtttggaaactactgtttgggaatcccaaatgcttgaaaccctttgtgagtctttggtgtctttgggctaaaattccaaaccttgagcatggtcctttgtggtctgacttctcctggtccattgctccagcttcttttctgcacgcgaccccctcacactcttctactgagccatggtaactacctgtaggttactgattgctcaatggattttcttaacttttggacatggtggaacatgttttgccccctccatgtcctgggtaattcctgttgtcttttggacttctctcacctactctgatagagctgggcttgtctgggctctcctggtgccttatctcttccctttcttttcctacttatcacactgtattgatttgtcctgcacatagtgggaataaatagatagttatgaatggaataagttgcttgctcagttttctgtctttcctactgtattatgagctcctttaaataagacctgcatcttttccactttgtaggcctcgtgcacgtgttagcatgtggagagcacttaacaaatcatagttaaacatgtaaattaataactgatattgaaaataaaagaatcctgtcctttgggtaaaagatcctgcagtagttaatgttctgagctggaaaacatttgcctattacaatagacatgtattttactagaatagaaaagaacctgggccataaacagtaattgagattgggaatattaatagaaaaacagagaaacatacagttaaattgttctgtatgtattttcaagtgttttattttattttcatataggtaataccatcgtatgttacaaattttaaagataaaatagtatacagggaagaaagagtctccttcctgcctcatttctcagccaccaatttctccaacccagaggcagtcaacgttttagttttatacctttcacaagacgaatggtaacataggctgcaggctgtctgtttgcttttttacttactggtttgtcttactggcaaacatctatataaatgagtgagtacacaaggagattctttttatctctttcattgtttcaaagtattccactctatggatatattccaattcattttactagtccattattgatggatttttaggtgaccgttttaaattccatatctgtgaattcattttttcacccatgtcattttgcgcatgcacatgtatatgtaggaaaatttttagagctatattttctaggtcattgaatgtgtgctttgtaatattaccaaactgccaaaatggggattatatcaattgttctgttaattgtcaccaccaacctcaaatacctgggaccttgtgggctccggatcaattgttctgttaattgtcaccaccagcctcaaatacctgggaccttgtgggctcgggccatcaagcagatggtctttcagactgtgcaatgtattctgtaatgtgtacatttggttgagatgagttgaaagtatttgagagtacctggaactctgaagctacctcagctacctgaagcaaccattgaggctgaattttcagaatgttagtgtttatctattaaattaatcgtttatttagggatatttagttaataaataaaataataaaatgtaaacattttctcattggagttttatcagtatttctgccattgatccttggaaaggggacttatatatgattagagtcaggaatttggaaatcataggaagtaacagcaaagttgacagttgactgaaataattaaaagaaggtctaggaggacatggttcttccttgtacacctactggtcatgcccaatgaggagagtcattcctcctatgctttccattttgttgaaggatcataacaggctgcactttctgatagaatttcacatagtgctggagccaggttcaccatcattttctttattttggtttgcatttctgtcttgaggatctaaatttttttcttaggtaacttttctggcatcagaaaattttctcaggcatacattttacctgaaatacttattatgaacaatgaatattaatcattctattgagactggcagaacctaggatcatgaacaccacactttaaatgtgcttttattttaagtaagagtcatttttttctgggatttttaaaattgttgataaaaatttaggaaattcagaactatattttgaaaaggaaagaaaatgtttctacctttatcatatgaatgcagaaattattgatatttggtatgttttctttgatcttgattatatagatttcttcacattcttaaacacttatactgtgcaatgtatgtagcatcctgaattttcaactatatgaaaattacatattttttcaggttaaaaattattttaaatgattttaatgagatattaatattctatattatgcatataacataacatatttaaccattctcatattgtgggatatttgtgtttctatttttagctcttttaaaatgtgctgcagctaataacttttctgtgaatgttagtctatgactatcttgctatgcatattgcaagtggaaataccagatcaaagggtatcaatattttttaaactctagatacaaaaatgccaagatgcttccagagtaagactctaatttatacctccatcatcaatttatgaagttgtccatatcatatattcttttaactttgtcccccattttttaaaaacatgcacaattatatcttcttgtttacattttaaacattattattagtgaagtagagtattttaaaagtttgttactcatttttctttccctttttgttaaatatctatccctgcctatccttttgtatttctgtctttaggagacttgctgctttttcccagagattttaatgttctttctatataaactatatttcaatggtcacagatattttctccaggaaattccagcttttttgccttttaattttctcagactgggtaaatttaagaatttatttatatgaagtctactaatcttttactttgtgaattctttctttgcttttgtgttgggaaatcctttctatattcaaagtgatgacaaatattcatccatattttctcctattttaaaaataatttcattaaaggataagttcttaaaggagtaattctataatgtatcaggtggtgggaaatgcagagaagcaaagtgaatcaagtagggggtatgtgaagtgtgggctgtgaaggaaggcctcgcttaccagatgcacctgaccagagacctgtggggggaggggagggagacaagccaacgtacctgatgctccaagcagagggatcagcaaatgtaaaggtccttagtgggagtatgctcagctcaagggctatcaggaaggcctgtgttgggggagcagaatgagtgcttgggagagagcaggtggaaatgaggcctgaatttcagaataggccgggggcaggagcattctagcctctcataaaccattttgggtgcttgggtttttactcttaatgacacaggaatcattgcaaagacttaaataggggagtgacctgacatgacttacttttaaaaaggattactttaactgcttgagaaagcatagatatctaaaagaaaatgtccaggcacagggatcctatgtataccctccttccttttgaaatttgtgctttcttgcttataaacttgctataatctatacctaatctattaaaaacatatttcaaataaataagaaagagatggatgtagcagttcagttgtgttcagatgtatgtaacaaaccctgctgcagaggttgaatccagtggggctttatttttctctcatcacaggaaacctggaggaagacaattcaggactagttcagcagctcaaggaaggcctccaggatacaggcttcttctactgtcctaaacatgtatgtggctatcatcctcatgttgacaagattgatgctttcctccagacaccacattctgcatcctaggcaggaggaaggagatggtcagaagacagctgaaactgtcttttcactaggaaacaaaccattttcctggatcctcagtagtaggcttctgattacttcatggccagaactgggtcataccactattccttgtgggcacgttgctgccttgaataccagctataccttcttactaaggaagatggaactaacagtgtttgtgataatggatagcctgtagaaaaatggatatagatgagtctcaaaataaaaatatacaaatatacatgtcctagtcaatatacataaaaattacaaaatctgtaatattccaaaacgcaaactaaaactgtcagttaccactttgtccgtcatgttggcaatttaaataaatcgataacactcaaagttagcaagaataggtaaaatgggaatgttttatggcgccagaggtataaccttcctgggaacaatttaatcattcatgtggtgtgtatgtaagtgtatcttattgagggtttgctttgcatttccctgatgactaatgaagtagaggacctttgtacaactttctaaccatttgaatttcccctttgatgagctgcctgttcaagtctcttgaccatttttctacttaattataatctttttatataaatatgaagaggttgtttatattttctagatacaagccatttgtctggaatatgcacggcaaacatcttctcctaataagtagcttgccttttcaaagctctcttaataatttattttgtgaacagaagtttttaatattatataatttaccattcttttattgttaagtacattgtatgtcctgtttaagaaatatttccttactccaacttcatgaagatattttctaatataatgttctagagatttgtttttaccttcatatttattaaaaagactgtcctctacaattacttagtaatattacctttgccctaatttgaatgttttcatatgcattggtttctttttgagcttttgcttctgttctattggtctatttgtcaatcactgcacctgtaccactctctcttagttaccatagtttttaaataacttttggtatccaaaatttagcaggttcttccccatttttttcctgttcagaacctataaagtctttcatttacctttactttagaaattacagcatacttccgtgacctattaacttccaatgttgactgaagtatgcataaatgttttacgtgtatatttatcaaaggctaaaggtagtatctctgtcctcttcccaaataacgcaaggatctaaataccatttaactacaatcttcccattcttacatataatattacaattgttcagtattttacttatacctgctttttgatactccccaaataaaccattattactattttgttgttgtttttgtagccagtcagtagttctaggtagacttaccaacatgacaaccagtttatttatgtattattgtttttgcattttccatgttccttccggattctgtctggcttctaagaaggagcatcttttatggacagttctgagtgataaaatctctctggcttactttctgaaaaatatctttattttgcttcattcatgaatatagtgttgctaagtatagaattctaaagtgatagttattttttcttagttcttagaagataatctttttggatgtccttaggagatattttttcatcgctttctgtcatcttctgtagctgatgaaagaagtctgtcaatgtaattatggtttccttgtcaataattgttttctctgtttgctttagctgtttcctcttttctttggaagagtgcagttttacttgttgtgttagctgtggtatgtttagaaatactagagacccgtgttttccttctattatggaaagttttcaaccattactttgaatattctctcccttattctctcctcttttatttttagaatttatgtatacacagcattgagtattctgtgcctcatgtttcttaatgaatctttcatattttttatttcttcatttctccatgctgcattctgcatgattttcccaggtgtatcacctcccttattacctccctctttagttggtgtcttttttgttccttttcaaagcaaccttttattcccacagagttataaactagtcctttctactcattcactgtatttatctaatagtccattttagattttcctttcttcagttgtggggatacaaattattgtctatttttatctgcttaatcttcctcatcatgttccatttccttttgtgtttcatagcttttctttgtgagttcctcttctgcagaagttttgatagttgttgtttgtatgtacatttttgaggaggggattccatgtgtcctggcttctcatggactgggtggcattttgaggtctgtggcttcgtgtagggagactgaatgctagctttcacctcatgtggtcccaagttcatttttttttctcctcatacgctttatggcccaaacccctaagttctaaagtctaaatctaaagtccatttgaagtgcatcaattcctgcctcttggtcaggaatcaaatgccttctttgtttctatagctggggcattccatttcttagtttcaagcttggctttgtaatgctttctttgttgtatttgcatgcatcatttaagtgtgttagtaatgtcattttggtccatcgtatccttttttctcccctttatttgttttattgtcaataacttctactttctgcctttagctttaattattagttactaaaacaactttatgctaacatcagaggcttataaaaaatagaaaaatttccccataatcccatattgagtcaaaatgatctatttttattctctagatatccttcaaatctttattcatagggtgctgttgttacaatcatgccatatatttaattttgtgttataactctcttctggtttacattttgcccgtatttctttgtaatcttcaaattaccattttaatggctctatgatagcctcttgaattggtgtactctatcatacttacagagtttgttttctgtttttccttgtttatacaaatttccccagaatatttttgcatttgtagtgtttgcattattttctgcggctaaaatctcagaagagaggatgttaaattaaaaattcttaaccatgcattgccaatttgacctttgaatggcttttctcattttacagtgacattaggaataaattcacataccgacataaatttaatacctactgtgtgggaagttctgtgcattttgagtggcatagtgacaaataggacctgcttcaagtttcaaggaatttacagtgaaatcaaggatatagatatactatcaacttttataatattaggataaatggagcaagtggtacagtcaaaatctaatcaaagaaggaattttatagaagaacttgtatttcagccagggatagaggaaggggtggagtttccctgtacaaagggaggctggataatattccaggctgagagaacttaacggagaaacagccagaggtatgaaaaagtctacagtgcatttggaaactattgaaatcgatggtgtggctggaacaatgggtgagagaaaggagcttgtaggagacttgaagtactttgccgaaggattttggttataatcagccagaattttcatttctgccactaattgcaaatgctggtttgagaaaagcatgcactgtagattcatggtagcctgtgattggcagaacccaccagtctcctattttatagatgaaaacaatttctacggaaattaagaaaattttccaagtttacactaggagtgtatctgaaggcacacttgctccctttttcaagaaaaatttgtttagcatctgtttgtaactcagtagtaagtgcttggaggatagaaagtaaatacagtatagggtcaacttctgtagccagctgggggaaaaacaaatcaatatttgtaaaatggcaggataagacaatgatagaaatgagtaaagggtattttgagaacacagaagaggggaagctatttcagcttggcaagaaggatgaagagtggaagatggtggctctattaaatcataaaggatggataggaagaagcttgccaggtatacctcacccatggtgagggaagggagtttcagcctgagcaaaggcacggggtaggaatcagcatggtggatgtgggaatcagagcagcttcgcattgtggaagaatcacatgtgaggcagagagtggcaggatataaaaccagggctagatggtgtttgctatggtaagtagtatgggcttgatttttttagggctgctgaggatcttaaaatatttaagagggaaacttggcaggactttctgattgactggatgtgggagtaaggatgtgagggagagaagagcaaaatatgattctctggtagacttcttctttcttctctagttagtgagtttatcaagatttaagatggtagtggttttgtttcagcagaagccatgcagtgtggtgtcatgtggcagtggaaaaaccatcatggggcgtatggagactcaaatgttcctgaaatgcctgagagaacatccagggacatttggaggtcactgccagaggccatgcacattgtccagttttcagtggtttctcttcgttgctaagaagcttgaacatatacagaatgcatttaataatgttcagaaaaccttcttaagtggacaatctcaaatgtacaacagacaaagcagaatcagatatttttttggatggtatacctcattagtacagaataattacaacattaggtgataataatagcaactgatatttatggagtactcactgttttccatgtaggatgttaaatgctttacattcgtgatctgacttaatccttaccataatccctactcaaggaaacaaaggcacagagcatgtaattacttgcacacggtcactaactccaatgcaaaccctgaggcatgccaactccaaagccctcatttataaactccaggccatattgcctccccatgaagctgatacgcagacaagtgtggtgccactttgagattctctgggttcagctgtcaaacaatgacatcattaaattatccatgtaaaataagaagttgagtcctctatatccgctgtgtttgaggagtggcaggatgtgggatgaaagaaagaaattggattgcctctgaagccctctgaatttgtaatagaactacagcctcctcaaaccaaaattataaaataacctacatcactctgaaagaattttcttactaaatacgttaatgtgagaagacaaaaccaaaccaccaaagataatatttgaatattgataatattcaaacctcatttgaaatcaaaccactagaaccagaaaagaaaatgaaatgtgactatttaattcctcagcagagatatatgtatgaaaacataatttctatcactggtgataggagaatttgatattgaggacttcatgagttgggaagagcgatttcttaaatgaaggtgataaaagcctgtataaataatacagtcatgtattgcttaatgatggtgatatgtctgagaaatgcattgttagctgatttcatcactgtgggtacatgaaagactgcacttacacaagcttagctagtatagcccactacatagctagggtacatggtatggcctgttgctcctaggctgtaaacctgtacatgttactgtattgaatactgtaaaaaactttaacacagtggtatttttgtgtctaaacctagaaaatgtacagtaaaaatatgatattataattttatgggaccgccatcatatatgtggtccgtcattatgaggctcatgactgtctaagataaaactgtaggcctcataccaaatagagaagattggcaatatctatatgtatatgggtgtggattgtataattaatttctacttagtatcctttgcttcttagaaactttaagttccctcaatttaaaaaaatccttcttgatttcttttgctttttaaagatattttgatgtaaaagagcttttgtttttattttctttgcctggttctccactcaaaaatttaatgcctgtgtgacttagaattctcataagatttagctttctgtctttttacagatatgaagtggcatagtaggatttggggtccattttccctcagcttcctatttcttgccagtagcttcattgcaaaaccactctaccatctgccctgcttctttttctgcttccacccccagttccctcattttctaattactcccaacaggagtgactcaaacatatattggaagcaagattcccacagttgccaaataggagcagggaagtgccacgtactaggttttcacaaaagaagtcattatgtatctggatttttatctgccagagaagaagaggaatgcttgaggaagtcaagtctcagggcaaaaaagtaacataataaacaaattagagaatggcactttcacattaccatttctgttacattttgtggtagtctttcaggctgttcacaagtatatggctcccttccttttttgggctatagtacagtatcgttccgtgctagtatagttcggtccaggctcttctgcactccactgaactcggatatggccatatgacttgacttgttttagccagttaaatgtgagtggcagtgacaggtgtcacttctgagaagaagctttaaaagccagtggctttaagagcatattttgatgtcttatttttgacagtagttgctctatcaacttgagtctttaagtgacagtgtgaacagagcaccctccccataccagctgactcataatggccaggtgacatgggcaagaaagaagcctttgttgttttaagtcactgagatttggggagtaatgttatggtggcagaatctagtctgtcctgactaatacactgaaacagttttagcatgtataatctcatgtagttaagagattcaaatcataattcctccgatacatggatcaaagataatagaagacaaacatttaaagtgtttttaaagcattcactcaaaaagaatgtattttgtttgcatccatatagtagcatctaacctatcgcacaatagttttgtgttatataatagatctgccactgcttcagagcctctgtgagggcagagataaggtctcgttcttttttaatcctggcacctggcactaggtgtggcatttagtgggtacttaatactattagattagtgaagaggactgaaaactgcctggcacatgagaggtactgaataaatatttgtacagatattaatgttgttaatatctgtaccaaatattcagcacctgtcattaaaattcatccatcacctatcataaaattaattagcattggaaattctctttgtacaatcacaaataattgtacaaagtgcattttcaacatttcaaccccttggtagctactgggctaatttttcaggcacaaagaagcagtttaatgtggaccctcaagttgtattttttcctgccaccagggcctttaaagccttacttaaggaagtaccattatttcaactttggcaggagggatgatacatttgcatgtaaactggtttggagtttgatgctgagcttgcatcgtgaccacctttccactggacattataattagggggaaattctgatgctaaagcttggccagtgtatagttattaattcaaagttgattatctcaccagggattgtgaagagtttcatttggttttaaaactgcctaatacatgttattctaaggtgttgggaaattatcagtgtggctgctttgtgtgctctccttggtccagtgaaagcttcaccttactccttggcccctgccagctcctattttatctgtttcttcccaggaaggatttcaggcatctgggaacatacatgtacacaaggttgttgtcatcaggtccctgcttgcctacttccttcttcctaaatttagattctctaaatggagcttactttcctatgtctctgtcctgtctaagcagtttctccattacccaaaatgcaattccccaggttcattaattcattctcaaatatctcttaagagcctcctctataccaggcattgttcaaagccttgtgagtacagctttcctggaacttctatttcattggaagagacagatgataaataaaaaagtaaatacagtcatgcatcacttaacgatgagaatattttctgagaaatgcattgttaagtgattttatcattgtatgactatcacagtgtgtccagagttcgttccttctggtgcatttgtgttctcgctgacttcaagaatggggccgcggaccttcgcggtgagtgttacagctcttaaagatggcacagacccaaagagtgagcaacagcaagatttattgtgaagagcgaaagaacaaagcttccacagcatggaaggggacctgagagagttgccgctgctggcttgggtggccagcttttattcccttatttatcaccacccatgtcctgctgattggtccgttttagagagcactgattggttgattttacagagcattgattggcccattttacaaacctctagctagctacagagcactgattggtgcattttacaaacctcttgtaagacaggaaagttctccaagtccccattcgaccaggatgtccagctggcttcacctctcaacagtgtgtacttaaacctagatggtatagcctactatgcaccttgggtatgtgatatggtctattgctcctaggctgcaaacctgtacagcatgttactgtactgaatagtgtaggcaattgtaacacagtgataagtatttgtgtatctaaacatatctaaacatagaaaaggtacagtaaaaatacagtataaaagataaaaaatggtacacttgtataggacatttaccatgaatgaagcctgcggaactggaaattgctcttgatgaatcagtttgtgagtagtaaatgaatatgaaggcctaggacattaccatatactactgtagactttataaacatcctacatttagtctacactaaggttaaatttttttgtttcttcactgttaaattaaccttagcttactctttttgctgtataaacttatttaaaaaatgtttttgactcttttgtaataatatttcacttaaacacacattgcacaggtgtacaaaagtatttcctttcattgcattcttattctataagtttttttctattttgaatttttgttctttaaactttctttgttaagaactaagatacaaactcacacattagcgtaggcctacacagggtgaggaacattagtatcactgtcttccatctccacatcttgtcccactggaaggtcttcaggggcaataacatgcatggagctgtcatccatgataacaatgccttctggaatacttcttgaaggacctgcctgaagctgctttctagttaacttttaaatttaatttaattttaatttttaaatttgtattcttttagagccacggggtctcattatgttgcccaagctggcctcaaacacctgggctcaagcgatcctctcacctcagcctctggagtagcagctggaactataggcatgtgccactgcacccagttaaatttttaaataaatagaaggagtatactctaaaataacaataaaaagtgtagtacagtaaatacataaaccagtaacatagttttttattatccttattattattatttgagacggattttgctttgttgcccaggctggagtgcagtggtgcaatctcagctcactgcaatctccgcctcccaggttcaagtgattctcttgcctcagcctcataagtagctaggattacaggcgcctgccaccatgcccagctaatttttgtatttttagtagagatgggatttcgccatgttgaccaggctggtctcaaactcctgacctcaggtgatttgcccacctcagcctcccaaagtgctgggattacaggcgtgagccactgtgcctggcctttattatcattattaagtattatatactggacataattgtgtgtgctacacttttatgcaactggcagcacagtaggtttgttcacatcagtatcactgcaaacatgtgagtaatgcattgccctatgacattataatggctatgacatcactaggtaataggaattttccacttcggtataatgtcatgggatcaccatcatatatgttgtccatcattgactgaaacgtcattatgcagtgcatgactgtatacggtaagtcaggcagctgtaagtgctacagtgaataataaagagggaagaggtattatgtttgtggaagtagggtgggacagtgttactaatcatttcaggacaggaaaagcctaactgataaggtgttaggtaaacagctgaaaccttaaggaagtgatgaagaaagccacgagcacatggggtgaagaggagctagaaaggttcccaacagaggggacagcaggagctgaggcaggagcatgcttggcaacttcaaagaagaggaagcaggccagagtaattggggatcagagcaggatgggctgaagtggattatacagatcttgtagggctttttggtcagtgttatttagtctttagcctgagtaaggtaggaagctgttgtgagtttttgagcagagggtgccttaagaggatctggctgatacggtaagaactggtcaccagaacagaaaaagggtgaccagttagacatctgttagataataattcaggcatgaaatgaaggcattgactttcaatactcagctcaagtgttaactctaactaggaagcctctcctaactcccctaggctgagttgagtctacctcttttgagtttctgtaacaatcttactcttgaaatgaaggctttcggctgagttcacttatatttggaagctgactatatagttgagaggtctctgaattaatttacaattagaataaagtttatttatagataagtaaaagggctaacttagtatattatgtattatatattcattatgtacaaatatacgtgcattatattattaaaacttaacaataattgtggcaattacttaaaactttgtccattacaaagatttttgggacaggattattttgataaggtttaaaattgccagaaatggtaaaataaaaagcagagtgactcatgatgggttttattattgttttcaaattctttataaactaccccgtaatgcctatacccacagtggactgatctcactgccttgtcttgatatatcactgatggtaagatcttttattcaaagtgccttgagcaaaagaaaattccttcaggcacggtttgatccagggagctcgaacagtgtcatcagagctcctccaaattattccaatctgttttccatctgttttcctctgggttggcttccttctacagcaggctgtctacttttagttgcaagatgactgacagtgactccagccatccaaatgcctttctccaggtcactgcagcagaagtcccaaaatatgactctaacaatgtcgtatgcccgtacttgaaccaatcacagtggccacaggaatgcaatattctaattggcctttgaaagtcaatattctaattctgacaggcttgggtcacttgcccccatttggagctgggtatggggtaggtccattttacacgaattacatggaagtagaggaggaaaggcaggcccccaagaaaaattaagattgctgttagcagaaaaagaggagatagatatgggatattcaagctacatccatgtactacaagcaattatttctgattcctatccagaattctgtcctaaaagtgttcccacttggtaaatcaggtacatagatatgaagttctcacccccgcattgattgccactgtagcttcctcttcctttcgtaggattctcagcaggaatcccctcttcagcctctcactcacacacccacacacagacacctttcatcataagccctgcttttgcctcaaggagctttcatattgtgtgcgttcagtaaagcaaaaaataattcctcacaaaatcggcattttttattatactttaagttctgagatacatgtgcagaacgtgcaggtttgttacatagatatacatgcgccatggtggtttgctgcacccatcaacccgtcatctacattttaggtatttctcctaatgctatccctcccctaacccccgacaccctgacaggccccagtgtgtgatgttcccctccttgtgtccatgtgtcctcattgttcaactcccacttatgagtgagaacatgcagtgtttggttttctgttcctgtgttagtttgctgagaatggttttcagcttcatccatggtgtatatgtgccacattttctttatccaggctatcattgatgggcatttgggttagttccaagtctttgctatcgtgaatagtgctgcaataaacatatgtgtgcatgtgtctttatagtagaatgatttataatcctttaggtacatacccagtaatgggattgctgggtcaaatggtatttctgattctagatccttgaggaatcgccacactgtcttccacaatggttgaactaatttacactcctgccaacagtgtaaaagtgtctatatttctccgaaaagcaatgacaacaaaagccaaagttgacaaatgggatctaattaaaccaaagaacttctgcacagctaaagaaactatcatcagagtgagcaggcaacctacagaatggaagaaaatttttgcaatctatccatctgacaaagggctaatatctataatctacaagaaacttaaacaaatttatgagaaaaaaacaaccccatcaaaaagtgggcgaaggatatgaacagacacatctcaaaaggacatttatgcggccaacaaacatatgaaaaaaagctcatcatcactggtcattagagaaatgcaaatcaaaagcacaatgagatatcatctcatgccagttagaatggtgatcattaaaaagtcaggaaacaaaatttgcattttattttaccctgttgatgctgtataaatccaggtctcagcaggaaacagatggaacactcaaattaggataattcaagaagagtataataaagggactatttgcaaaggtgtgggtatcgtgtaagaaaagcacagggacattacagcgctgtgggactagtaaatgaagctctgtttatctcccccaggtctgaaaaaggttgggggaggagatagccattgccagagctaccagacttggtggggagacacagccagctgtggatgatttcataggaaagccactggggtagtaatactctgacatctctctcccttagctttcctgtcttctacaagtgcctttcattggcagaagccacacggcaggggagcccattgacagagtccattccagtcagcctctagagtggagggcagggttgacaagagaggagagaggatacggaggggaagtggatgttatccagaagagtccatctctttgtcctctcagtatatgtgcttatctttaagtgaaaagttcctgttcccttcacagaggacacaggaagtctcatcgctatggctctatgttggataattttactttaatcatactgcctcttcaaagcagtggcaggggaataaaggaataatggaaggcatagcacctgcagttcttgattctgaagcataaggtgtctactctcaccatgactccacgttccccttaccttctccagctcctcagctggatgtggctggatggcggtgacccaaaccttcgttctgcagaatctcagtgccacccctgcccccacctttttggatagcttcagtgttatttggttccaagcatggtcctcaatgttgtatcagcaacccagctgctccctggtagttgggcttactctgtaagtccttttctctgtgttagttcagtaggatgatgaatccaaactacctaggggctgtctttgcttccaacttaatggaattgtggctgtgtttcctgatagaagcatttctacattaaacatgaggacttccaaggtcatgtggtcaagctcaaggtcatagagatgagaagcaaaaattctgtaagtggatagttagtgattagggttagagttaggataagaacactgatacctctccttgttcctggtcctgtgcattctggctgaggaggagatacgttatacaaaatactgtttatgtaaaatgctttttgaatgcatatactaaattctgtgggacagcagcccaactttgtagaagttgtctcctctcctagctcccactgtaattgagcctttgctctagacactaacaagacagagaggcctgatacagtaaaggtgtactgttatccgcagtaagcaaatggatcccgattttctttactgatggggctggaggtgggaggtgagggcatgagtacattagtctggtcagtagctacataccaggcaccacactctgtgttgattgctgcaataaaaatatcacttctggagccatagttgtgattggcaatatcacttggttcagtttatgactcttgcttaacggtcttcatgtcttcagaccatcttgtatcagtcaaggttctccagagaaccagaatcagtatattgcccagatgagcattaagcaaactggagacccaggagagccaccagtggtatattttcagttcatgtccaaaggcctgagcagtaggcgagccaatggaataaggtctagcctgagtctgagtccaaaggcaggagaaaactgatgccccagctcaaagacagtcgggtgtagagagttagttcttcattattcagtccctttggtctattcagtgtttcagtgggttaaagaaggcctgtagaggacaaactgctttactcggtctacccattccaatgttagtctcatccagaaaaactctctctctgtctctctctctctcacacacacacacacacacacactcagaatgacgtttaaccaaatatatggacaccccatggcccagtcaggttgacacataaaattaaccagcacacatctgtctgactgttgctgaattaaatgaagataacataggaattatgcctacattctttgagtcctggatagtagcaccaagctctgcaattcctccaggtgtgtggctttgttcttagtttattctacagggaggggcagttttaggagtgtcattttgcactctttcattgccctcatgcaatgaatcagtaaaccaatgtagtgttttgccagttgataaatatatctgcttctactatacaatatggtactggggaaataacatcaggatggatctctggtgccgttggacccactctgagatggactcaggccaagactctgtcacctgtctccacaagcctcccatttgaatggtgtaccacagcaatatttcagagagcaacttaagtctagacccacagctaacctggggaaagcctgagcctttctttcttcagtgcacagtcaccctggaaacagccataggatgctatgtgggaggcttgaagggcgagtcacagcatgcacctgaggcagcattgttgggtccctctcaaagacacccagccactttctctattgagaggctctaggtcagtggaacttggtgagaggctaaaatccttactatggtgactgcattaggtcccagcccacgagagtagaattttgtctcttctatatgccaagtagcaccttagtaggtggtccatctatttttgtttctatttctgagattatttagtcaccaccacagatccctgtggaataagattttgattaccactcatccctgtggtttgtttcatttaccttatttctgatagttaaatgccgccaaccagttggtctcccttactcttgggttcctttatctccattgataacaaagacactgattccatttcagccacccccatcccattttccaggctgcagaagaaagccaccacacccagggcagccaccacaagctttccaagaatactcctcctcccccttgtgggagttgtggttagagaatggctgttgctcatcctaggtccacttcaccactcccatttctgagacttcagatttcttcctctccagcagggatcagctcaggaccagatcataaatattttaggctttgtgagccaagaggcaaaattcaacaggtattcttgccaaaggctgatagttttgtttgtttgtttaacatttaaaaattgtaaaaaccattcttacctttcaggccatacagaaacagacagcaggccagatgtggcccacagtctgtagtttgccaacccccttctccacaggatgccacagaagttcagttgaaccacataaacacagactacccttgagtccaggctttaattgtccaattaggtagattactgatgccactccctggtactcaacctgaaacactgaatcctaaatccggggtgagtatatcccatgagtgaatttaatgagatcaagccttatgttttgtcctcattgatccaatgcctttcgaaactcataccttctctcctggctcctgccaatatagactggtgtgaggttctataaatcttatgaaagatttcttatgtaagggatgtaggctgtctcatatttctccctctgagctgtgcttggacctgagtcttagatcaagaggcagtgagaggtgataggaatgagtcctgagggaatgaccagcaggttattatgcatggaaaagctgttcttcttagacagggaggacaaatctgtccccatgggcaagaagattttgtgggttcgaagttttcatatttgtccgtgtctgcccaaatgatcgcaatccagttatcagggtcacattcccttgatatgagacccctcgtatgagctgatcatgtacttggtgctgcagctctgcaacttttgttaggctctgagctttgtcctcagccatatctgccgtgggactctggaaaatgaggggttgctgcagttataccatctgaatagctacagggactttctgattttttctatgcgtgctctcaattgtacattcagagatttcagtttctcattttccttttgtacaccttctaaggctgtgagaagaagccaagagactcaacagtctttatagtcactgctgtaaccatagcaattaagtgcctctgccactgacctcccagcatctccccttccacctgcatttcatctcctaccactgctagagacaacttgaataactgatgtcaccacttgtcctggattatttgttttctgttttttcctggcaaagtggttctacctgtgtttctcaacaacatgatcaatctaatcctggaatcccacttcaggatctcaatagaaaacagaatgctcaaattgggatagttgaggaaaaattcatgaagggttatagaggcctaacccagtgatgatgaggagcagttactgggacttggagacaggcataactgtggaaagggttgctggaaagaagctgggatcctaagttaagcaacacagtcatcacttttgacattttcctctaatattttgtgcagttatgcagcaaattgtatttcaaaggtaaaccttatttaaaaccccatagcatcatatgactcctatttttaaaagtctgcaaaataattacatccctttctttagttatccttatcatattctacagctgatggaattcagttaagcagcattggttgtctattcaaaactaaattaatatagtgaggatttattttaagttttcattatttttttttacatcatagcccttgaaacatgacagtttgtcattccatgtatttgcaggatttttttttaagaaaaccatcctgattctctattttcttactttcaaataccatcacagtataatttattttaatcccttatcctgtgggtcacttttatctgatgattgctttcatttaaattttaattggggtttgaaaactctttttatggactggaggacaataagtaaacttttgtagtatggcagggtgatctatagtccaggaaatcaatatctaggcttctatatgcaggagctgttcaaggcaggaactattttcttatttatttttgaagtcacattagagttccaaatgtataattatacaggattccataagttaatagtataggcttattggttttaaagaagtcttcttcttcacagtgatattttttcaggtattattgagatgtgtccttatttatctggagaatagatatacttattctctgccttcatttcgttattgctacctagtggtaggagatgacaaaaaacctcatctaataggtgtcacttatacctcttaacatcactatttccaaatattaattgttccttggaaatccttttactagggctgttcttgatggtctgtctgcattcatcactttgtgattactgagttttcatatcaccttaaatctttgatgagctgttcctcaaagaaagaaggtcatttatcatgtctgttttactgaaagaaggacaagatgagacaaagaggtattacataattcagtgtgcctatgaagctttctaggccgtattccaaaatagatagcagtttcttcaatcaaactctgtataagataaatgagatattgtttggtaagaaccccccaccccactttgtgccaaacttgttggcaccctgcagtttacagcatgaaagtcagcttctctgcacagtgatttttaagactgctaaaggcaatcagctgttcttagagctgtgccccaatgcactttatatgcccttctgttatagcactgagcacctggtggtttgtaaccttttacaagtctttttccttctgtagactgaatgccctgacagcaaggactgttaattattcaccattctgcatacactctgattgggtggcttacaaacaacagaaatttatctcttgcagttttggaggctgggaggtccaatatccaagcactgacagatttggtgtctggtgagggccagcttcctggttcatacatagccatcttctcactgcattctcacatggtgcaaaggatgagggagctctctggagtctcttttataagagcactaattccattcttggtttggggtgggggctctgcactcatgacctaatcacctcccaaaggtcctacctcctaatgtcatcacattgaggattaaactttcaacatatgaattttggagggtcataaacatttagtttataaaaaagggctgcttggtgtatcatggccactgaataaattttgagtagcaatcttacctggtatgccattgcatttatatatgattgccactaataactcaaattactgaatttatgttgtatcgatgatgctgttttcctagtcttagtattagtagccaaatggccttggattaactttctcaatattattcattcattcattcattcaacatttattgaataccttactaaatggcaagctctgaattaagctttgagaatccaagaagactaagactttgttcccacctttcccttcagcttccctttcctaagatagacataataaaacaattgcatcacaacatgatggatcctgtcatagtcagagtggaaatagaaggagattgagtgggacaggggagttgaaagatgcccagcagcccccagggagagtgaaaacgtgatctcaagatcagctttattttctgaccaattctcatataccaagtgtggtcaggaacatatatttatgtgtctaggtagccagttgcatttcattttatgaagctaagtgattatgatgattagctatgggattaacatacgttttcagctaagcaagtcattaaaaacaaatgcaagtacaattatctcctcctttagcttcagtaaattaacatgttatagtaagaaccttgttcatttgtatgatgctaggaaaaagccacacaaatgacctgctttttactttatatttcggcagctataattttgtaaaaatgggacatgttggccatctgaaaagcacttagttgtataacttctacaagtcattgaaagtaattatcacatcataatccaatgttttcctgaggttcccatgggaagtaaagtatattctatcctgatgtggtttggatgtatgtccctgtccaaatctcatgtagaattgtaatcccagtgttggaggaggggcctagtgggaggtgatttgatcatgggggcggatttcctccttgctgttcttgtgatagtgagttctcacaagatctggttgtttaaaagtgtgcagcacctccctcttgtctttcttcctccttctttggccacataagaccatgcctgcttcccttttgccttctgccatggttttaagtttcttgaggcctccccagccatgcttcctgtacaacctgtggaattgtgagtcaattaaaccttttttctttataaagtacctagtctcagttagttctttatagcaatgtgagaatagactaatacagcaaattggtactgggagtgggcatttctgcaaagatacctgaaaatgtggaagtgcctttggaactgggtaatgggcagaagttgaaagagtatggagggctcagaggaagacaactgggggaaagtttggaatttcctagaaacttgttaagttgttgtaaccaaaatgctgatagcaatatggtcaatgaggtccaggctggggaggtctcagatggaaatgagtaacttattgggaactggagcaaaggtcacttttgttatacactaggaaagaggttggaggtatcatgcccctgccctagagatctgtggaactttgaatttaagagtggtgatttagggtttctggttaaagaaatgtctaagcagcaaaacattgaagatgtggtgtggctgcttctagcagcccatatttatatttgtgagccaagaaatgacctggtactggaacttatatttaaaagggaagtagagtgtaaaaattttgaaaatatgccagcccagctatgtggtagagaagaaaaatccattttctggggaagaattcaagctggctgcagaaatttgcataagtgaaaaggagctgaatgttaatagccaagacaatggggaaaatgcctcaaaggcatttcagagcagctcctcccatcatagggtcagaggcctaggagggaagagtggttttgcggactgggcccagggccccgctgacctgcgctacctcaggacactgctccctgtgtcctagctgctccagctccagctgtggctaaaagggccctagatacatcttaggccactgctacggaaggtgccagccataagcgttggtagcttccacatggtgttaagccttcttgtgcacagagggcaagagttgaggcttgggaacctctgcctagatttcagaggatgtatggaaatggctggatgtccagccagcagtctgctgcaggggtggagtcctcatggagaacctctactagggcagtgtggagggaaaatgtgaggttggagtcccccacacagagtccttcactggggcactgccttgtggagctgtgagaagagggccactgtcctctggaacccagaatggtagatccactggcaacttgtaccatgtgcctggaaaagctgcaggcaatctataccaatccttggtagcagccatgggagctgatccctgtatagccacaggggcagagctgcctaaggccttgggagcctagcccttgcatcaggtggccaggatatgagacatgaagtcaaaggagattattttggagttttaagtttttttattttttatttttatttttttgagacagagtctcactctgctgcccaggctggaatgcagtggcatgatcttggctcactgcaacctctacctcctgggttcaagtgatgctcctgcctcaacctcccaagtagatggaattacaggtatgcaccaacctgcctggctaattttcatatttttagtagagacagggttttgccatgttggtcaggctggtctcaaactcctggcctcaagtcatctgcccgcctcagcctcccaaagttctgggattccatgcgtgagccaccacacccagccaggagttttaagctgccctgcttggttttgaacttgtatgggtcctgtagccccttagttttggctgatttctccttttgattgggtgtatttccccaatgcctgtaccctcattgtatcttgaaagtaactaacttgtttttgattttacaggctcctaggcagaagggacttgccttgtctcagatgagactttggaccatggagttttgaattaatgatgaaatgagtcaaggctttgaggaactgttgagaagggatgattgtattttgcaatgtgagaaggacatgagatttgggaggggccagaggtggaatatgtggtttgggttttgtgcctgcccacctcatgtcgaattgtaatcctcagtgttggaggagggacctggtgggaggtgactggatcatggcggtggattttccccttactgttcttgtgatagtgagtgagttctcgtgagatctggttgtttaaaagtgaaacccggggtacaccatccagacaggaagccatgaagagaaagggtaggtgatttcacgcaggaatgttctatgagccagggcagcatacatcacttctgaccagaactcagacacgtactacaagggagcctagaaatgtcgtctagctgtgtgtccagaggaaaagaaggaactgggtttggtgaataactaaccacaatgatgataaacttttaaaaattaatcacattatctataactgcccctaaactgcttcaaaattttcacaacagcctcattcacccaatttcctattgacaaatatttattgttctcctgtaatgtgtcagagacattgagccagagtggagacagtagacgtggtaaaaagttgatcagattactgatatattttaaaggtaaagtcaataggatttgctgatggactgaatctgggatataagagcaacagaggattcaagaatgactttcagattttgggcatgagcaactgggaggataaaggatgccatttattgaaatcagagcactgaggtagagaggtcattttgtgggttggggggtggggataacttaacagtttgctctggccatgtcaagtttgaaatacctcttagacatcctagtggagatgccaaagagtcagttgaataaacaaatcttaatttttaaacaaagtacaaccagagccagcttcatgagtgggcaacccatgcagtcccacagggctctcctacatggaaaggtcccatacttgatgtaatggtttactgttgcagtcttgaaatttttaataaattacttagtaagtgctccgtatttttatttttcgccaggccctacaaattatgtagcttgtcctgggaggaattctttttgaggcagtggaaacttgtaagtgtggggttctgaaggcaaggaaaagaaaaccttttgagaagaaagagattgtgagagatcaaggaatataaagaccaaaaaaaaaaaaaaaaaacagtgggaattatcaagatggaattgctagtgatgtcgacaagagccatgtccaagggtggagtgggggaggataaaaatcctgttggaatgagctgaaaagaggagagctgcctatggccacagtttccccctgcagggagcagggaaatgggatgatagctggaaggttgtgctgagtcaaagcatgtttttgaaaaatgagagaaattaaaaatgtttgtctgctgatgtgagggattcaggagagagggagaaactgatgatgcagtggagaaagggaagaattacagggaaagtacgtaagtcaaggacaatggaggacatgtggaggagctggctgtaagaatagtcatgtgattccatttcaaaagcagagaaggcagatttctcaagaccatgtattgaagagactatcctttctccacatatgttcttggaacctttgttggaaatcagttgaccataaatgcatgggtttatcactggattttctattcccttccattggttgatgtgcctgtttttatgccagtaccatactattttgattactttagctatgtaatatgttttgaaatcaaataatgtgatgcttctagctttgttctttttgcgcaagattgccttggttgttcgggatctaaaaaagtaagaaattttgtcatttgtgacaaaatggatgaacctggaggatattatgctaaatgaaataagccaggtactgaaagacaaatactgcatgatctcacttatatgtggaatattaaaaaataaaactcatagaagcagagagtagaatgatgattgccaggggctgagggtaggggacggataaaggagagctgttgttcaacgggcacaaagttttggtgagacaggaaggctaagttctggagatctattgtacagcatgatgactatagttaataataatatatggtatatttgaaaattgccaagagattagattttaaatgttataatcacaaaaaaagataagtgtatgaggtgctggatatactaattagcttgatttaatcattctataatatatgatattatatatatatatcaaatcatcacattttatagcataaatatatataatttttattttccaaatataccttaatttttaagaaacagagaaagcagagtctatgggttccagaaggttggcaatttggggttggttctagaccacgtgcttttttttttttcttaatggaatatgaggtgaggtcagcagctgaggtggtgggaggagtcatgagtttggtaagagtaacttcagagaactgaaaggttaatttactagaagatggtaagattgctgggcaatcctgtgctgagttgccatttgagattttgtgaatatccatttgctgtcaacatcgtcgagtgatgtttttttctccagcatctttcagctgctcaggtgcaagtacagagtagagggatagttgagtttagacatgattggttctgttatggctcttattttacagatgaagggactagggttcagagaagaaagtaacttgctagtaatggacagagtttgcacataaatcttctctgaccctcgactccaggctcttaagcagtatgtcatatttcagagctgttcttaatatcatggaataaaaagtgtagattctgcaaacttctatcccttcccctagtggcgagcaggtgaataagcaatactgtaatttgtatctcaactttttttttcctactagcattatctaaaaagggtatctcagctagttaccaaatcccagccttgggaatcacaaagcaatattgtgcattgaagatatgctcatgggatagaaaaagtatcactgagtttgatcaccatctctcctgcctgctggccatgtgacttgcagcatggttgtaagaatctgttcagcattaactgagcacctatggtatgccaagcagtaaggaagatactgagaagatattgatgaaactgaattttgtcctcctaagaattatagtccagggaattcagtgagatagtatatgcacaatgttgtgtccaacacagggtgggcacttaataggtgttaattctctttgccttctctatccatttgtcctcaagtacctgatgacacctcttggtgaaaatatcaacactcactgagatactaaatgagggccccactcatgtgtaaatatccaatgatgttaatatttaaaaattagttcccatccactgaatcagaatctcagcaactttgagtgaaggcaggacccttaactgagttgagtcttcctctacccataaaaatatactgtatataactttttcctgaagctattggaatgaatacaagttagcatgattgtctactggcaatactagaataatctccctaaggcgtgctgttttctggctggaagttattttattctgttgaaatgtatttttttaaatgaaaggggcatttccttttcctatattatttgctttcaaaaagcgaagagaattctttaaacatggcaaattaaccactggtgaatcttaaattttaccttctcaatgatgcatgttctgattcaccagtcaatatttatttctaagccttcagatctcaaaaaggtctatatggtacctgagttagtgcatctcaagtaaccaacccctgggaaggtgttttatttctgtaacacaaatgaggcaggattttatgcccctggaggggagatgtttgtcttttatctctatattggggtacctaatacaggaaagagtgttaaatgaataaaggaatggacccacagtggggaaaaggagcttgcttgatatcagtgtgtttgaatttattaccatgaatctcactttctaaaattgctagcactattaaagtttctgacagtgaagcaagccattggaacatgtttgtggtgtgaatattaggtgtattattatgcactcaatttagcttttttattttatataatttctctccaagtggaaatcatgttctaggtaaaggaacaagaaattaagcagtgtggaggttagattcaacttccactaatggagaagatgactttggataactattggctccagtttcatttggggattagggattggattagaatttgtaaatctaattgttgtttctctgtaaaattgggagaccctcagggttgagagcagatcttcctcttttgcatctatttcagcacctagcccagtgcattgtaaatgcttaataaatactagatgaattaaaagtgaagtattctatttattctttagagaaagatacacagacgtttttgccaaccagcagaaatgaaggcagcaaccacttctagtttatcttgtattcctagcatcaggcaaaatgatagggacatggtaggcatccaacaactgttaattggctcctccaatcacccttttttgtcatccttccacaggaatttattgaatgccttctaagtgtcagaaacttggtttatattaatgaaagaacacattccagaggagtagttttatttgtataggcaattacaaagtaatgggatacaggttataatagaagtatgtaaaatttcactgaagttcacagggaggagaacctcatctgctcgggagttggggaagacactccaggatgatgagggttgagctattgaaagaggaatgggatttgttaaagtggaccagggtttgagggtattagaacacactccagttagagaagatggcacacacatgttcttggagctgtgatatagcacagtacacattgtaggggtagtttagcatggctataggaagaagtgggtaacataggggaaggaggtatggacagaattgagaaacagggatgattctgggaggttattagaggtcagagtttgaagaacatctcaaaacaggaaatactgactggtatctgagcttctctagaaggctgaagttaaattctataggtcatgtctcagtaatagcagtggtagtaatagcaatggctaatatttattgagcatttgttagagacaggtgcctttctaagcatttcatcttcttaataacttataaggtagatattgtctttatcctcatttgacagatgaggagattgaagcgtagaggtgcctcattcaaggtcaccgagcaagtccagactttaactcagagggtctggctgcagaatctgttcttaatcactatattatattacaacgcagaaaatatagtgttgtaatgctccaaagttaatttatacaataatacaatcacaaggattagaacttcattctcactttaaatccaaacagcagcatgaatcactgcttctgcctttcatatgttttttaatggcttgatcattgtcttcctgatgatttgattatgtgaggagggcaagttaaggtcactgccactaggtgctcactgttgttgcccatatgcaagacctcagtaaaagatgtctatatggcgaatgtaacttttagccaggtctttgcgctatgagagtatttagtctgtctgatctttgaagatatctatgcatggaccattggctctaaaatccccctctttgtatccccacaacaatgcatattttcatctagtgtactcttaaaaggggccagattttgtgaacatagatgcctgtccttcagagtttatttatagaatatgctccaagctcaattcccacctatgagtgagaacatgcggtgtttggttttttgtccttgcgatagtttgctgagtatgatggtttccagtttcatccatgtccctacatggacacaggaaggggaacatcacacaccagggactgttttggggtggggggaggcgggagggatagcattaggagatatacctaatgctaaatgacgagttaatgggtacagcacaccaacatggcacatgtatacatatgtaacaaacctgcacgttgtgcacatgtaccctaaaacttaaagtataataataataaaataaaataaaaaaagaagaaaggcaggaagaaatggaagaagaaaaaaacccattcctttatattataatacaaatgcatattcatattctgaattttaacattaacattataataaaactgtttttatctttaggaaaaaaaaaaaaaagaatatgctccaagcatttgcttctcaaattctccactattggataacaaataagccataatgtaacaggattttcatttaggtttttccattaagccttagccatggattgtgatggtatctggttgaggccagatctgagtttagtttttactctgctgccgaaattgttgtgtgatcttgagccagtcattgcactgttctcaacctcagtttcctcatctggaaaatgagggtgttggagcagacgatcagtgagctttctcccaactcttaacattctctacttgtagagtttttataatcaaacacaattatgtaaaagagagaaaagcagttgtcatggaaactgttatttaatacataacactgtttcttaatcagcctgttttccttgaagaaatttgcttctcttgtgatacaggcccaaaggtctcctaattctgcctttagaaaggctcagatttcagttccatcacttaagaattcaatgcatggaaccagttacttaaccaccctgtgcctaaattgctttattctaaaagtggtattgacaagaatactgacctcatagtgtggagcatcaggcctgatgcacaacaacaaaaatgttaatgataataataccaatacagataatattaaaaatatctaatgtttattgagttacttattgctactctgtgctaggcattagtaaatgtattaactcatggaatcttcaaaccaaccctgtggggtaaatgttactattaatctcataattagatcaagttacgtacttgtcccaagtcacacaacttgaacggggtggaaccagaatacttgtcgagctacataggccaatttcagagcctacactctgaaccattaacgtttctcaataataacactgttaatacataattgtgaataaccagcatcttttatggcctttgctatatgcccaaatctgttctatcctatgaggtagatgatatcatcatctctatttcgtagataagaaaactgagacctctagaggttaattaaaaacacatagttggtagtagtggaggcaggacttgaactcttgcagtctggctcctgagttcatatttttaacgatgatatctcagtatgagctattattaccctacatccagttcagttttgtgtccatgaatgatgtaagatgattatagctccacccactagatgatgtgagcctttggcagtcttctggaactctgttttttttgtttgttttttgtttttttgtttgtttgtttttgagacagagtctctctctgttccccaggctggagtgcagtggcatgatcttggctctctgcaacctctgcctcccgggttcaagcagttctcccttcctcagcctcctgagtagctaggattataggcacccgccactgtgcctggctaagttttgtattttttagtagagacgaggtttctccatgttggccaggctggtcttgaactcctgacctcaggtgatctgtccgtcttggcctcccaaattgctgggattacaggtgtgagccaccgcacccagctggagctctgtttatgctctttgttgattccctattgtgctcctaactaccacaatcgtttatggaaaagccaagctgcgacacaagtatcttgccatgtcttataaaataaaacaagaggagataagtacaaaagtctatgaatttcaggccagtaagctctaaaatttcaaacagcaaatacagtccgtaaaacatttgagagagagtttacttcagtagctccaattatctgagcaatgttttccaaataccttagcacctattgatctaagagtgaagtaggagaacttctttaaagatcagatagtaaatattttcagccttaagggccataaggtctctgtcatgactgtttaactctgttaaagtgcaaaagcagccatagatgatagtaaacaaatgtatctgtgtttcaataaaactttatttacaaaaacagatggtaggccagatggcccagaagccattgcttactgacctctaatctaagagagagatagcctactgataaagtatttaatgccaatgggttttgggataagtggcctcttgtacgtgcataaaagcaatagtaatgacatgtttattttttccttccctcctcatttttaatgagtcctgatcttgctgttccacatttactaaattaggtactggcaaaatgtgatagtgtaggcttacactattcacattactatctgctacttgactcaatatattgaaatttgactttaaggacagactttcagcagtaggaagcaatgttgacaaaacaacttttaaaaaagatcatatagaatgaaaacgtggatatgtgccttgttttgagctatctcaaatccttttgctaaataagtagggggtaaattattttaaatggggaaaatggaacacaatttttaaatattttaaggcatttcaaatgggccttaaaatacaacggttgtcctctggagggattttcattaattattaaccatatcagaaatgtaattaagtcagtgctgaaattagtcaagatcagctttataactcaaatcacataaataacatatatgggttctatgaattaatcattgtagatttgattaaaaagttccatttcaaagttcatgcaatttaatgtcatgttgtttctgtttttcaaacatttgttaaaccaactgtctatagaggcacattatatggctaaagatctaattgcaccattgttagcatagaactgtagtcagtaaataattagtggcttgcattgtgaagttttgataaatttttaggcttctctgaattaacatttgtcttatggtcagttaaggaaattaaatatcgattaaggaaattcagacagggcagcttcacagtctccctcctccacagggccccccatgaccactgccttggaggctgtgctgactttggggaaggcctatcagtggctgtgacctgggttaagctgatggaccaggggcatttttgagaatattgattagattaaggagaggtggggacctgtattagttttttattgcttctgtaacaaattaccacacactcagtgccttaaaatgtcaccaatttatcttacatttctgtgagttagatgtctggtgcaggtctcactgggccaaaatcaaagtattagctgggctgtgttccttctgtctttctggagactctaggggagaatctgttttatggcctttgttttttgggatggaatctcgctctatcacccaggctggagtgcagtggtgcgatctcagctcactgtaatctctgcctcccgcattcaagcgattctcccgcctcagccccccgagtagctgggattacaggcatgcgcaaccatgcccagctatttttagtatttgtagtagaggtggggtttcaccatgttgtccaggctggtcttgaactcctgacctcaggtgatccgcccgccttggcctcccagaatactgggattacaggcatgagccaccatacccagcctcggtgccttttccagctcctagggctgccacatccctagactcatggtccctctttcatgtttgaagccagcaacataatgtctctctgatccaagccaccaaaggttctctgtttttgaggtcttatgtgattagattgccccccttccttttggatatcccaggataacccctccatttcaaagtccttaaatctgcaaagtccctgttagtcccatgtaaggtgacatattcacaggttccagagatgaagagttgggcattttagcagagccatcattctgtctaccacacaaccgacattcagtgtattggattcactgtcggcgcttcctctgtttaccagcccatcttcttatgtttcagcttcttgtgtcctgacacccatttttgtctcagtccactttaaaccttgttcttctcagttctcaatttctctgaccttcctttagcatgcagtccagtggaccttcttctgctgagagcagtattgctggccaggctgtctgggttcaaagctaggctgtgcctcataaacatgacctttggtaagttatgcaatatctctgtaactcagttttctcatctgtaaaaggaggataaagaatgtgcctggactacatatgattgatgtggtgattacatgcattaatatattcatcactcttagaacaatgcctgagacatagtaaaccatcaatacatgctaaccattgttgctgtgaatttggttactctccttttgggtgctggtagaaattccctcaagattttatctgtgatttcttgtattttcttcggaagttgcagcttctctcaaagctttagcattcatccctaggcaaagaactccagctggacgcatttccaagctctatacctttatttctggcagtactaggtgaacatttttgtttggatgtcccaggggagccacaaagctgaacttaacatcttgcctaccgaaatattccatccgtgttcttatttctattactgtctttagatccgaagtcaatttttattctttccctctcatttaccactaaacatcaaaaaagttatcaaatactaaagactctactttcaaactatcttttaatctatttgtgtccccacttccactgctctgatccaggcttctatgaccgttaccctgatttgttgccccagttgaagtagaacagtattcttaaacctttgctctgattatgcaacccccacccccagacccgcccctcccttccaccttgctccagcatcttaagtgattccccgctgtcttagcatggagactacatccagtgtagcatataagtgagttttcttcaggaattccctaaaaatttaaaaatttcatacaaaagtatgttgtgaagatcgttgctttcagtctcaacaaccagtcactgctcacgcatcttaaacatgcttgaaacaggacatcttttcctttcatgaatgagccttgttctttcatacctgaaccttcaccatggggggcgtgctcttctcctccatctctgcctatgagaaatctacccagcaatgaggcttagtgacaatacccaccactctctttgtgaagccttccctggtagcctttccctgaaccgtgtaagtcagaggtcagcaaactacagcccacaggccaaatccagcctattgcttagttttataagttttattagaactcagtcacactcattcgtttatgtattgtctgtggctgcttttgggtctacagtagcagagttgagtagctgcaacagagaccatatggcccacaaagcccaaaataaattatgctctggctctttacagaaaaaaacatgctgacccctttctcccctcagagattacatagtctaccttgtgcatctttgacatctccttctgttagagtcacttctgcacaacttttttcctggcaagaacgatctcctcttgtagacatagattctgcctttttcatccttgtttctatccttgggcctagcaggggtagggctcagtagttgttggggacaatagattgcctgtaaaaaaattttttaaactacattttgctcacttggctaagtgacaaaaatcttatataaagcagtgttccctttagggggttagtgcttatcatttgatgtttctggtagtaaaccatttcatgtttcacttcgagaagcgcttttttgactgccaagataagctgcaaaattgagtccaaggatcttaagaaataatattcctaagccatttaagcagctcacttggtgatctcatttaataagtggtccactgaaatttaggattgcagagtatactttttcattatgcatgggtttcaccatgtgaggtagatatctagttcctactcagctatttttgttgactgcctagggtatgataatatttgaccatgctactctcttatgaaaaatgccaaatagttaaatttgttttaggaaaaccagagattcctctcttgctcctaaaggagaaaccaaatgaccctgggtttctttcttttttttttttctttctaaaacccaagaagtattgatgtcatgtcctcctgcgaagtgcattagctgtccttgcctttgctgctttagtactggggaatgcctctgtcagacagtgagctcatgagtgcaaggactctgtcttttaatttctgaatcctcagtgtttggcacagagaaagctcttgacaaatatttattaaatgaataagtcaataaataattgaagatctcagaaagaaccttttccccaaggtattacttttaaactataaacttacaattgcctacttctatctagttcacatccttaaatatcacttgggagaatttcctgttgtgatgatatagagtttatgtctagctgtgggaggtcaagggtgggctacgttgtgcctaagtccacagaacacaaggaaaacccttaaacttttgtgaggtgaccggaaataaatatctgcttcctaagtatttccctgagtgagaatgtaaaggtttaagataaattaagtatcacagggtgagacaaagtgagaaattcaggatttagattggcattcagagcagggagggaaaaaaagatgacccaaattgacacaaaatgagaaaatcttgggaaataaaagtaaacggtagcaaatgtgatgtatttgagaaccttacaaggaggttttcagtatgttccagttgatttataggatgtagaaacattaagtgttaaaatggaaaggggtggattttcaagactctcacagtgagggttcagttaggaatcagaattccaacaaacaaacagattttaataaagatgttacaaaggagaggctgggttatggaaattgacaagagatggtgaagcacccagggtctagcaagggtgaggagcctttataaaacatgcctcaagaggcaagggcaatattggagccgcgcaagagcaggagccctgggaaaggggctacccaataggagtagaccttgcagagggctttccaaatggctagggccctcacaagtattcacacaggaagggagcagggaagaagtaactcagcctgtttttcctcccaacctttagctccttcttgtgcctccattggctgaggccaactggaggcctgtgagggagcccaggtgatgaaggagtcaccttcccaggacacagaacaggtggagaatggatttgaagtaggtggaggcccacaaaacgtcaccagcacagggaccatctccagcctttcagtttacaaatgaggaaaacgaggcccagactgggggaaatgaacaccttggaaattcatccctttcagccttaacacttaatgttcttttttttctttttataggtagtctcttatttttattattattattattatacttcaagttttagggtacatgtgcacaatgtgcaggtttgttacatatgtatgcatgtgccatgctgctgtgctgcacccattaactcgtcatttagcattaggtatatctcctaatgctatccctcccccctccccccaccccacaacagtccccagagtgtgatgttccccttcctgtgtccatgtgttctcattgttcaattctcatctatgagtgagaacatgtggtgtttggttttttgtccttgcgatagtttactgagaatgatgatttccgatttcatccatgtccctacaaaggacatgatctcatcattttttatggctgcatagtattccatggtgtatatgtgccacattttcttaatccagtatatcattgtcggacatttaggttggttccaagtctttgctattgtgaatagtgccgcagtaaacatatgtgtgcatgtgtctttatagcagcatgatttatagtcctttgggtatatacccagtaatgggatggctgggtcaagtggtatttctagttctagatccctgaggaatcgccacactgacttccacaatggttgaactagtttactactcatctgacaaagggctaatatccagaatctacaatgaactcaaacaaatttacaagaaaaaaacaaccccctcgaatagtggacaaaggatatgagcagacacttctcaaaagaagacatttatgcagccaacagacacatgaaaaaatgctcatcatcactggccatcagagaaatgcaaatcaaaaccacaatgagataccatctcacaccagttagaatggcaatcattaaaaagtcaggaaacaacaggtgctggagaggatgtggagaaataggaacacttttacactgttggtgggatgtaaactagttcaacacttaatgttctatatcctcataaatcagtgttcaaatgagaaagacaataaggactgactgaataaataaatggaagaataaattaatttgaagaataaatgaatttttcatatcataaatccatttttcaccaacatgtttgctaggtggcattctaacctatcagtggaccataatatatttaactattgccctattaacagttatttttctagtttctaatattactataatcataattattatagttatgtcagtattaattataattatgatactaagtactatttattgagtatgtcaggcaccatgctgtgtgaaaacatatactttttttagcccttattatgaatatttgaagtatgaatttaaactcccattttgtaaaagaggaaattgaagctcacgtagtaactcaatcataactcatcagaagttccacagctactacaagatagacccagaatatgcacgaatatccattcaacacaaaagtccatctctctattgcttccctatttaataaaaattttgaatggaacattttcttacgtaactgttagtatgtcttatcattttcttgagataacttcctagaagtagaattcttgggtccaaagagatgatcctatttttaagtagtaagaaataacatttagttgcaatttgaaacatattaaatatctgtgagagaaaccttatatgggtatgaaatttttagttttgtcaaatgatctgattgcgaatggtgagatagccatgtctgagagcccccattttcttatgttaccagcagtgaagagcatcttttttaatagcctgtattttttagagcagttttaggttcacagcaaaattgactgcaaaatacagacattccttgtgtatctcctgcccctacatgtgcatagcctcctctattatgaccttcccacaccagagtggtacaattattacaattgatgaacctacattgacacatcatcacccagagtccatagtgtgtattagcgttcactgttggtgttgtacattctgtgggttttgacaaatttattacaatatgtatgcaccattatagcattaaacagagtagttttattgccctaaaaatcccttgtgctctgcctatttctccctcctttcttctttcctcgtggcaaccactgatctttttactgtctccatagttttgccttttctagaatgccatgtagttggaactatgtaatatgtagccttttcagactggcttctttcacttagtaatggttcttgaacatttaaggtaagtaaatggacagttaaggttcccacatgtcttttcatggcttgacagtttgttttgttttaatgcttaataatattccattgtctgaatgtatcacagtttatttgtcagtttacctactgaaggacatcttggttgtttccaagttttggcaattatgaataaaactgctgtaaacattcatgcgcaggtttctgtgggaacataagttttcatctcacttgggtaaataccaaggtgcatgattgctggattgtatggtgagagtaagttgagttttgtgagaaactgccaaactgtcttccaaagtggccataccattttgtatttccaccagcagtgaatgaaggttcctgtcgcactgtattcttgccatcatttgatgttgttggtgtttttgactttcactattctaatagatgtggagtggtatctcgttgttttaatttgcaattaattacccaatgacatctacattattttttaagatttatttttattttaatattttatttatgtacttattttcaattaacaaataaaaattgtatatgtttatcatttataacataaagttttgaaatgtgtatacattgtgggatagctaaatcaatgcaattaatacatatgttatatcacatacttgtcaatttttatggtgagaatgcttaaaattactctgttagtgatttttaagaatacaatacattattattaagtatacccactattttgtataatagatccccagaacttatttctcctgtctaaatgaaattttgtatcctttgaccaacatctccacaactgagctccaccccccagcttttggtaaccgccattctactctctggtacttatgagttcaaaattccacaaataactgagatcatgtggagtttgtcttcctgtgcctggcttattttacttaatgtcctccaggttcatccatattattgcaaatgacaggattttccttgtttttctttttaaggttgaatagaatgtctttgaatatatccaccacacattttctctgtcaatttttccattgatagatacttagattccatattatggctgtgttttggctattgtgtctaaagttgcagtgaccacaggagtactgatagctgttggacgtactactttcatctcctttggctatatactacaacatttaaagagttttaaatcactctttatgaattaaaaaaaatctcaggttgttttcactgtagatgggctagtagggttgaggaaaggagagtgggaaggctaagctattcaaggttgtcttcaatgaccactttcccttactcaccccctcttccaaggtcttagctaatctcccagggactgaacactctccagacaaaatcaacgtaacagaagtctggcatttgagaatatttgagtttagttacctgtagtcttccttaggtatccctagaaagattagttcctggataaccacctccctcccttccccagataccaaaatgttcaagtcccttacatgaaatagcaaagtatttacatattacctatgtgcatccttccatatactttaaataatctctagattacttataatacccagtacaatgtaaatgatatgtaaatagttgttatactgtattttaaaatttattttcctttattattgttttaattgtagtttttttttttctgaatattttctatccgaggttggtttattccacagacatgggaactgcagataaggagggccgtctgtactttgtttgatacctgtcctgccggctccctgccacccccggcaccctccgtttctttctagaactatttacattaatgtctactgtgagctaggcattgtgataggcatgaaataagacacagtcctggccccacattcaggggacatatatatagacaatcacagtgcagttgggtaggtcttggtgtagttatgtaccaggtgctaacagagtgcaggggagggacatgtgagctgagggttctggggatgcttggtagagttaggggttgggaataatggggtttcttcagaagggtggtgaatgagctgatcttaggagaatatattggattagggctatgaaagagagcatttcaggcaagaaggaggatttttttttttttcatgaactcactacttaggaccaaactgtgagcaccagcactgtttcattttcaccttatggagaccattattggaggtgtgttcatcaagttttttctatgaaccaacaaacccaaatctcagtggttcacacccagaaacatttgtctttttgttcagagttttttcaggcagctgttgtttgcctgatattggctggtttaagtaaggcttggtccaggttgcagatcaggtttgagtttgttcttagtgtctccttctgggacccatggctagtcgggacatgtgctttttatgataatagcagaagcaaaagagaccaagcctaaaccacacaagcacatttctgctttcatctgtttgctaacatccctttgactaaagcaagtcatgatggccaagtccaaaaccaatggagcagggaatataccttctctctctattgggaagtactaacaagtcacatggcagagagaagttatgaattacgaatcaggggcaataatctactctgccactgtggtttcctgaaatgaagtcctgatagaatttggtcgcagggggattaaaagggagattctcactcagcctcagcaacaggaaagaaagaagttacaaaaagcctgtaaagaatctaaaggaggatttgaaggagagaaagcaccaataatctaactgcagcactttatttgaatttaagtaacgctggtcaaacattcttacaggctcttaccctttctgatctataaattcttcatgtagatattgagccaaaggttagatctagaaaatattatatctagtccttagcatgttggtttcttttcaatgcgcttaaacgctcagttaacgtggctttagacataattgtaacagaattacaaaggacagcaccttggcagaaagttcttcctggttttgatgtgttgctactgccagatttttgtgacatgctgatgctaatctgtcaaatagcctgacactaagtgagaagagaaataaaaggaggcatgacagggccaaggacctggtgtggtggaggatggttgggcagtagcaaatcctctcatcagccctactgagactaagcaacaacctatcttcaggtctctgggttcggtggttggggggagcgggggcggtcctacgtgggttagaactcatactactctcagaaatgcacctactttcagttacccaccaattctgatgctcaaagcccctccaaacctgttttctgtgggtccacctgagctcgcttaactaagatagcacaaattctgccccctcttatgggaacatacctaagctaatgacacatgaggtgctacctcttccgcatgtatacctacgtgtttgagctttttcctcccttggatgtgggagggtatcagtctattttataaacattttgtcaagtgtcctttgagtcaaataagagaggatattagaaaagctccagaaaactttgggaggccgaggcgggcggatcacgaggtcaggagattgagaccatcccggctaaaacggtgaaaccccgtctctactaaaaatacaaaaaattagccgggcgtggtggcgggcgcctgtagtcccagctacttgggaggctgaggcaggagaatggcgtgaacccgggaggcggagcttgcagtgagccgagatcccgccactgcactccagcctgggcgacagagcgagactccatctcaaaaaaaaaaaaaaaagaaaaagaaaagctccagaaagtttggaaaagtaaattcagacctgagagtaaccaagagagttcccaccttccttctggtcaatgttccaggaaggcgaagcactggatttaccctccactttgcagttaaagaggaaactcgaaataaatattcccttctacaggtttttttttttaattaagaatagatgagtcttatgttttgtgtgtggtggtgacattcaaaacatagtttttcagtgttttgaaaagtaatttacctaagaaatgacaagaagagtaatgcaacacatagacagcattgctgtgagttgtaaaacattgacagaacgacaaatgttcctgtggcatagagtccttctgaatcacagaaatgacatttggatgaaagcaaatcatttttacataggcacactgctaactgtgcagtgaagccagaaatagcacaccttggaagtgggccagagagaaagaacacctaagaattttatgttattcagaaaaattttcactttttcggtaggatttttgaggagtaaagaaaatatttgagagccttaaagaaaatctgagctttgttttttttttttttttgagacagagttttgctctttgttgcccaggctggagtgcagtggtgctatctcagctcactgaaacctccgcctcttgggttcaagcgattctcctgtctcagtctcccgagtagttgggatgacaggcacccaccaccatgcccagctaatttttgtatttttagcagagatggggtttcaccatgttggccaggctggcctcaaactcctgacctcagatgatccacccgccttggcctcccaaagtgctgggattataggtgtgagccactgtgcctggcctttgatttttatttattaaaatattagtcatttattgtgttcccgtatactcatcaagtgtctcttgagaaaactcagaccaagcaggaaacataggcttgatgtttaggagacagagtaaagtgggaggcatgacatggggagctgatcacacagagattacagatggagataaggagtgcataacatccccaaggatggacaggatggagagaagaaaaggccaaaatcaaaactttggaaaatgcccactgtggtgggctgataatggctcccaaatatctgtccacattctaattcccagaacctgcaagtgttaccttgtttgaaaagagtctttgcatatgtggtttacttaggaatcttgagatagggagattatcctccattatccaggtgatccctaaatgtcacaaccagcgtccttataagagagaggcagagggagattagacacaaacactgagaaggtgatataatcacagagatagagattggagtgatgttgtcacaaggcgaggaacaccaaggaatgctggcgcccgtgagaagctgaaggaggcaaggaatggattctccccagagcttctgtctacctttctggagtcttgattggcctacaggtgttcagtttgcacttctgtggaaacagggaacatacagcagtgacacagagccctgccgacaccatggtgagagacacctggccttcagaactgtgagatgataaaatcttgtttgaactcatcctggttgtggtaatttgttaaattgggctttgggaactaatatacccacctttgggaacaggaacagaaagagtttaaaaaagtaaggggaggtagcaagaagcttaagtgtcatgaaaacgaaagccaaagcaagagtttaaaaacagatgagcagaggcaatggtataaacgctagagcctaaagcctaatgggtaaaaatgaagattgaggagaatcattgatatgatagaagctaatgatggcagctaacttgtactgagcacccattatgctggacattgccataagcactctgcagatataaactcaattctcacaaaaccctatcaggtatgaattattgttaccccattttacaggtgaaaaaactgaggcaaaaatttaaataaatgcattaagtaacataggtggtaaatggtgtggccaagatttgagcccagaattctggctacagcatccacattttagccactactttgtactaacctcaccttatcccccaaggtgtgtgtttcccaaggttctgactttgggtcttttatcaagtaaggtagatgatgtgtctcaagaggaaaaggtatttttgtaatgattatttgaggttgaaaggaggaagattaggaactttatatcacctggaccccatcttctcagctgagttggagaggaggctatctgatgaggctgagggaggcagctaagtttctgacctcagggagcctaggaaagacagtgaggatacaataaaacaggaagcactaaatgaaaaacttgctgcacagtgaagcatgctcagtgttatttccttgactggcttttggcactgtgccatctgtgcccaagatgtctgcaccatgtagcgtgccaagtgcagaaggaaaagggactgaaggggcatcatcgccccacacctgccctatggaaagtactttgttcagagacgaagaaggaatccgaaaactgcacaatatgacctttgtcattagaaactcttgaacgtttgagaaatggaccatccatgtactggcagatgaatgagagttcaagggcattacatgataagggctaattgcaagactagagactggagtgggtcagaggaactgaaatgtgtcaaggggaaggtacagctctagatagttcttactaaggtctttgacagctgatcaagaatcaggaggacatttcagcctggacgatgccatgggccaagcatgggagaggggagaaacagatggttctttaagagcttaggccaaaggactctcaacattctgggcttccaatctgtcccccacccaggatagctttctgttaagttactattcagaaccactgcaggcttaaaacaatgagtgtttatattggtattgaatccattagactgcatggtatagtggaaaaaggcaaggttaaaatatcagttaatcactttgttgtgtgaccttggtcaagtaacttctcgagcctcagatttcccatttgtaaaacatagataccaattctcaggctcttatggttgtgatgatacattaatgggataatgatcaatatcgagtgtggtgcctgacatttaatagatagtgtcaacaatttttttttagactaagaacaaattggatgatgtaatttattggctgacaattcatttctaaagatgtgacttcagaatgttctataaatgttaacattttcaaatgcccagagtatattttctatcttgcatactagctatttatttacaaatctctttctcccattgacttagcccttgtgtgaggagagctcttttaggctaggccctttatctgtactttgaggacccttaattcctagaggaagaacatggatttttctcaggcattaaagattccttccaaatttccatgtaacatacccactttcctcatacctatcttctcctggtaatattcttgaattattttttatttttaacattttttgctatgatctacattattatattttaaaaacacaatttcaagttatatattttaaaaaaatgccatttatttccatgatacaatttctattctcatttacgtcattttgtgcttccttcagaaaagttatataaaagctaaaagtgctgtgctgagtcagaatcctgttcccctcagcccaataagcctctgcaaaaaggaaaagaagaaattttttcaggagagcagtctatttcatatttgcagactgagagtgcatgtatcatctgatgttgacttaaaatgtctctccccttcccttcatctgtcatccacaaagctgtttgcattcttctggagtcttgatgggtctacagatggttcagtttgtacctccgtggaaacagggaacatgcaccagtggcacagagcatggtggagtggaagaaaatcactccaccatgatgtggatgatgcatgtgtggttgatgctgtggtgtctgtcctacttatagagagagacctctgggagtagaaggctcatacttgcctaggcacctgagcatcagagtgcctgggggcagcctgccagcctatctcctacggggccacccagcctgacagtcctaacctgggtgaatctcctgagaccaaggcttaggctcacagcattgtgggcttagaaacaacatcttgggggcagactcataccaagcaattcatgtggaggtagatgtgtgaaagcccaggatgtccatctgttagctcacactgagaaccctagctgccaggtagacaggaacactagcgtgaaaactctcttcctgtactggaagcccaatcctaatccataggttatccggtgagcactgttggaatgagggcagttaaatggataaaggagagtaaaaccatatgtcaggactgtctggcggtgcaactggaattcttgaacttagtctgtttcttagatgagtgctgcctatatttgttacagtttgttttaatgatttcctggcttaacaagccctaatctgatttgagtcatccttccttaagatttgctagagtttacaaattggcccaggtcatatcctctttttcccctgggaaaatttaaggtgacccttcttacctttgacatgacctatgattggtgattttgcagtttacctcttagcagacttgttattttccctgtttctgggtttttagtagacttcttattgtagctttaaaataattttttttacattccatttttttaatgttcaatatccattttaatgcatacaacaacattataaggtagatactgttttatatcccatttacatataaagaaacctgagactcagaggctaatgaacttgcctagaaatacctggccagtaaaggaagaggttgtgattcaaacctacgcactctgattccaatacttaagacatacctgtggctacttttctgaatgtttcacatgtactatctaatgtaatccttacagttacacaatttttattaaaaagtacagttctcactcagaaagaaagaaggatttgcataaaaaagaatttcaagcccagaaatactaatattacaggtgtcaggaatagtaacatccagcctacttccagcctttctctctctctctttctctccttccctcctttcttttctccctacttccttctctctctctccctctcccaccctccctccttctttctctttttatttacttacttatttatttatttttattatactttgagttctagggtacatgtgcacaacgtgcaggtttgttacatatgtatacatgtgccatgttggtgtgctgcactcattaactcgtcatttacattaggtatctcctaatgctatccctcccccctccccctaccccatgacaggccccagtgtgtgatgttccccttcctgtgtccaagtgttctcattgttcagttcccacctatgagtgagaacatgcagtgtttgggtttttctgtccgtcaatgatagactggattaagaaaatgtggaacatatacaccacggaatactatgcagccataaaaaaggatgagttcatgtcctttatagggacatggatgaagctggaaaccatcattctcagcaaactatcacagggacagaaaaccaaaaaatccaaaataatttttaattctctttcttatcggtgtttcttagcaagaattcttctgtagtgaagaattttccctcatcaactaataaaaaatggctagtaaaggcaggataaatgcttgctttattccctttattaatcttctgagtaacgaattggtatcttaggaacctccaatggtgaacaatgagtgttttaaaaagatacacattgaactcagcctttctttatacagttgatatgcatcagtagatggagtccatattaatgatgtaatctatataggctgatgtaatcaattctacttttgaggagattgacatgatgtctggaatttgctttaaatactccagcatctaaaaagcaaatcaacaacaaagggagtgggatcgatgaaaaaaaattggaaaaatcttgatatttgttgacactggttgatgagtacatggagttcattatactattcattttgcttttggtatgtttgaaatatttccaaataaaatagttctcaagatgcatataattctaaggttatcaagagtgtaaatgtgagtttagccaacaactttggcctatctgtgaatcttgtggagaaagttcttgatttttattgaaattccagataccccaacagtagttcctaagccctactgctttggcaacagcatgtcaaatatgtgcacattttcccagcattttggaaggaatttttataagaattttcagatttgactgattggatcctgattcataaaagtcttgtcttggtaactaaggatgtctacttttgagtgatgcataccttaagaatttgaaacatggttgcttctgttctctggacttcatatgagagcgtaacagccttttagccattctgaagtgacttcttcagtctaatggtgccatttctcattccaggtttaagtttatctattcatggggctgaaaagcgtttgcaaatccatcaacggcgaagtgtggcaagccgcccagcgtcacgtcgtcgcctgcctgtggtcaggcattcctcactcccaccaggcagaaggtcaataaaaatggaggcaagctcttctggaatcactaatggaaaaaccaaagtcttccacccaggtgatgcatggggaagttcaacggggacccatttcagtagcaacctgaccacagtctgcattatatttttattgtgtaaatatgccatactttcagctaagcttgcttttgttaggagtcttgttctatttccccttctgctcacctcagtcaatggtaaatatcaccaagacgaataagaggggagagagcttggtggttcagagaaggttgaggctatgtgcacagtggtagaatctaaatgaaaatcagagtgcataaactcttgctcagttcaggaaagctcattatataataaaacaacatagagatttggtcattttcctgataatttgctctaagattggtcaggaaaaaaattcaagccaaaaaacacccactttgaaacctaggttatctgtgttggcttgcccacatcctcctgagatcaggagagaagactggagtcattatattatattgttttaagtcttctgggaagcatctgtgatctctttaaaatattaaaatgattctacattaaatgaagtaaaaacatcttatgtgcttatttgggggaaaagctcatttaagtattcattcattcattgaacaaatatgtattgagtgccagctacatgctaggcattgttttgggttcaaggaaatatcagtgaccaaggcaatgttcctgcaaagtgactttatagaaacatcaaattgcgaaagaattcataagtcattgagaataactctcacccaatcctgattcctctctgtaatgtcctagtggatgaccacacagctgctactgaagccagcctccatctctactcatgtcacaccaccttctctctcttagcatgtaaccttgcttcctaacccatcaagaaacaccagggccgttgggcatgaattactggaggtcccttatcctctctcttcaaatgtattgctctttatgcatcattccccactttcctccagttttcagaagatgaggggcctcccactgtctttgaccaagctcttacccatgtcctttagccatggtcacctttcacctcttctgaagcttcctcaggagaatgtgtcctcttgttttcatctctttcacccttccacactgctagctgtttaccttcagtctatgaaaaggctcaagcttctaccattctgatcatttaacactgtacccttttccctcttctgccactttttcctcctcccttccaagccaaacttctgaaaataataatttacttttgattgctctgttctgtcgagagtaaccaacacaatctggtttctagctcctccattccattctggctgtttttgaggccctcagtgacctccttttatcacaatgtagtggatgcttgccagactttcctgatgcaccagaccaaggtggacaacccacttgtttcccaaacactgttcccttggcttccatgacaatcttagggttcttctcttatttctctcgcatgtaactttcctggtttctcccactccagcatctctttcctcctcttgcctcctttcccagtacgtaccaaatccagaatgattcatctgtacccctaatcagttactgtgcttgttctaccaattacagggtccagttcaaacttcttagcatgttaaaaacaaatgccttttgtgatctggcccctactgctttcacccttcattttttgccctcttcttccttaagctttattactatagtgcatcaatcaaggttcaatcagaaaagcaaaaccagtagaaagtatgtactagagactaattacaaagaattggctttcattgtgggagatggctaggcaagtctgaattcataggtcaggctatctgcaagggcaggctggaactcttgggcacagctcttaaaagcttcagctctgcttttaaggcttttcaactgacctagattatcaaggagaatctcctttacataaagtcaactgactatgaactttaattgcatctacaaaacaccttcattgcagcactagattagtgttcattgaataactggagactgtagcctggccaagttggttcatcaaatagaccatcgcatctgagtatatcaatgtgctttcacttctctaaatatgtgatgctgtttcatgcctcccaacctttgctcctgctgttctttcttcccaggataccctggttttgctctgttatctttgaacatgttgaaattacttgtctatccgtccactgaaaggtctttaagggcagggattctggattatttatctttgtactcccaataaatatttgtagggtaggaccgaacaaaaccttcattagctgtgttttagactactacaatagcttctgaatttttctgcctgcctttctttcaacaagtacctgatatacatcagtaaacaaagcagacaaaagtccctgcccttggggagtttacgtagtagctgcaagagataataaataaatatattaaagagaccaactgtgtaatctatattatagttatatgtaagctatatataacatatagtgtttagggaaaggataagtattatggataaaagaaaaagtaggggaagagggtagcatgttgcaatattaaacatggtgatcagggtaggctgagtcacgaagatgtgtaatcactgactagaagtttctgagacagccacgtggatgtctgagcaacttcattccagcagagggacagttagtggacaggttgtagggtaaaagtgggtctggcaatttgaagaatagtatggaggctcctcaacttggagtggagtgagtgaggtggggaatcaactcagtgaggttgtagggactagatcgggcaggaccttataggccattgtaaggactttgagccctatgtgaaaggaagctcttacagggttttgagcagaagaattccataatttgatttatattttaacaggatgtaatatagactatggggagaatagattataggaggagaggataaaaggagaaaggtcagataggaggcctccagaatgatccagtggagaaatgatggtagctctgactaggaacagcagaagtaatggtgagaatttagagtctggatatattttaaagctgggccaacaaaatatcctaatggattggatgtagggtaaaagagaaagaagagcaaaggatgactgaaaagtttttttggcctgagtgaaatcagctgagatggagaaggctgcaagagaagcagatttggtgggtttgagggcaaaggtggggctgagttcagaagtttgattatagatgtgataatattgagagctggcaagatcttgtgggtggtagtttgagctccatgtctggagtttgaaagatgattggtctgtgaaagagatataaaactaatagttgttgacatataagtgctatttaaagaaatgagattgcaagagatgaccaagggaagaagtataaatggggaagggagagcatcaagggctgagatctgggacactccaataataaagggtcaaagaggacatgaaccacgagcaagaaggccaggaaagaagcaccagcaaagatggagaaaacccagaagtgccacatctcagaaattacaaaagtttatcaagaagagaagaatggttttctaggctaaatgttattgaaagtcaaataagatgaggactgagaattagtcgattttagtaaagtggaggtcaatggtgattttgataagagccgttttagtggagtggtggggatgaaaccctgattgaagtggatttaagggagatgagaggatataaattagatgctctgaatatgggcaacttttttgagcagttttgctatgaagtgtagtgaagaaatagggcagcagctggaggagaagtaaggtcaagagtttcttttaaaaatagcagctctccagcagataatttatggtgttcaagagaggggagaatttgtgatgtgggcatcagtgagaggatgagagctatgcacaataggaccatggatagtttatctgtgataactggtgggaaggaggcgtatgtatataatggcaggtgtgctgagggtctaataagttcttttcctatgttgtcagctttatctttaatgtgagaagcaaggtcatctctgagaatgagaatggagccacagggagaaagagagagagaaagaaagatatggagaggggaaatatgtttgccaactcacattaaaagggatttgagattcatagtcatgaaactaaagtaggactagttatcatcattgtgtagtttttaattttgtgtagctacatgagtaaagacatacagttggtggtgagttggatttgaacagcagtgtggttttgcaaaggaagtaggaaagagagaaagggaatcaaaagtgcatggaagggagtgatgatagtgattcattttgtgatttggtaaagagggtacaagacatcaagggaaggaggtacagtgaaaagttggtaagatcaatcggttgaaattcccagagggttcaaaaaattgtgggggttagggtaatagaaggaggatctggaaggataagagaggtggtaagagaatggaatgtgtggcactaatattgtggcacatatcttaataacatttatttaattttattatagtaatatcaacacaagatgctgttactggtaatgacaaggtttaggccaaggtacaaaacaagggactataaagggtagaaggcaagatcattgaatgaaaaaattcctagggactgagaggccaagatgtgaaaatgattgagtcaagaattgagtagctttgggaagaatgataagccaggcattaactttactgagaaataagggaacatgatctggcaggtagcaggagagtacaaagataaagggtagaagatgatgtagtataacaacttgagattcaaggctgaaggtgtttggggaagagggaagaagaatggtctgaaggtggatttgagactcaagaaaggtatctactcctctttcagatgcgttggtgccagggctattggagaaaaacagttctaagtgaaagagccacagggaagcatgaccactgggaagatccaggttttccttagagcaaggtgaatggggcaatctgagaagagattgacgacattcagagaattctggagagcccagtggaaggttttagatgttggacaattgtcttcagtggttctctcagacaccaaggttctcctccagagaggataattagcatcagccttcctcttcttaaaattgttatggctatcccgaagaaagtgcagccttgtgagcccaccttttcaagtcctctccaatttagcctctccctacttttccaggcttatctcattttacactgtcattatccatgttattcagcttcaggcatccacaggctttttagtatttctcaagcaggcttttactcttccattttctttgccattgctcaagctcctctctcatcttggaatatcccttcccctaataaatgtctactagcccttctcattcctcaaaatgtaactcaaattccgcttcctccaagaagctttctagatcttatagtcagaattattcccctacttccccgtgcttccacagaacttagaagccttatcaaagtccatctgtttctatggtcttatagttctcccagaaggcaggaactctcctcaattcatctttgtatcttccgtcactcctaacatcatgcgttgtccctagtaggttcttaataaatgattttatgttgtttgtcaaaatctgttctactcagcagatataggttagcattctgaagttatatggcgtaaatcttaactcttctttcatatgacaatccttcagttgtttaagaaactcatccctagctattttccaggtgaaacatttcctagtgtcttcagtgcttccttgaatgacatgatactcaacttctttacctttgtaccctctccactcttagaaacattcttatttcattgctatctctttgaaaatgcagtgcccagaattgagtattccattaaagtcaaacgcaggcagtgtagattcagtctgtcctttcctttaattgatatcctgtgttgatattactataatacaattaaatgaatgttattaagatattcctaatggtgttttatcaacatgggctaattcagcccacattgtgagttaatatttcaagtctcttccctcaccttaaaaacacatcacttggatgagtacggtggctcacgcctgtaatcccagcactttgggaggccgaggcgggtggatcagctgaggtcaggagttcaagaccaggtggagaaaccctctctctactaaaaatacaaaattagccggacgtggtggtgcatgcctgtaatcccagctactcaggaggctgaggcaggagaatcacttgaactcgggaggcggaggttgcggtgtgccaagattgcgccgctgcactgcagcctgggcaacgagcaaaactctgtctcaaaaaaacaaaaacaaaacaaaacaaaaaaacatcactttacttatctacccatcattttatcatagatccttaaaccctacatatgtcgagtattggttgaaaatataaataaagccaatcctctagcctagaattataattaagaaaaaaatatattaagttacaattagaaacttgttatttaaaaaaagtatttttaaaactcatattattctggcaaggtagaatatgatttcagttccattctctttatttttagtgtacttggacaaatgcatcatagttctctgttgggaaattatggaagagctctcaaactgagtttcttaagtgcagtgagtcatagatcttagtagcagcttggacaatttagtcatattgaggcctattaagtcatccatctattttttacaaagttaataatccctgttcccgaagtgttctctaaggcccactcggattggttactaagaacaaaaagagaatttgggagtcttgtagattttctgttccatctgcctgaacaatttcagtatgtttatcctcctttgagtttacaaacttttatgagggcctactatttactaacaaggatttattgggaatttgccctccttggagtattttgaaatggtgcagaactctattaaacatgggtcttaaggcactcagtcatgtccaagagagacaatcagtcagggttctttgttaccaacaagagaaactaatcatttagtccaaacaaagaaggaatttaaatttgaagaatgtggatggaaaacctaaagagccagccttggaaaaggaatcgagaaatcaagaatagctatttgattagaatagaatatcttctatttgactatctggaatgattgaattcttaccggtttttctagttttgcatcatttggctcacgttttgaagatttaggaggacagttctattggctatgcacctttcctttggttggacagacagtgctgagacaaatgataggacagaagacctctctcttcagccttcatagtgggagggtaggactccttgatttcttctgctaccttgactacacacagcgagggagaaggacttccccaaaaggaaatagaggtgatgttaggaaacaactttatgtggaagaatgcccactacagggacatgtgcttaagctgctgtgatagaagtcaaactgtattaagggctggaacacagaaataaataaggttatggcagcataaccttattatgctgaagagaatttagaaagactcaaaacacatatggtctaccaatttgactttgaaggtcaactaggatttcaacagaaggaagaggcatgaccattcagatgcaggaaagagcataatgataggaacggtgcattacactggttctgaaagcaagctttatcgttaggtgtttaaaagctagatatgtcacctgatggctattacagccttagacaaattacttaatttctctgaatcttagtttctacatcagtaaaatgaggaaattaatacctaccttatagtattagggctgccaaattaaatacaatgttcccaattaaatttaaatttcagataaacaagtatttttgaaatacttgtttgaatttttgaatatttgaatattcctaattcaaatatttgaaattcaaatatttgaaaattcctaaatattgcatacgacacacataataaaaaattatatcgtttgaaattcagatttagcaggacatcctgtattgtaatgtattatgtctggcaatcctacatagccttgttatggcaattaaataattggtgtagaatgtccagtttgatttttggcacatacttggtgttcagtaataaatggttgataaataaagaaatcatttttcttgtcaccaacatgataagcaaaattcagaaccctgaaagtacctatgcctcagaatccttgttatctcagttaccacttcatttagcagtttcccagttaacttgtgctagaataccaataagatggtctctcattatgctgtataaatacagaaaccattcatcttcatcttgtatttgtatggtttctctttccttctgattgtttcaattctttctcctgtttatcaatttcattttgaccttatcctttagacactcataattaatgaatattattttctgcttcctttatggaccaaaaatataagtggtaaatggtactaggtttgggactataatttaagactcaagagcatagtaaactgaagcactgattttgatttttttgagtttgaaactataaagcttagtggatatagatcaaattatcccagctaatgactatgccatataaaatagaattggaagctttctgaaatctaaaatacttcttctattgctttttccttatctgttagacccatcatacaatcctagagaagtgtcattaatcacagaatatgtcctttagtctcatttagaatttgtaaaataatgttttgccgatatgtgttattcccaagtaatttctaatacaggttcttttatctcactttttaaaacctatggccctttccacatttatgcatgattattgttccctaagaatctatctagtatttaaatgctaggacataattgattttccaggagagaaacattaggattttcttgtttccaaacagctagaatgattagtactgtctgtatacttaggcattaaatgcatagtttgataataataaaattatagctacaatatattaagccctctaccatattcccaacctcaaaaactgttcaactgttttcattcattatctcatttaattcccataatattctcatgctattttccttatttgatgggtggggaaactaaggcatgaagaagggtaagtaccttgcctaaggttatacagccagtaaatggtgaaggcaagattctagctcaggtattcttattctcttatttaatgtgctattactttcttcttcacacaacttggcagaaacatttctagcaaattatcataaaaaagccttagaaaatttaaattaaaagccctgcagtagctcaaaccttagcgtaagaaaaccatactaaagaagggaccagttaggttctgttgattgcttgtgtaatcgtcttcaaagtttattatttccttcagtgtaagtgatgtccactttgtagcttctctttctggtctactatgctctggacttttgtttttcatcctccattttttgggttctgatataataaaattcattcctatttccctgagtttcaaagatttctttctggaaccaatgtcaaggcctggtctcaaattagggaacagactgtcttctgtttctccctttaaagagcagtaccagaagatgtggggagagggagaggagaggattattaaggagagacttttaaaagaagaaggacagtcaagaaagacttgttcctagttctgccaagagtcaggataaacttatgctttagggaaacaaaaataaggaaaagataaatatatgaccaatctttagaataacgatcataatactgcaaccctacatttacttgatattctgttgtttccaaagggctttcacaaatttttctcctgcatttcatttagtcctcatagcagtctgtgaggtggaattatgcctattttactatggcataggaagtgaagttactagctcaaaagtacaaaattagcaattgacagaccccaactaaaacccaggtatttaatttcttatgtggccgggcgcggtggctcatatacgtaatcctagcactttgggaggctgaggtgggcggatcacctgaggtcaggagttcgagaccagcctggccaacatggggaaatccgtctctactaaaaatacataaattaaccagacattgtagtgcaggcttgtaatcccagctactagggaggctgaggcaggagaatcgcttgaacctgggaggtagaggttgcagtgagccaagatcatgccactgcactccagcccaggtaacagagcaggactctgtcaaaaaaaaaaaaaaaaagaaaaaagaaaaaaaaaaaaaagctgaagcaggagaatcgcttgaatccgggagacagaggtggcagtgagctgagattgtgccactgcactccagcctgggtgacagagcgagactccgtctcaaaaaaaaaacaaaaaaacaaaacttattatgggtgttttttccacggtgtcaactttttatcttgaagatgagcattagttaagagtgaaattttgggggctttctatccccttttctgaaaatagacactttattgagaagtgtggctgaggtttgcttataggatctaaggaacctggctgttctcttgaacagaactgaagcgtggatgagataatcagtcttcctatttgtgaatggatttttggggtggctggaagataaaattgtatggaaaaagcgacaagggctactttggacttctgttttatttctcattgcattgaaggtgaatgtggtgcctttcagaacagttagtgctgtggtttagaaataacactgtaattatccttcatttgaatctcttcctctttaagtgggtttttttagatgtgtgatgtgagtttagtcaataggtgggggtgcttaggaaaacaagctattttggtccttggcaaatgtgggcattggtatctgtgttccttgctatcatttgctgagtaacaacattattttttttctaaaaatatataccacattcttctcttatttgcatttgcttttcattttactgagggacatatacacacacattttgatctataggatgcatttagagggaattttctgaaaaatcattttacaaccttttgagcacagaaagtgaatgaagaagagccataaaaaggcagccacaaagaaaagcaaatggttaatttctggaaaagagcattgcgttttgtggaatttaaaactgcttcttctgcctgaggctatttaaaataattttatattttagaagcttgaagagatttaagtacagcaatgtgccccttatccatagctttgtttttcatcgtttcagttacaataagaattctgagagaaagacagaaattgctctatcattattgttataattgttctattttgttattagttattgttatcaatctcttattgttcctaatttagaaattaagttttatcataggtatgtatgtataggaaaaaaagcatatatatagggttcagtactatccacagtttcagatatccactgggggtcttggaatgtatccgctgaagatagggcgggatgctttaaccatttagctcaggattatacaactataactagtagagctgagatttaaaagtctaagcccttagccatggtggatagtcagttaatagtgagcttttattttgcttgattgtctgagtttgagctgacaggccgatgcacaagaggggcagagtcctagcttttttgaggattgtcatttcgcaagggcaatattccttctcatatttatctcaagcccttcatgtataaagacttattcaagacaaaagggtaaacaacatttagtgaggctgaaaattgcacagtttctgttctgtaacgcctcctaatcctgagtttgtctcttctcctcatctgcaagagccctcgtcatcacaacagacctcagcatctaggagattggaagacaccacagaattctgcctatgtgattcacaaatccttcttgctatttgaagctttgcaattctgacttccaggccctctagggaacttttagtgcagggatgcattataacttaggagatcatgatcttaccaatcctggaaaacatagaagcaattctgctgaaggagagccattactggccgatgcagtagaattattatttccattttagacctgagaaatatctgcctgctgttagccaaatgtggttctcccatcaggacccagtaaagaacttggccattaggactactcagcattaatcatttgagggaatagctttagccttatagtgactagtgtgagtgaatcaatatgtttattcctgctaatatgagccaagctttcttctgtaaaagaatgaacttacaacatcataagatttatggttttacacaatactaataaaatgacatgaatattttttgcacgtatgaagcatcttctattgtgaagcttttttagtttatgccacacacaaaaaaaggattttggtaagtgctacaaataatgttaaaaaaacaagatggaactttttttttcagaaccagtagcatttcctacatgtaaatctatggtttccaatttcatattctccagaagagctgaattcatttcctttctctcttcttcagagacttttcttgaacactggctgatgccaggaaagtctgtaaagacagaatggacctccctcccttcttttttatttttatttttttaagatacaaggactctgttgcccaggctggagtgcagtggcatgatcatagctcacttcagcctcaaactcctgggctcaagtgatccttccgctttagtctcccaagtagacgtgattacaggtatgcaccaatatgcccagctaattttattttatatttttttttagagatggaggtcttgctatattgctcaggtaggtcttgaacttctggtctcaagcagtcctcctggctcagcctcctgcagctctggggttacaggtgtgagccaccacacccagccttcccttctttcttaacaccattctccatctcagtactgtcttaggaacacagaattcacctatggggagttcaatacaaaactcccagtttagaaaatgggttctttggtgcctcttaagtccaaaaatattacatgtgaggatttattttagatatgtagctcaagttttgaaatatcactgctacctattctataaaaaatgctgtgtttgagaatttgtattaagtatacctctcaggacaggaactaccaaataaaaatatttgtagaatataaatagaatgtagacagaagctcagctctagcaacagttattatgaggctatcatagaaaatatcatttgtcctcttaagtctgttttacacactccccatcttttctgtgacatggggagggtaagagctgatttgtcaggctttcctttattttggtttcaatatgaagtaactattccaagtcccaggttacaagatttttaaagtggaattgtttttacttagcctaggccccaaacctggagtaggccctcattttgcagagaatgaatatataaaatttgtagtgaagcacctagatctaacatgatgggccaaattatttatgtataatgtctataatttgtactacagcctccaaaaaattttagtttcccattttttcaatgagaaagataaggcttattattatttaatgagtcaaggtcacataaaagtagcattcaaatccaggttagtttagtgccagtatctcctttttcaatcacttgtgttaatttacatatatgacatatgtctataattgattgaacaaggaaaggaattttaagtgatttatttaaagtaactaaactaaggcaatctaatgaaattactaagaatagtgatttggtgagtgagtggagggcaagtggaaagtggtagtaatgtaacttttacattgttatgtgtcacagcagaaaaaccatatatagtatataaaattggaaaatcatgaaacaatgggacacacacatagaaggatccaacagagactcttaaaagtcctttttccactgaggaagaggacagagattgcaaaaagggtagctattgatttttattgtaagccctttggtactttgatattttgtttattatttgataaaatttaacaagattttactaaaaatcaaaaagttatgatctataatatgtctttcacagtaatctactgataacctatcaagatgctttaaattgtagactaaaaaaaaatcagagcgtcttcttagtttatattcattattgttattcataatgtgaaattgcagtgaaagagcattaactgagcatctaatatgttcaaggccttgttctaggttttataggagataaaagggggatacagtttgatcccaggcttcaatgtgttactgtctagttgaaggtgctctcaatgaggaagaaatctagatatggaaaaactaggaacttaaacattttctttgtctgcttcatactgtgctaggtactctgactcatttttcatagaaaacatatactatagaaaagacaaaatataaagagctatgtgagttcagtggatagaaaaatggtttttacttatcaggatcaagaaatgcttcctgaagcagagaattctaggtgggccttgaaagcaagaagggatttctatggacaaagaatggatgggaaggcattgacatatttgctaatcaagaaacttatgtttgaaactcatttttttgttgctgtttctcttgtataaaagtgctttgatgccctggaagttgaggctgcagtgagctgcgattgcatcattgaactccagtctgggtgacagagtgtgactgtcttaaaaaaaaaaaaaagcctagctgtaagctaggtacagaatgaattttaaaaatattgcttgtccagctaaagactttttattaaatgtaaatgctgttaccaaagttacagaatcacaattaagtattgagtataacttctgtccataaaatgtggggaaacttaaagacaaaatggagatcacatggattttgtagctattcttgatttttttttaattggtcaatgtgtttccacatatttagggatcttcttagcttccctctttaatttatttgtttagtttccttaggattgtacttaattgcatgttaattactgatgcccagtggggctgtattttaaagaatcttcagtttgaatctatagtatctttaccatcttgcctagtttttcaagtctttgtgttctgatccaaaggccaagatatctgtggctatggcaaagaactcagattcttaggtttttagaaattataacaaaaagctatatgaataacaataaataaataaaatcagtagtacgaagtaggcatagtacattttttacattgaagtcatttaatctctctcacttgggcactataagttaaaggtggagattgtcatctttgaagattcattggtacactgatcactctccatttaggaaagcttacaaaagtccttgttttacagctccctctcctttgtagtgttagacttaatgaacggcttattgtcagaagttccagaccattacattatactctatgaaagagtattctgtatttcttctagagcagagacagaaaaatatcttatatttgggggactctatgtgtgatcataatgtttagcatgaagagaatgttgcattttgaagctgtttggtttatacattttaaaaaattacatgaatttagaaaatctgttatattaaattggatatttcacatctatggtttaatatctgcagtctttattttcagtcttaaatcctgaactccaaataattattaatctccacaatcccactcttgaatttttacatgtctttaaagttataaaagtgttttgtgctaagggcagttgcaatggctcacgcctataatcccagcactttggaaggctgaggcaggcagatcacttgtggtcaagagtttaaaatcagcctgtgaaacatggaaataccctttctctatacaaaatacacaaattagccaggcatggtggtgcgcacctgtagcccttggctacttgagaggtgaggtgggagaattgcttgagcctaggaggttgaggttgcagtaagctgtgttcgcaccactgcactccagcctaggtggcaaagtgagactttctctcaaaaaaatatttttattcttattgtgaaaaacataaaaaagataaagtataaaacaaaatctacccatcatttcacagctgagggataacttctgtacctattttgagtattttcttcctgttatatttttctagtcatataaatgggtatgttttttaatatgcagtcatgcaccgcatgatgactttttcatcagtgatggaccacataaaccatggtggtcccattaagattataatggagctgaaaaattcctatcgcctagtgatgttgcaggtgttgtaatgtcatagtgcaatacattactcacgtgtttgtggtgatgccggtgtaaacaaacctactgtgctgccagttgtataaaaatatagcacatacagttatttacagtatataatacttgacaattaaactactatgttactggcttatatactctaccttttattgttgttttaaagtttactccttttactgattaaaaaaaaaagttaactttaagatagcctcaggcaggtcttttaggaggtattccagaagagagcatttatatcatgggaggtgagagctccattcatgttattgcccctaagaccttccagtggaataagtgacattgataatcctgaccttgtataggcctaggctaatgtgtgtgtttgtatcctcattttttacaaaaaaagttttaaaaaagtttttaaatttaaaacatagaaaaatgcttatagaatatggatataaagaaagaaaatatttttatggagctataaaatgtgtttttgttttaggcttagtgttatcacaaaacagtcaaaagttaaaaaaaatctaaaaggttacaaagtaaaaacttaccataagataaatttattattgaagaaagaaacatttttaaataaatttaatgtggcgtaagtatacagtgtttataaagtctaccaatgtgcaatagtattttaggccttcacattcactcaccactcaatgactcattcagagcaactttcattcctgcaagctccattcatggtaaatgccctatacagagagaccattttttatcttttatactcgatttttactgtaccctttctttgtttaggtattcaaataccattgtattacagttactacagtattcagtgcagtaacatgctgtacaggtttgtagcttaggagcaataggctgcaccatgtaacctaggtgtgtggtaggctataccaactatgtttgtgtaagtacactgtatgatctttgcacaatgatgatatctaccaatgcatttctcagaaagtatcccatccttaagtgagacatgactgtacttgggacatgtctctgtgtgtgtgtgtgtgtgtgtgtgtgtgtgtgtgtatgtatgtatgtatgtatgtgtgtatgtatgtatctatctatctatctatctatctatctatctatctatctatctaatctatctgtctatattcttgtattggttttcctcaccttttcattataaacgagcattttcccacatcattaagtattctttgaagacagaatttaatggcctgtatgcttcctttatggtgcttcttttgtgtcttatacttctatactgccctctcacatttaaaaaaattattaaaggtttttggaatctttgttattaaaaattctagttatctagtagtcatagctacttctacctgagtttatgagcccctgcttatgacaaataacaaataaataaattgggcttctatttattagtctatttaggaagtcacttgttttttagcttatgtaatgtgttttgtcttgatctgaagtattagaacacaggatcattttactgggttatgttggatttatttggcaaatccagttctcttatctccaatagcctgtgtttgtgactgcttggatatgggtgattttaaagactagtgaagagcatggattgtgattacatatttacacctcaatagctgtgtgactttgggcaaattactccattgcatcgcaccttcttttcaagattaaagcctaaatgatatcataaagtacatagcccagagccaggctgataattgaatatttttgttatttttctgtcattgttgtaattatgaggtctttggccatcaaatagaacaaagctgactagccttagttgagattgaaaagcatcagaacttttctttacccattagaagtaactggccatggaagaaaaaagcaaataacccattttaattctggaccagcaggaaggcgtctttgtctgtcctgtctaagaaactctcataagtagcttcagactttgcaatgaggcagctgcattagtgcatctgaaaagttcactgctgtggctggaatgttaaatagcagttcttgacagtgaccgaaatgcatacctggggtctcaaggaaaggacttaggacttccttttcgttattcacattgttcaatacctagtctgtctctatataaatgccagtgttgctttaataaattattatggatgatcatagtaatacctgtagctgctatttactgagtgctgactacgtgacaactaaggtttttgtgcattatctcatttaatcctagtggctgctctgtgagtctgttatcatcatccctatttcacaaaggaggaaactaaaatttagagaggttcagcattatctaataagaatttcaacgttggtctctcagactccagaatctgagcttgtagctttgctcttagctctgttgttttggttttataattactgcatagcctcattcattcattcagcctgagaatctactttgttgagaatctacttcatgccagctcctgttctaagtgcttgggttatagcatgcaggcaaagtccctgccctcccaaggcttattttctattaaatataatagaatattaagttaccttcaggtgttttactcctagaataagcgttcctgtgaggctatgagttatcttattcttgagctttaggaacgtaaccgaaattttgtataaggctgagtatacctcctaagcttatgagatttctacagaatttctacaaaatactggaagctagggcatgttccattttatgcatcaggctgtttattttagcattggctttttagccctggcagactcctcaaatcggagacgttcttactgattactttaagaagcttttagaaggtttggaaggtttattgttcgtgataaagctactttttgataccttggtttctttgacttccttaaatgttctataggtgtatggagcagcataaaaactttctttctttagaacatgccaaaaatacatcagacaaacctagaacaagaggcttaattacttcatagaataaattttcaaattcggatacagttgaaaaataaatgatgaatcggggaggtctaattatgagggacctaagtattaataccttgtttccgtaatatcaagaatattaaatccatccttaagaatgaattattataagaagaagatgatatcataaagtgtttgtgttaatgtcacatttaatccatgtggaagctgaaaataattttaaatatccttaggtagaggctatgttatattttttacgtagggaattatcagtaaatactatgaagtgtgtttccttataaaaaagtagttgccttattttgcattggaaatacaagtgaacctttttggtcccataaaatgcaaatggcttgtatatgttcctttttttttttttcttaagtcctttgtctaagaaggaggatcattggcaaaccagctagccattcactttggattttgacatagcttctccttgggaccctaatgacagactctctgataaccagtgcaaactccatgaatatctttcatttctctagaaggaggtgtggatttgcaaggctaccagctggatatgcaaatactacctgacgggccaaagagtgatgtggacttttcagagattcttaatgcaatacaagaaagtaagtttcactcaaattttaaattcgccgtgagagaagaagctattataatacttgggaggggtaataaactagaaaccttagatgtcaagctttaaaaaatattaacaaaatgatgtcttgaaagagatactgtgcaaaataattttgaaactagaagagatagtgaaagaggtttaatttgtgagattaaatcacataatagtggaatttttgaaaaagctataacggaatgatcaattctgtatattgtatttcatgtaataatatttagtaaaccttggagtattgtaaatttttagatttcttgattaatcataatcaaagaaaaacctttaagaaaacaaaatacaattcctctgctcaaatggaagtaataagagggaaatgttagtggagcaaggtgaaatcaggaacttcttctccaaaatgagtatctggagtcattgatgatggactgcatgccagaagtgaaccctcattttctaagcattttgagtaatcaaggtttgctcttcttcgagtattttatttctgttttatagctttcactcagaattttatcagaatcaacacatttactcaagttaaatatttagcattgaggatgggtgatgcggtgtctcatactaagtcattaccattgatatttcattatcagagctctaattctagatgatgaagctcctcttaatatcgaataatttatctcatgttggatttgagggattttgatgtgaagaacattgtataaacaaccattgcaattttttcttacttctagttttgggacattgcattttcttttctttttttattattatactttaagttctagggtacgtgtgaacaacgtacaggtttgatacataggtatacatgtgccatgttggtttgctgcacccatcaactcgtcatttatattagatatgtctcctaatgctatccctcccccagccccccaccctacgacaggccctggtgtgtgatgttccctgccctgtgtccaaatcatctcattgttcatttcccacctatgagtgagaacatgcggtgtttggttttctatccttgtgatcatttgctgagagtgatggtttccagcttcatccatgcccctgcaaagaacatgaactcatccttttttatggctgcatagtattccatggtgtatatgtgccacattttttaaatccagtctatcattgatggacatttgggttggttccaagtctttgctattgtgaatagtgccgcaataaacatacgtgtgcatgtgtctttatagtagcatgatttataatcctttgggtatatgctcagtaatgggattgctgggtcaaatggtatttctagttctacctccttgaggaatcactacactgtcttccacaattgttgaactaatttacactcccaccaacagtgtaaaagcattcctatttcttcacatcctctccagcatctgttgtttcctggctttttaatgatcgccattctaacttgtgttagatggtatctcatggtggttttgatttgcatttctctgatggccagtgatgatgagcattttttcatgtgtctgttggctgtataaatgtcttcttttgagaagtgtctgttcatatcctttgcccactttttgatggggttgtttgttttttttcttgtaaatttatctgagttctttgtagattctggatattagccctttgtcagatgggtagattgtgaaaattttgtcccattctgtaggttgcttattcactctgatggtagtttcttttgctgtgcagaagctctttagtttaattagatcccatttgtcaattttggcgtttgttgccattgcttttgatgttttagtcatgaagtccttgcccatgcctagggacattgcattttcttgttaactttcttatgaataattttatgctttttagttatccccatttatcattataccgtcctcttgaccttatgagatagttattacctccaccttacagatggaacaactgagggtggaagaaattaaatgacaggggaagatgataataatggagaccagactgcaatgatggctgtttgttccttcatttaattccttcatgaatgtgctcagtacaggatttaaacacattgaggtgaaggatcctgaaactgaagattaggctacttttaaaagaaatgtttttagcagagaatataaggggatcagctatttattccggttgaacaatccctttatattacattaatgaataaaagagaaaaaatttccacaagagaataaaaatcagattattagacattggagagaaaataacttttcatggaaagttataaaattatgtaattacttcacttgatttgaaagatgataggttgtacagtgctcaaagagttcaaattttttttcaataaatgataaaagttggcttccatgcaagtgctagaggtgaacttaaatttaaggagtgggggctagaatgaacttgcatcagaatgaactaaaggttagtaaggtactatttttatagtaatttttattaccagatcttagtaaagacgtgtgtatctgatgttaactgttctgtagtttagaagggtgatctttctatgaacaggtagaggagtataaatttatgagtacttaacagaagaaaaaggaaatgttacttgactttaaaatgcaaatccagccctttataagtttatgcattttctattgctttggaactaatttattttcttgttgcaaacaagttttgtgctaattagatttgagaagctgcccacacaggctgggtcatttctggaaggaaagattttgggccattcagtctctatttaggttccaaatatgatcgaaatttttagccagttcatggaaatctccaagcataaaaataggtagcttggtactttaagggactgtagcttagattatcgtttctggaaagctttgcgagaccatcgttaagtgtgtaaagaatatggagttctgcgactggccccagtgtgtgatgttcccctccctgtgtccatatgttctcattgttcaactcccacttataagtgagaacatgcggtgtttggttttctgttcttgtgttagtttgctgaaaatgatggtttccagtgtcatccatgtcctgtcggggggtggggggctagaggagggatagcattaggagaaatacctaatgtagatgacgggttgataggtgcagcaaaccaccatggcacgtgtatacctatgtaacaaacctgcacgttctgcacatgtaccccagaacttaaagtataattaaaaaaaaaagaatacagaattctgaacatcagtataattcctctcctttttgttaagattaacaagatgatggaaaattttcacttttttcttcaaatgttgtgactatttatatatagtatatatatatatatgtatgcatgtatatatgtgtgtatacatacatatacatacatacatatatatacatacatatatatacacacacacatatatatatatatgagaccttcaagatcaagctagaagtgcatatgtgcatgcttacatgtgtgtatttcaaacatttcttgagtgtctggggtaggctggccatgatggtgttttcccaaagtatctcttttcaatcttaaccctaagtaataatagataagattttctccattttaaaggtgaaaaaactgaatatagctccccaaggatatatggttactatgtgatagagtcaatatttaattgtatgttcatccttgttctgctaaatactaaattaaataaaaatgattaggaaaaatgaactactttgcatttttaaagttgtattatattttcacatcttgatgcaagaattttgccaccatgcttctacattgtgaaatacatttacagtattttatcttttagtgtgcataccctaagtatatcctcatctcttctaaagatgtctcagagtggctggccatactcaagtgctttttcagatcctccatattagatgtacagcttataaaaaagaaaagagttattttaaccatccatccatcttgcctgtcatgtgtcaggtactgtgctaggcataataccttaaggcagtggtgaatgtttggtacaaagtctaattcaggaaaaatgaaaacgttttcagatcacgtcttgttttggtgttcaacaggaaaacaacttgattgctttttaggaacaggcatttacatgtgaaagtataacaagggtgtgtttgtgtgtgtgtgtgtgtgtgtgtgtgtttgtttcttttcgttgatgttatttgtcccttcctctctattctcacccttcactctccattccaagatggtagtcaggtaccttgaactcctttgtttcagcagagttttgtgttaactaaagttcctgccttttttttctgaaagcctgagcttccaagactgatgcttgtatggaagaagaaattgcaagagagatgccctgtagagggagccaggcttctggtagggggaatggaaagggagggaatggctatgttgcatgcctgggagactgcaggggagccacctgaactgtcagtcacacagagagttcctggcctgagaaaggaacttaggagtctctgggaagggggcagtctcatcttcctgtttctttgttttatctccagtgccttgaacagagcatggagtgtggtaggtgcttactaatatttgttagtgattgagtgaacgtgtggaatcactggagacttgaaaggtgggcagctcagtagtaaccagtgtgtcttggacacctgactgctctttctaaatgttctgctctttacaaaactcctaggacctttgcacagttctggatacatgaggcaggaaagtgggagtgtcagcaataactgaaattaaattgtccacgaagccggtggaatgggaacttgcagatagatttagtttgatgcaatgataacaacattacagtgcaattcctactcttgagttcatctagtaagattcaaaccctccatccatagtttaaggagtggagtgcctactcaaatcttatgtacagtagcacctattaaaacaaaaataaacaaacaaaaagaaaaacactgcttttttaatcaccaaagttttcaaatccgaacattttaagaggtaagcattttaaaatatttccttctgaaacttgattgagaatcatgtcttaaagctctgcagtccatgaatcaggtgtatgtgtgtgtgtatgtatgtgagcatttattacattagctggctactgtgaagcatgtcattcaaaggttatactgtactttttcattctcactttaaattattttcaatgtccagccctttttagagaccattcatccccctaccatttgttgcccacccctcttgttttgctcctagtttttcctttcatgattcccagcatatctggatatatactgtagggacactcttgaatggcatccataccctgaaacacatgattgtgttgtattccatcaggttctgatgaaggaaagagggcacaagatagtgtttgcagtgagatctgaggagttaaaaggattgtgggatcattgttatcctgcagtctgtttgtgcttgcacgtgtgtctacataatcatatagctgtgcctacattaggggtggtgtatacttttgtggctgaggagactgagtcatttctcagtgacaccgagtgagtcactttgaatctaattctttagccctgatttccaattttatttttaacctgcatggtcatgccatttcagaggagcagatggcagggtatggggtatgggggtgagcggggccgggggggctggcatatattgagcagataatcttgtctggcaattttgtggctgaccttttacctatgttattttatttagtctttaactctctttgccttaatttccacatctgtaaaaggaaaatagtaatagtacatctatgtaaagcctttaacatagtgcctggtacacagtcaggggtgtataagtgttgactgccacctttgtctttattcctcaatcattcattctgtctgggaaattgtatttccatatttagaagataaataaatatttagaaaataaagaaattaaagcttgaataagttaaatatcccaatctaatagctaataagtggaagggctggcatttgaactcaggtctgtctgaatccagagctcatgctctttccaaagaaggtgaaattgtggtcagtagacttggaggctcttttatgcagagcatgaatgacctcactttatgttatggaaaggtcgccaaggctaatgaatgagcaaagattgaattaggcacatagttcttctctaaatgtcattcccagggctgtaagaagtgccatcatcattatttgcctttttatagaagtaaccaaggtgttcaccttttttttacaatgaagtagtagtaagagaagctcttcttagcaaatacgctaaatcagaaacaagttaatgatctcaaccccattgtggagtgctggggttatatacaataccatcatctgtgctgttttataaacattgccattattgagccaggtgatgacaatgacatctttttttattttaatttttaattttggtgggtacatagtaggtgtatatatttatggggtacatgaaatattttgatacaggcatacaatgtttagtaatcacatcagtgtaaatggggtatccaccacctcaaacatccattctttctttgtgttacaaacaatccaattatacttttagttttaaatgtacaataagttattattgactctagttaccctgttgtgctattaaatactagatcttattcattctatctaattatatttttgtacccattaaccatccccacctcccttccgctctactactcttcccagcatatggtaaccaccattctactctctatctccattagttcaattgtttttagtttttagttcccacaaataagaacatgcaaagtttgtctttctgtgcctggctcatttcacttaacataatgacctccagttccatccatattgttgcaaatgacagaatctcatatttttatagctgaatagtactgcattgtgtatatgtaccaccattttctttatctgttcatctgttgatggacacttaggttccttccaaatcttggctattgtgaatagtgctgcagtaaacatgagagtgcagatagctagtatactaatttcctttctttggggtatatacccctaagcagaattgctggatcatatggaagttctatttttaattttttcaggaacctccaaactgtccttcatagtggttgtactgatttacattcccaccagcagtgtatgagggttccctcttctccacatccttgccagcagttgttattgcctgtcttttagataaaagccattttaactgaggtgagccctgatttccaactttattttacaatgaaattatatctcattatgaaatctgaacattttacaatgagatttctcattgtagtttttatttgcatttctctgatgatcagtggtgttgagcaccttttcatgtgcctgtttgccatttctgtgtctccttctgagaaatgtcttattcagacatcttgcccatttttatttggattattagatgtttttcctctagagttgtttgagctccatatatattttggttattaatcccttctcagatggatagtttgcaaatattttctcccattctgtgggttgtctcttcactttgttgattgtttcctttgctgcgcagaagctttttaacttgatgtgatcccatttgtccatttttgctttggttgcctgtgcttgtgaggtattactcaagaaatctttgcccagtccaatgttctggagagtttctctaatgtttccttttagaagtttcttagtgtgaggccttagatttaagtctttaatccattttggtttgatttttgtatatggtgagagataggggtctagtttcattcttctgtgtatggatatccagttttcccagcatcacttattgaagagactgtcctttctccaatgtatgttcttggcaccattgtcaaaaatgaatttactatagatgtatggatttgtttttgggttctctgttctgttccactaatctatgtgtctgtttttatgccagttccatacagaaattagttttaaatgaatattttttttaaatctcatgactttttgtttgtttgcaaaggcatattttaaatctcaataactttctgtggcagaaggaaggttcctgctgtcatatctgtaataactagaaccgcaggttctttagggagatgtcaacacaaccatttaattgttgccagaacacactagcagaagtttctaaacttttgtaaaagcagtaaaatgtatttttccccaatatatgatcaacatataacttcaatatacaaaacagaaactgagttgtttggtataggtaggggtagaaggtgagccttgcccgctcagttgtctctttgtctgctccatggcccctgaaactcctcaaaagggctgtagggttccagagaacagagattgaaaactgctggcctattagaagggagtaaaatcggctaaggaagcattatgtcctttctaattgctttatttatttattttgagtttttaaacttaaacctccttttttcttattggtaaaccaggcagcctttgccttagggatgctgtcaagatacatttgaagaataatgagcatctagagagtcttgggcttgctcgtgtcatatacatgctaaatagtgtttagttcttaaaatcccagcctaaggtgttcaaagctgtattgtgtctttgtatttccgtgaatttttaagacaataatggatctatttgttaaattttagaaagttgtcagagctgtcagactacagatgtaaagtctagctttattcagataaatgttgaaatggcaacaagataattgcttggtggttaaatgacttccattcttgaaagccaaacatgatttaagaacagtaaaatgcttcccacaaaaacaaaagccagctagaaatggtatggatttggggtctgaattgaatgaaaattcatctttgtcacttactagctgcatggccacacttagcatttctgaacctggcttctttataataatacttgtctcataggttgttttgagaatgaaatgagaaaatagacctgaaaatcattaacacacagcaggctgtcagtaaactgtaattcctatctttgtctcctttcccacttccttcatgtttaatctctgtgattctaagagagaagtagacattttcaagccatcttactaaggtaatcagaataagaaaaaactgaaaattgatgtcatcctacaattagcttttatttatcttaaaatgcatattgagtgtctcctacttggtagcccttaagccgaattggagctaccttagctcttcaccttaaagggaccttagtctaaagacatagagatggacttattataaaacaatctggtaagtgttaaaattgagatataaacattttttgcattctaaaatattcccggaggtgttctttttttttttttttaagtgatactttgaggtcagtatgtaatcccttgagaattctgagtatcagatgcaataacttggaacttaggacaaaaatagtataatgaactggcgctctagagaatgaatatagatacttggattatgctgcaaagccctcttctgtcttcttcaatgacctgtaatttcaccttcttttctctgcatctgaaatttatatatctgaaacttctatactgtaatatcaaggtggggttattttgctgcatttggaaaatagagaagtaaagaaaagagcaatgaatcaaagtctttgatttttttgattgtatttcttactgtcttctaggctatttctaaaatacacttgctggtttttttttttcattgcctttatagcattgattcccaaactttgttctcttgcctggaagtgtgagggcttcccactcatgtcatgtccagcacttaactctaaatctttgttcaatgaacaaatggcagaaaataattcattaattagttcgtccatttatttgagtccttgaaatatatttgtgatctcttatccatagggtattaacaatagctaacatctcaaatgattttcactggaggaataattgaaataattgcaaatagttgatttgattagtagatttagtattaccaaagtaaattcaccttttcatcatgtaaagatcaccatgatctgcctgcctgctggtcctctcctgacttttctgctctgcctccatcctgggatgatgtaaaccaagccagctgtcataaatctctgagtttaatgctttactcagactctttagctgatttttcgtctcccaggcaatttaaggtccttgatcctcgttgttcagttataatatgtgagtccttgctgttttgttcccaagtcattttttaggctgagcttctaatctttgcaatagggaatcatttgagtatcccccttgccttcccaaatgcatggtatacacctaccctgaccaatctgtgctgcctaattctgttcacacagcccttcctgggtctgaatgaaatgcagatctattacttgagttgcatggtagttttgcattttctctccttcttgtcattctttttttttttgcatttttttaaaattatattttaagttctagggtacatgtgtacaacgtgcaggtttgatacataggtatacatgtgccatgttggtttgttgcacccatcaactcatcatttacattaggtatttctcctaatgatatccctccccgagccccccatcccacaacaggccccggtgtgtgatgttccccgtcctgtgtccaggtgatatcattgttcagttcccacctatgagtgagagcatgcggtgtttggctttctgtccttgtgatagtttgccaagaatgatggtttccagcttcatccatgtccctgcaaaggacgtgaactcatccttttttatggctgcatagtattccgtggtgtatatgtgccacattttcttaatccagtctatcattgatggacatttgggttggttccaagtttttgctattgcaaatagtgccacaataaacatacatgagcatgtgtctttatagtagcatgatttataatcctttaggtgtatacccagtaatgggattgctggaatggtatttctaattctagatccttaaggaattgccacactgtcttccacaatggttgaactaatttacactcccaccaacaatgtaaaagcattcctatttctccacatcctctccagcatctgttgtttcctgccattctaactggcgtgagatggtatctcattgtggttttgatttgcatttctctgatgaccagtgatgatgagcattttttcatgtgtctgttggctgcctagatgtcttcttttgagaagtgtctgttcatatcctttgcccactttttgatggggttgtttttttcttgtaaatttgtttgaattctttctagattctggttattagccctttgtcagatgggtagattgcaaaatttttctcccattctgtagatttcctgttcactctgatggtagtttcttttgccgtgcagaacctctttagtttaattacatcccatttgtctattttggtttttgttgccattgcttttggtgttttaatcatgaagtccttgcccatgcctttgtcctgaatagtattgcctaggttttcttctagggtttttatggttttaggtctaacatttcaatctttaatccatcttgaattaatttttgtataaggtgtaaggaagggatccagtttcagctttctacatatgactagccagttttcccagcaccatttattaaatagggaatcctttctgcgtttcttgtttttgtcaggtttgtcaaagatcagatggttgtagatgtgtggtgttatttctgaggactctgttccgttccattggtctatattttggttttggtaccagtaccatgctgttttggtacttgtagtatagtttgaagtcaggtagcatgatgccttcagttttgtttttttttgcttaggattgtcttggcaatgtgggctcttttttggttccatatgaactttaaagtagttttttccaattctgtgaagaaagtcattggcagcttgatggggattgcattaaatctataaattaccttgggcagtatggccattttcatgatattgactcttcctatccatgagcatggaatattcttccatttgtttgtgtcctcttttacttcattgagcagtggtttgtagttctccttgaagaggtccttcacatcccttgtaagttgtattcctaggtattttattctctttgtagcaattgtgaatgggagttcagtcacgatttggctctctgtttgtctgttaatggtgtataggaatgcttgtgatttttgcacattgattttgtatcctgaggctttgctgaagttgcttatcagcttaaggagattttgggctgagatgatggggttttctaaatatacagtcatgtcatctgcaaacagggacaatgtgacttcctcatttcctaattgaatatcctttatttctttctcctgcctgattgccctggccagaacttccaatacaatgttgaataggagtggtgagagagggcatccttgtcttgtgctggttttcaaaggaaatgcttccagtttttgcccattcagtatgatattggctgtgggtttgtcataaatagctcttattattttgagatacattccatcaatacctaatttattgagagtttttagcatgaagggctgttgaattttgttgaaggccttttctgcatttattgagataatcatgtgttttttgtcgttgattctgtttatgtgatggattaagtttattgttttgcatatgttgaaccagccttgcctcccatccttcctgtcattcttaatggacttctcagagtatttgactctctttctcatttaatgaacctaacagcaatattctaccaggcagataattatcaaacatttttctatttaggagaagaagtctaaggaaggtgatgggattcattcacaaatgaccctgtttggatgaacagcatctttgtgatgttcgtgcccatggatagaaaggcctcactcccactctgactggacagtgagctctgagagcagggccatgcctgggctctccagtacttcagccccggttcctagctcagctcagtgtctgcccgtggtaggcactgaatatacttattgattaaaatttattttaaaaattggttagtgttggaagttgagagttgcttttttcttcttagagaatcaatgtaagtttgaatcaaagattttattttgtttctaaaacttaccttgtagttatagctgataatatcagaaacagtgatgaaatatggatgaagtgcacatactttttatgcctgtggagtgtttatatggtctacagtcttcttactgaccacgggttcagctggacattctctcacagcagactttctaatctctgctgaagatactgagaggctggcaagtgataaggttggcttagtatcacctattgtctaacagattgccatgactgactgatttccctgagctcaagtggcagtagccccatgacttccagacagtgattctgatgggaaagaaagagctctcttcctttcccaagttagctgctccttctagaatcaaatcccttgggcttttcatgaagagtaggaattctcaacttcagcaccaattaatattctaggctggatcactctgtggtaggggctgtcctgtgcattgtaggatgtatagcggcatccctggcctctactcactgaataccactttcactgtccccctctccccagtaatgacaataaatatatctccaaacaatgtcaaatatggtctgggagacaaaactggtcccagttgagaaccacggacatagagggcattgttgaactgattgtgccagtgccagaaagtaatattgatagaagatgacctgatattttctatccttgggaaaagcctaaggggatacatacatatatcaagagtttctccttagtatgagccagtcacctagacatgaacctcagtgtccttgttccccctttatctcacaccccgtcctaaaccatttctcataacaaccattccaacttgtaaatatctcttctgccttctcatattgataagaccaaaatactcactttaagctcccagagtctagctagaatcgacaaatcagcatttgttgtgggtctgccatgtgtcagtcaccctgctaatatgcacattgatgtaatcctcttcgccaccctgagagagaagtttgctattcctgtctcaccagtgaggaaacagaagcacatatttacacagctaagtggcagagttcagaatagcgagcaggtcctctgacttggttaaacgatacttttatcttattgttcaaatatcatcaacatcgacttgaaatttaatttaatcactgtctgcttgaaaatttaatcacattacttgaaaccatggaatcctggcttgtgaataagaatcatgttaggaaaaccatatgccaagtcccagaaccatagaatgttagaggaaaagggctctcagatatcgttacattgtgaccatcttcaggtcatcattctgtcatttaacaaatatgtgttgaaggcttacctgtgccagagcctctgtacatcagtcaagacagacaaggtccttgccctatggaacttacattgtaataaggtaaacatccaataaacaagtctaataaataaatgaacaaataagataattaaggattgtgttaagtgctggaaatgaaatgaacaatgagaggacaacaattatgggagggagatctttttacatccagtggtcagggaagttgtctttgatcttgacagctcccaaaacactggacatattagtcttcctcaaaaagtgttagttcctctccataagcacctagcacagtacctggcacaatgtaggtgctacaacccttggctgtatgaaaagaccatggttttttttctttgtagccttataggtctaaaatcctataatatattgttttagtttccttttggtgctatagcaaatgactacaagcttagtggcctcaaacaatatgtttattatcttatacttctggaggtcagaagtcccaaaatcaagactctcctctctggaggctccaggggagaatctgcttttttgtcttttctgtcttctaaaagccacccgcgtttcttggctcgtggccgcatcctgtatcctcaaagccagcagcatagcatcttccaatctttctctctgattctggccttcttgcctccctcttcttaagacccttgtaattacatcaggcctacctatatactctaagacaatgtccccattttaagatcctttgtttcacacatctataaaatcctttcggtgataaaaaggtaagatattaacacgttctaggaatcagatcacctttgggggggtcataattcaccctctcgtagttagcaataaatgttaactttattcctatgcccattatattttacagatgaaaaacttggaaagctaaaagtgttgcctaaaatcacatgcttggatatagctttatacctggtcatctcatctacgtagatcatctctattctctctatatccaaactctgctcttttcattagagaattcaccacaagttacgtgtctttgttttcttcagttattgccacaagggcaggaagccaggtcacttttattcaccaaggtgcaatcatcacacagctctatgcctgacacacaatgtgcacatctctaaaatgtttttgaatgaaagaatgaatactgtattacgtgcttgggtaagaagaacccaatccctcatgaattattttgtgcagtggcttctgacaggttataaaccctcagccatttttaaagcatcaaaagaaaaagtgaactgcaatgctggcccataattgaagtggataaaacagaagggactcaacccatatctttcctctgctggtgatgaacttaaatttctggcgtgctgtaaggcactctgcatttgaacgtggtagcctgtacctagaaccgtgatatacagcactttatatattgacatgttattaacgtcaacagtcttttgagagagcttctgaatggctcacttcattatttcaattcaggataagaggaagaaaaaaggccaaaaatctaagtgcatgctttattgttgcattaggttttctctgttctgtcttagagaagtaacaaaggaggaaaaaaatcacagttcttactgaatagttcaagtggcacgtttatgggttcacttggcaagctatacgacacttaaatgaaaaaattaaatttaatttaaaagtataggtcatctccaacccttttccaacctagaagtcttaaatcaaagtaccttatgccaaacaactatgtgaaggaaagcgaaacaaatataacacctcctgctatcatggaagacaaattatatttacattacggatgtactttgctttttattttccttaatcttgcctaatgaatacactgtttggtcaaacatgttttatgtctgacatacttttcttttaggaaataatatgcttgtcactcaaggagttaatgaaatgatgagaaaatatgaacccaaagggagatgttttctcttttagcattgctttcaagatcccagatttttacccaccttataatgtatttactttggttctagtggccaaggatgtcaatattctttttgatgaattagaagctgtcagcagtccttgcaaagatgacgattctcttcttcaccctggaaacctgactagtacttcagatgatgccagcagattggaagccgggggagaggtaagagtatatgatttcttacaaatgtaattcgtgatccaggcaggaacctgtgaagcatgttccaatggactgtttaaagtcataatctcattgaactgtaggctcttgtaaaacaagggacaggttttatattcctttgacatcccccatgtctaagcatatttcaaggatcctaaatctacctatacacaaaacaaagtttcagtttttcttaaacctatcatttttttaaactgtccgtcattttaagatagcctacattcttgagtgtctcccactggtacaaaataaactttacagggatgggcttccttgtatagatcccccagtgggtagaatagtgacctaaaatgcaccagccttcagttgattgtgttgtctgaagtctctctgagtttccatttgcctctgtaatctggaaacttcattgcaactgtaaatagacctatctatttgtgtgccattttggaaaaattagtattttttttggaggcattcccctttgttcaggttgtgtctcaatagagtttaatatttcctttgtacatgtactgggtacaggtaataggcacaccgaatcagagtaatttatttattgcatattcctaaggtttttatattccagagctagttaactgctaaaaggatgacacctggaacagagaaaattgtttactcttgccaagctttgcagacttcaccccacaaacaccatatgcagctatccaagtttctttttctgttttttttttttctgtttgtttcattaaaaaaaaacactcattctgttattatctgtttacacagatactttggaaaccataatgtggcgtaaagaatggactttgaaagggacctcagacagcaacttgtctcatccctgtaacttacagatgaggaaacagtatcagaaatattagggctttgccaaaggtggcacagctcattgttctgcttggagccaatacccctcctaatgtcttggctgaagccatttttgaaggcagatgctaatatgctgaattcacaggacagccttcttgcttggcaaataagtgttaactaaagtgcttattcaggtagactcctgagtgtctcttaatgtaaaatccaaaacatagtgaggattggtcatcaattgaaaatgtctacatcaagacatggtacatggtcattccatttccccagctgagatgtttttttcgattaaggtttgtgcaagaatgtggtttctagcaatggcccttcaggtctggcatgtttaccttcttcataccaccattggaaaagatagaatccacccatccacttggctgggtttatagacacaattttgaaatctattaggctgagaaatttggctccagcccagtgagcccatacttgatggtctctttcaatgttgtacagcaagcccgaagagcctggatgaaaattcaatccactccttttgttctttactttttaatattactgcaaaataatatttgtaacttctatgtaagttacaaagtatgataataaaatgaacacctggaaccaccatctgatttatgaaccagaatgctatttttcaaattatagtgacaaactaattgtagattactaactccagtttttttttaatggaatggaaaattaatattggagtgtatgaaaacagaaagggtaaacaattgttttgtgaaacttgtctcatattttgtatatgtatgtttacatatatgcacacaaaggtaaaatgtttttcttgttgtgggtaaaaaaaaaaaagagaaacactgaactagaatattcctaaaaccacggaagctactttcaatcccatacctctaccctaccagaggtatcatctttctaaattttattgtgttttattctcttgctctaaagacagttttaccacatagattcgtagtcttaacaacttatatttagatttactttattttatgctttgtaaaaaatggtatcatgtggtatgaagtcttctgagacttgctttttttatcagtgttgtctttaagattcatttttattgttagatgcaactatagtttatgcattttcactgctgtataatattccagtgaatgaactgtctataatttatttatctatttattgtctgttcatggacatttgagttgactccaactttaaacatttttctactattataagtaatgttgccatgaatattcatatacatgtctcctacttgccttatcaagaattttttctctaggcttacatgttatgcacatattcagttttgcaagataatgttaatgtgttttccagagtgagcatatcaattttcactctcatctcacctgcaggatatgaaaatccttagttgcatcacattcttggctacacacggtatttttagatgttttacattttgcgcacttaactcaatgcttcttccaatttttattttgtttcctcttgattacatttttcactaatgaatatgtaattgaacacaatgaaaaaaattattattattattattattattattattattattattttgagatggagtctcactctgttgcccaggctgaagtgcagtggcgcgatctgggctcactgcaacctccacctcccaggttcaagcaattcccctgcctcagcctccagagtagctggaactacaggcacacgccaccatgcccagctaatttttgtatttttaatagagacaaggtttcaccatattggccaggctggtctcgaactcctgacctcgtgatccacccgcctcggcctcccaaagtgctgggattacaggcatgagccaccgcacccgaactgaaaaaagttatttagttttaattgttctttaacattactcacttgaacctcaatttgatgaatgacttaaactggtccctttctctttgtgtgcagacagtgccagaaagaaacaaatcaaatggactttactttcgagatggaaagtgtcgaattgactacatccttgtgtacagaaaatccaacccccagactgaaaagagagaagtatttgaaagaaacattagagcagaaggattgcaaatggagaaagaggtaaatagtttgcttggatgagaaaaaaatatatacatatctattcatatgaagaggcaataagaaataagcaagcagtcttaatgttaaccaaacatttcatttggtcagagttttccagtcttcagagtttggggaatgttccaatatttagactttgacagcacagtttgcttttgagataattttaatgccaaatgattccatgaaaatcaaaatattctattccaattaaatggattgtttcaaagtgtgattccttatctaacttcctacgtctgccatttctctgtatatgtaaatggagggttctgttcgcgtggattaaagaaaactttgagtgaaatccagtcactctctctagaggctctttttacatttcaggaaatatcatgagcttgggcatcctcgtacaccagaggagactgcctggccaatttggccaaaagcagctggaacttacaaaaaagattccagttttaagagacattcaggctatttttttcaggtccccaagctcaagagtgccttaccagtgtttggttcttccccttccttccttctctgcatggggagcttcaaggcagaactaagtaaggaatgtacaagaggccagccaggcctctgatagtaatccatgatgggcttatggtgttctcaggaatactgtgcacatttgtagaacttggcccgttaactgaattatgtaactcttctcggcttctccctaaacattgtgcaaagcttctggagcttttcatagtcaataagaacaacacattggtaatttaagatacttctgattctgttcctcaaggctgaggggatagatctttgaagtcagacatccaggtttttctttgtatgatacagttgcagttcgtacaacctgcgagttgtgccaaggtatcaaatattagaagcataatatgcatatacttgttatctgatcttgggacacttcagataaatgggatttttttcagatctgttaggctgacctcagctcttgaatgtttataacacggaagcagcatttttctggaatgtctccaagagaattggaaaaatggtgagatgaatgtggctgtaaggaaacaggttcttattctcaggaaagaagaaccagctttctcaaagaccatcttaattagaggttccctggtacaacaaacagaattaaaaatgttgtttcttccacctttgtggagttccagaaaatctttcctatacaaactgagtgtatagttgataaatcttactctttaagttctaaattgtctcagacaattgcatttttttcttaacattaatagcacattcatatttttctccttaatcatgccttcttcttttattctcattcctaagtggcagaatttttatatgaagaaataaaagatctgaattgctacttaatctaaaataatggaagtcctccctctgacccattctgactctgtcaaaattctgattcccatcaaaactagatagctttgttcaattaatgcaagatttatattttaagcttcataagtattctctacaggcctagggcttcttctgtatagatcttttcaatgttatttcgtgatttattcgttagaacttaaaaagcctaatgcttttccaaatagcgcacattaaagtgatggaaagtgtcctgttgtgtatcctaaagcatcacctgtactgcagtgtttagctaccagaatttgaggaggatcatgctgcctgttgtacagttgtgctgcacagtacagtgtggagcatgctgtgaagaatggactgcttgtacgattttgtctatatacaagatagttttgtttgttggaatttaaaaaaaaaattttaacaggtatttattttaatgtgtactggaaaaaatagcaattggaaaaagggaattatcactatatggcaaaacatcataaaaacttatctaagcatttcccccctccccactttcccccaaaagttcttctctgggcatcaccttccatatttctcctttcctccacaatcttttagacactacaaacagttaggtcttcccctttctggaaccttcttcacaagtgacctctcccgctgcctggctcgagtcttgccctgactttgcataaatggtgcaatttctctctaatgcagcctcccagctctgctttgcatcttcgtggactcagtcagctcagcaagaaaagggcctttgcaggttctcttatagataaattaatttttccctgccataaataattaaaagaaaatatcccttggctgaacagtaaacaaaccttcatcctttattctcataataagtggcagaatttttatatgaagtatctacattgtattattaaatttagaaaccgttggaagtatttttatttaaatcaagttttttataagcagctacagcagaaagacaattttaatggcgatttcagcttccaggagttaattcaaccttttataggacataaaatgaagaacttagttcagggtggaaaagaagaaacaccctagggacccttgtatatctgaaacgtttgacactatgcacattttatgaattattagtatcttcttaattagctgttgtcatgatgtctaacaattatgaaaaacatgtttcacagacagatgcttatgtttccaaatagacaaagacaggctttctagttcagtttaacatccttatctctttaacattgaatttcaagaaacacaactaggataatctttaattcatgataaaagtgaggacatagtcaagtttaatctttcttaaaacctttgctccaggctgattagtcaacacataagtgcttgctttggtaccctgggtctttaatattctgcaattcaactttcataatagcccagagaaagcaattcacaacaaagttcccaaacaaaatatcattgaagtccaggtgatttacttcttagtatctatccacttaaagtgattcccttcttaaaggtaagctcatatttactaattaacattttctatttctgattttttcatttttaattctatgtccattattgatctttggatacctattttgaaatcattgtcctcaataagacatttatcttttcttttgtataactagtaagaggatgagttaactttgaattatttggaatgtgtgagtaacagttgtactaatggagcaccctcccgcttcagaatcatgtgaaacattggggaagacctttatcattacagtccttacaaaactaatataattaggtaaatcatatcatcttgatgatggttatttcattcaaaaaatatttattgcacactcactctatgccaggcattgctttaaggactaggatctcagcagcaacaaataaaacagaaaaaaaaatccctgctttgttggaacttaaacaaaaaatatgtacaacatatacaaatatcagtaagtgctaaagagaaaaaagtaaagcaggaagtgttgagaggggcttgcaattttataaaagtcagcaagagtgggcctcttttccacagaaagagaatagcaagtgcaaagagaacagctccacaggatggagcatgcctggtgtgttcatggaacagtgaggatgccagtatgactggagttcactgagcaaggtgaagaatagtgagaaattacaccaacaaggcagtggaagccttagtgatcactgggggatgttagcttttctctgagtgacataggaagccactggagagatttgagcagaaatataagatctgttttctgttttaataagggcattcgggttgcctggtaagattagactgtgaggggtggaggtggcaagggcagaagcagggagaataattaggagattcgttgcaagaatccaggaaagagatgatggtagcttggtcaagcacatagaagagaggaagatgagaagagtagaaagtagcactgatgggaattgcagacagattgaatgggcagtgtaaaaaagaagagtcacagactatttgtctgacacatggtatttatctaagcagttgggagaagacagttgccacttacagggatgcggaaaagagtaggtcaaattgtagacttgttaagattgagatatcccaatggagatgttgggtaagatagaagagtctgggattcaaggagagatctggactagagatacacatttgaatgagatctccaaaggagtaactgcaaataaaaatgagaagaggtccaaggattgagccatggggaacactagtgttacaatttggatgataaaaaggaggcagcagaagagactaagaaggagtcaccaaggagctagaaggaaaatctagagtgtgtggttcaggagagatggaggaatcaactgtgtcaaatgctgctgatggggtgtgtacgatcaaagctgaaagttaattattggatttagcaatatggcaggtttgggtggtctgggcaagagaagtttcagtggagaagtcaggggtgaaagcttcattaaagtgtcttcaagaaagaatgggaagagaaaatacagagacaacgaatacaaacagttctttcaatatgtttcactgtaaaggaatggagagaaatagaatgataactggagtatgaagtttggtcaataaagagttctttctattttagatgggagaaataaatacatgtttttatgctaatacaaactatatatttgagatggaaaattgatgttgggaaagagtggaggaagaatttttagagaaatgtccttgaagcaataagaaaagaatgaccacaagtatctcccattgcatggactcacctatctgcctctgtgcccacaaatgccacccttccccagtgctaagggtgtcctgtccatactcattggtaaggccaacccttcactttgcttctaagaccccataccttctcagtcccactcaaatacattgcttccaaaagagataaaatgtagtacgctttaaaaactgaaatgcacaaacaatacaatttgtggaagtagtttgtttctgtttgcactcatctctcagaaggagtgaaaaatccaactgcagtaaacacacacacacatgcatgagcacatgtgggtgcacagtcgaggttgaatatcttggatacttctgtgtaatatgatacaaattacattatcaaaatttttatgctcacatttattaatcacttactattataatttccatttaacagatgagaccattggtaacttgccccagacaacataagtagtaagagataaagccattattaaaacctaagcatacttgctctttgcccttatattgtgttgatttctggtatctaaaggtgaatttcagggttaaagaagttaggagaggcagggcatggtggctcatgcctataatcccagcactttgggaggccaaggcgggcggatcacgaggtcaggagattgagaccatcctggctaacatggtgaaaccctgtctttactaaaaatacaacaacaacaaaaaaaattagccggctgtggtggcggacgcctgtagtcccagctactcgggaggctgagctgagatcatgccactgcactgcagcctgggtgacagagcaagacttcgtctcaaaaaaaaaaaaaaaaaaaaaaaaaaaagttaggagacaggctgagaagacaagtagtgttatgaaaaggaaaaggtaaaggaacaaggaaaattgggatgaataatgaagttgggtgctgcccagactgtggttcttatgcctctagtagccatagacttgaatcttggtacataaccacttacaagctgagtggtcatgggcaatttatcagatttttatggatctctgtttccattgttaatcctgaaggtgatataatttatcgtaaatgatgaagattaagtggacctatatatagtgccaatctttgtttttcctaatttttacttttaaatttcatattattgttttacttccagtgtaagttgttcagctaccttctatttatggcaagtgatatttgttttccctttatgactgatataaaagctttttgtaaaatgattatttaaaaaagggagttatttaaagaaatatacaaaattaagatattgtagatggtattacaaatttgacaaaaattgtgaaggtggcccgcgaatgatagcattctgtgttacttagctagtccttgtggtggacagactctaaagtctgtgatgcctgcttccttttcacaccttcccttccccctgagttcaggtgggacctgtggcttatatttaaccaatagaatatggcttttgctatcatagaatatgacaaatttaatgggatgtcactcctgtgattatcttatatggtgtataagatctcatctcagcagactggcgtcagagagaccctccttgctggctttgaagaagtaagctaccatattgtgagacagcctatgaagagggccacctagcaaagaaaggtggggtggcctctaggagctggcatccagctgacgtccagcaacaagcagggatcttagtcctacaaccacaaggagatgaattctgccaataactgagaatcctggaagcaggtctttcttcagttgagccactgatgagactacagccccaggcaagacctacatcatagcctggtgagaccctaaagcagagaacccagctcagctgtgcctgacttccaccctctagaaactgtgagataattaatatgtgtagttgtaagcctccaagcctatagtaatttattatgcaacaatagataattaatacagtgattaaaagtctgggatcacacattctgagtgttcatttggttctaccattacaagctgtgtgcccttgtaaaagttaacttatctgcaaaatgaggctaataatgggatttatctcatgggttattttaattaagtgagatcatttatatcgagtgcttatctctgtgccttttatatggtaagcatttagtaaacttcattattatcatcattactgttatcataacggctaaatacaacgtgttaacacttttattttggaatagttttcaaggtaaactttaagaaaaattttcatccagtttacaaattctttataacgcaaccattaggaatagcaacatcagtgggtcatatattgttactgtgtatgcattaatgagatttataatttaatgctcttggaagaactcggaatacatttggtaacaagtttagcatgatcaaggttcagatgtttatctgcttggagaggatttggttttagattcatctgggtataaagttatagatcaattcagagctaaacaacaatagtaacaacaacaacaaaaactgtatttgattgtccatcccagtgtttctttacccccattcaaaggaaatcttcacaaagatttccccacttaaagagctaatctcatgcagatggctctgttcccttgtagacttcctgcccaaattaccctaatttcatccccatttatatactgcagccacatccagcttgttgctgtagatgctctctcagcatccagaactccgaggatacaagaacgacaacatcctcccttccttcacagttgaaaacatgatgatgagtgtctcaaataaatgagtgtcaggactatgtgcactacccagatttctgtcctctagggctttctggtcagaaaagaaaaaaaaagaaaaagaaaatcagacttttctccacccaataatctccactttactccactcaatcttcttatatgtcacacacttgtattaccaagggtctcaagttaaggtgacaagaaaggagaatttaggacagtcataaccaaagaaggaagaaagcagattttcttctgaacctcagagccctggcgattccttgagtgtctttcaggagctaccaatgtcagtccacacttgtggtggcttttctgttaacttgagtcttaggctggatttccaaagcataagcagaacttgaggtgagaattcttcctcaagttgttgatgggtggggcaatctcaggagaaaggggcatgagaggagcagaagagaacagctaagccaaaagcatggcctcagctggacactaccttcagcctgatcccacaggggaactcggtaatcagcaggtgcagcacagagctggtctacttttcagacacgggcccccacgtcagtcagtcattggctgaggtctgtgaaggtggtgagaggtaggcactgtccgtttggctgaggatcattctgggtaccagcagcatacattaccactggtattgaattagtagtagagatgctgccaaatctgtggtattcagacagcactttttgagatgccagcaaacatgaaattcatgggggtccttgaccaagtgaagagagaacaagtacacattggaatttcttctgttttaatttgtcaagttgttcttctaattttaggatgctatttctcaaaggtaaagattccatgttgctagtgtaatcactttgagggaggacatacatgtggccaacaagcatattaaaagctcaatatcactaatcattagagaaatgtaaattaaaaccacaatgagataccatctcacaccagtcagaatggctattattaatactaaaaagtcaaaaaataacagatgttggcaaagttgtggagaaaagggaatgtttagacactgctggtgggagtgtcagttcaatcactgtggaaagcagtgtggagattcttcaaagagctaaaaacagaactaccattcaacccagcaatcccattactgtgtatatacccaaaggaatataagtcattctaccatatagacacatacacatgtatgttcgctgcagcactgttcacaatagcaaagacatgtaatccacctaaatgctcatcaatggcagattggataaagaaaacatagtacttacacatcatagaatactatgcagctattaaaaagaacaagatcatgttctttgtagggacatggatggagctggaggccattatccttagcaaactaatgcaggaacagaaaaccaaatactgcatgtttttacttataaatgggagctgaacgatgagaacacatggacatatgtctcttcttttttgagagagagactttgtcttactggtttttgcattccaaagacttattacagtgcttagcttgtggaatcctgagtttgctacaaaagattgtggatagctgattttcacagctgagtctgggtaacaacagtcaattcatctccagggtttttcaacatagaccctattggcatttagggctggataattctttgttgtagagggctattctgtgctttacaggatatttggcagcatctctagcctctacccactagatgccagtagcacctccttcaagtaatgacaaccaaatatatctccaagcattgtcacatgtcctggtgtggggggagggaggaatcatccctagctgagaatccctgggtttgacccttgatccaatattatatggtttgttgtagtgtctagggggtagcgcttccattcttttatccatggtcaaccaacttatttcagcactcttaacatcagactcttgaatcagaaaagaggcctatgtatttgaggggaagaatagagtatgtgaagactggctctcaagccagacagctgggatttagatccacttactacttcaccacttactaagtgaataactgtgtaaagcttttaatctctctgtgccttagtttctttgtttgttaagtgccagataattcctatctcaagggctattatgaggataaaatgagttaataaattacaatatgcttaggaaagagtctggacatattgacagctttaacgcatggctgttgttggcattgatggtactgataaagaagggagtgatttcaaccactggtcatcctgttcctgaagctcaagcattcaatcctgtcacctcttgggctgagagtccttgtgtgtctggggaaagctgaggggacctggtagatggcaagagatataacgataagtcccacctcatcaccaggactcagtccacctaccactgccccatatcagtctgtagaatcagggctgtattcttactggttcatcttgttagggcagttttatcaaattgatgatggtttgagagaaggtgttctccctcctttccctccctcccttagtcttactctaatttctgagaccggtttaaagatctaagggcctcattattgcctcaactgcttttgcttatttaggtagacaaagtttaatcaaaacatttctgttgccaggtcaagatgacctgtacaaagttatcttgatttattcaaaggattattccaaatcaacacgtatttcatataactcacgcatattacttcagtcaagacagaccaactttaagggaaaaaaatacccattatacaaggcacagctgaaaaactcaagtcattttatgaactattgtcatcccacaaaaagaaacttatttaatctaaaagatttctcagcagtctaaatttaacttctctgatataaagcacgttttgcataatcatcattatgtgccacatgtgggcattgtattatatttatgaaaggaattgaagtcctttgtgatacttttgctcctgctgtttttgctatgttatgataaattgctgaaaattatgcaaagtatatatcatgaatatgacactaattattcattaatggcatggagagatttaaaagctttgaagcagcctggagaactgtaaatccatttacaatctccagcttgtaacccttacaagtgaaaaatttgaaaaagatgaagtgtaagctgagtattattaattgaacttgacataccttagttgcaaaaatgatgatgcagcactgcctcttgaggcaagggccctggcttagctcacttcctgttgtatcttaggcatattttaagagcagtctgtggtatctaataactccatttccagatgaagtaattcattcattcattcatcaaatgtctgatgaatatctactactattgaaggaagggaggcattaaataaatatatcagatgtaataggtattgtggagaaatatacaggaatactgggaaggagtcactatttcatttcaggagttcaagaaaaatctctatgataatgggtgaactaagcacaaagagaaattggaatttgcatgtctaaacccaactctctaaagcattgcagaattttcccactgctgggtttcctttgttttgtgcattcctatgcaggctggcatgggtgtaggaagagtaagtggagtaactgaatgggggggtatggtagcagggggaatagctggatttggctgtgggatagaggtaaactctggtgtttgcatctaaatgaacagggaaaaaagtcaagtgcacgagcagtgttgggattttggagaggcccgacctagttgcaaacacctccctaacttgtccttttccattaatcagttgaactctcattctgggtgctacctcttcacttttgcctacccagaaacccaaagtttcttctttaaaattcttccctagtacttataattgcctagcccctctttcattcagggttgtgcgggaaagccactctgtgtcctccaggaatgaagtgttcaataaataattttacagcactgtaagaccacttaaaaggttgggcatgaaggtcagggaatccacctcccatcacttcagcctgaagcaccacagcagcaggtcacaggtgccggcgtggaagccactgggatctcactaatgcccttctgcagcacatgattctcaaaacttacctggagctgcttcaaacctcaaatctgcctgtaactacctgcctgagaaacagcctctcctttcccaccttccatctgagcacccatcattgtacactttaacccagaactttatggagaaggggattctgggaaaccagaaccaagttctggtcgcagcttctcagcaatgcagaggactcagaaggaggtgctaaggtgacaacaaacaatatagtgcagccaccagccctcctaacaggttgttccctgtcccttcatttgaggctatgctagccccatctctgtaatacccagatggtttaaaagttgtaaggtctgaaatctaacacctgcctttgagacagaggagcagctatttctgttttttaacatgggcatggctgagtaaatcacccagtcagagttcctcccagaaacccacatctttgttctgatgctaacgttaggcaactgtcttttttcaaagcatagcagaattcactgggacccaatatttaattggatagtcagcagcagccacaagcctgcctatggaaatgtccttgtgtttgtgatgcaggggagggaaaagaaacaaggaaagacaagctaaaaattccttccaccataactgcccacagaggaattaaagaaggttccctttgtcgtgtccagcccctgcagtgagagtatcaatcctcatgcacacgtgtattgagcgtctattatgttccaggcattgtgccaggcactggagaataaaaaataaatgttctagttatctattattgtataacaaacaactccaaaacttgtatgttaaaataatagtcattctttttgctctcaaatctgcaattgagcaggacttggtagggacagcttccgtctgctccataggacatcagtcggagcagcactactagtgtctggaggaccccccttttaaggtggctgactcacatggctggaatgttggtgttggctgtcagctgaaagctcagtcagggttgtgggctgtgggcctcttcacaggctgcctaggctttctcatgacatcgtggctgggttctaggagaacaaggtaaaagtgaacttttacgacctagccctagaagcatttattctgctgtactccactgggaaaggcagaatgaaggggaagggacatagattccacctcttgatggagagtcataaggttctagaagatgtgtgggatgaacagtaatgttggggccatctttggaaaatataagctgccacaatatgctcagcgtatttgaggagctcactaactagcaatgaaggcagatgtgaaacggatagaatacagtttgaaaagttctatggaagccctggggaatttcatactctgcagagatttcaggaaggttaagagaggtgacctgggacttaaaggatgattagatattcaccaagtcagaaagtagaagggcatggcattccagatgggaaacaacataaacgatggcatgatagactttgaattgaggccttagggctcctctgtgcacctctgcttcccagacagagtgtgaatcccatgaggactgcacggatttctccctagtccacagtgcctggctcatcatgtcatcttgactttcacattatatatgctcgcttagcaatttcccatgaacataattgacatcagatacaattgttctagaccttaatgacagagctagaaagatgtgcattttatagtaatttttttccaaaatgttgcaaccaaatatcatttagcctctttacaaccaaatccatcacactgtacttatatttaaataagaatcatctcaatgccaatttctttcaggccaaggattttactaaacaaactgtaccagccattacctacaaacttagccaagatcatgatggtcttcgaagaaggtggtgttactgctcactagagtactttgtttttcagctccattcttctttctctctgttttctacacatgttgaaattaaaaagagttttctagaagaccaggagtagagcaggcagaaaaatgaaactatactacacatgattttccttgaccttagcagtccagcaggcaggaaagaaaagtacatgtggtgagaccttgtgcccattagagtttcagaagtgcattatgtcgcctcttggggactctcttcctcctcagtctgtaggttcctttcttcagccagaatattcttttggattgtgtagcagtaaatcactttggcattcatctgaggctgccttgattcagtttctcagactctaataagaatcttctgaaatctagtcttttatcagtgactcatggataacatcatatagttataaaagggtaacctgttacaggcgttcgctgttcgctgttgcttctgattgttcaaggggatctcccccaactgcacgtatctgtagaaactccagtcaagtgaaaaactgttagtcttgattccttatgtcacataatgttttacttagttgacagaacacagttaagccatcaattaagtactgaattttagtttgtcatttcctttttttctctggtcccatttgtacatagcaaagctgtaccttaatgcctttttaaaattaactctttttaaggaaagggagttctaaataaactcttaaatacttggaactgaaactttctttgaatgatgtcttagtttattttgtgttgccacaacagaatacctgagatggggtaatttatgaagaaaatattatcatttagttcatggttctacaggctggaaaatacaggaagcacagcgccaacacttgctcggcctctggtgagggcttttgtgcttcgtcacatcatggcagaaggtcaaagtggaagtagacacatgcgaagagaggcaaaacctgggaggtgtcctggcttcataacaacctacttttgtgggactaatccattcctgcaggaacaggtgcagtctcaccagagtgagaccaagcaccaagctacccacaaaggcagcaccctcatgatccaaacacctctcacaaagccccacctctccacactaccacactgggggtgacatttcaacatgagttatggtggagacaaacaaaccatatccaaaccatggccagtgggtttaaattgtccaaaaatgtcattggggagtatattgactgtgataataagcctgctgttgaattatcccaaccattttttaatttattatttttatttcttctgacagagtctgctctgttgcccaggctggagtgcagtggcgcgatctcagctcactgcaaactccacctcccaggttcaagcgattctcacacctcagcctcctgagtagctgggattacaggcgtacaccgccaagcccggctactttcctgtactttccagcctgcagaactatgaactaaatgataatattttcttcataaattaccccatctcaggtattctgttgtggcaacacaaaataaactaagacatcatttttatatattttttttagtagagatggggtttcgccatgttggccaggctggtctcaaacccctggcttcaggtgatctgcccacttcagcctcccaaagtgacagaattacaggcatgagccatgcccagccacaaccatttttttaaatcattatttcatgtccctcattacttagctttgattctgtagttcatcatcatgaccactcacaagcacctgaattctctcactcctttattcctttgacttatttgccgggcaaagccccgaccatggttaaactgcatcttgttcatgcccacccctgagtgatttaatgttgctggaaaaaacatgctgactggttcactttacatcatgaccgcagtctcacacaggtaccagagaatgctcagtgagcctggtacttttgcttcgtcctctctataaaaatcaagtaactttcttcctccctcttttcccatttcactctctctctctttgcttctttctttcattgattcaattttaaaatttcaatcattaaaaaatcatatagtgcctggcacaattcaaggcacttgggatacatcagtgaacaaatcagagagcccctacccttgtgaaactcacattctagtgagggaaaccgtgaacaataaacataataaataagtaaataatacagtatgttagaaggtgataaatagagggccaggtgcagtggctcatgtttgtaatcccagcactttgggaggccaaggtggaaggattacttgagtcccaagttgaagactagcctggacaacatggtgaaaccttgtctctacaaaaaatgcaaaaaattagccaggtgtattggtgcatgcctgtagtccgagctacttgggaggctgaggcaggaggattacttgagactgggaggttgaggctgcagtgagccaagattgcgcccctgcgatccagcctgggcaacaagtgagaacctgtctcaaaaaaacaaacaaacaaacaaaaaagaaggtgataaatgacatggcacaagaaaaaccagagcagagtgtgggtatgagagcactaagggaaaaggatagtcattttaaatagggtgttgggtgggggctcactgaaggtgatgtttgaccaagatctcgaataggtgggggagttggcccactgttacttcacactgccctctctctgcccaatcaaccttctcacctgttttctctgcaccctcatccctctcaacccccctccacagacacacacacacagttctgctgataaccttgcctatactctgatagaaaatgaaaatgctcagacaggatcttctgtgactccccaccctcaaccttccctcccaccaccactctgtgtgtgctgtcgcgggagctctcctattattcgctgaatcccctctcacctcaccttctcaaggactttgctcctgtaattgtcttcctctatctctcctgcatcatcatttttcctctctactcagttgttacaaacatgctcccataactcacaagatgaaaaatctcttgacccctatactctcctctaatgaccactccgtttctcttctacacttcacagaaaacttcttgaaagatttgtctagtgtcctgtctccatctcctcacctaccattctgttttcaaacttctcagtttgggctttctccctcaccatttcacagaaaccccttttataaaggtggcctgtgatcaaatccagcagtcatgccgtctctgttatcttactggcctcaccagcagctttcctccacatggtgagtcattccttccttgagaaaaacatgcttctcttggctttggtgacatctcatgctttcctggattgcttccttcttcattggctctttctcaatcccctttgctcaccttctcttctgtttgatcttcaaatattagtcttttaagacttgatcctgggtccccttttcttctgtatctccatcttcctgtgacttttgtccagttccatagctttatatagcttctgcctgtcactcgaggctttgtcatctcagaggctttaggcagcagggtttagtttttgatctcaggatggcagaagtggaggaggaggaatgctctttgctgcgaccagggacccagataacagaagctgcatccagacacctgcctctggggcagggaaacacaaatcacacaccagacttcaaggctctgctcacagctcaatggctagagctcatgatatggctcctgcctacccaagtgggctaaggagctcagatttccctgtgcctgaaggagaggagaaccgatgccagggacacactagtgacccccacagaaaatgttttcaaatgtactttatatatacatgtacatacatattcacacacacgcacacacacacacacaccctataaagtaggtgagggtagttatatcagcattataccaatgaggaagtgatatgagttgaggtataacctatcagatttctctgttattaaaaatcataagagccccatttattgacagttttgtataacctttaggtaaaaacacttgatagactataccgctgtgtgccctgtaacatcctctaattttgatcagcatttcaccaagacataaatataacagactgaggagggatgtcataacccttcccaagtgcacatgtatacctatgtaacaaacctgcacattctgcacatgtatcctggaacttaaagtaaaataaaaaaaaaaaagacagatagtaaaaaaagaaagtatttccaaagttaaattgcttcctcactagcagaagacaccaaattcttctgtcttttctgggtcttgcttatttcatggctgttaatctctgcagcgtactaagggcatagcgattcatgggttactgattgggtcatagctgtgaatggctgtcagtgggttgatgttttgtgataataaaaagtatactgtgatgataaagttgtccccaagttcagtttatctcatataccatctagaagagtagggaaaacattatgatggtctgtaagaagtgaagggacgtttggaattttatagatcagaactgacattgcttacttctaaggagagatttagtactgggattacctacaaagggagtattttctctcccaatagatagtagaccaacctctgttcatactaattacattatttataattagggtcatcattgctttgctgaattttgagttccctgagatcttgaactatgtcttaaccttctttgtatcccgagggtccaattagggcctatgcactaggcaacacagtgcacagtagttaaatcatctttaggtgtttgctgaatgattttatgagtcattgtgttgtgaggcagataaaacatttgcttttcataatagatctaagaaggtgatggaagaaggttgtctatatcagggtgtattaattagcagtatcagatatactcccactgccggtggtcttgtggatagatgtagccatatgactacttctgttcaatgggctgggcacagaagtgttatgtatccttatgaggccctctgagctctgccttccctctggcagagtgacccatcagcatgaaccactaaatcactgcaacgagctgacctgcagtagacatgtagcatgaacaagaaataaactttatcatggcactagccgatagaaataatgtaatttaaaatattcgggagctacatataaaaggtaaaaataaacagatgaatttaataatagttttgcttatccaatagatctaagatatcatttaaacatatgatcaacatacgaattattgagatattttacattctttttttgtatatatgctaagtcttcaaaatctggtgtgtactttccacagtcagcacatctcaatttgaactagttatattttaagtgtttaatggccccagttgcctactgtactgccagtatagctctgctgtttgaagttactgatatttgggggttattagttgctgcaacataacttagcccatcctgactgctacactaaacattgattttccttggataccctgatgaagtaagtcttccagacttgacatggggatcaccagggttggtacaaagtgacaaagagtatgttgcatcaggggattcactttatggcaacatagagaacctctaatgaaatgtgtgaagatttgtgctcagcccctcagcactgaacatctcctaattgtggcctagaggagagtttactttagtttctcataaatttagccacattgaaacctctgtggtaagaggatgaatttttttctgcctgataatagtgttttaacaaggtaatcaataatgtgagaaagctactcgaagtctcgatcacaagatgttcataaattcatttaggaagcattccttctcaatgactgtgtgctcagtaacatgctgggtgctgggaatacaactgtggagaagtgtacagtctcacaaagacagcaatgaaatctataattagagtattcattagctggaatatgacctgcattagttttatatcgcggctgaagagattacttcaaacttcaaggcttcaagcaacctatgtttatgctcccacagtctctgtgggtcaggagtctgggtacagctcaactgtgtcctctaatcaggatccctccaaggccaccccagggtgtctgccaggttgcattcttttctgcagctcaaggtcctctcgcatagttattggcagaatttagttttccttgtggttgtaggtctgaggtcttcattttcttgttggccttcagccagatatagttctcagcttctagagacccctcagagaccctcacacaacacagtggcttatttcttcaaagcgagcaggagaatctctctgacctctaggctcttttttaaggactcatctaatgcattcggcccaatccacgctgcaatggaaggagcccagccatgaggctgttgcagtattcaagaagagagatgatggttgctcaaaggagggtggtggcagtagagatggagagaagtggatagattagagagaagtttaaaaggtagaatcaataagacttggtgatttgttggatatgacataaggaaaaaagaagttaaagatggctcctggacttgagctactaagaggatgattgtgccatttcctggtctggggacactgagaagaagagcaattttgccagtgaagcagatccattatagacattgatgtgtctgatctgccagtgagacaccaggtaccaggtgccacaatgaccactggctacactgatctggagctcagaagagaggtgtgggccaaagatatgagtcttggagatatcagctaataggtgacatctaaacccattacaagggatgagatcatctagggaggacaggtagaatgagactagagcctggatgaagtcctcagggacctccacttaaaggtctactaagggggagggagtggcaatttcacacacaccaatttcttgttgctgttactaatgtcactttcagggaatgaatattgtaatcatttaggaacatatagtacttcaagaggcttctctccaccaggacactgtgtgtgtgtgtctgtgtgtgtgtgtgtctgtgtgtgtgtgtgtatgtgttgcagagaggaaattgcatccgaatcagctgaagagcatttgtaaactacactcacaaattccaatgtgtccctaagggaaaagaataacagatgcaaaaaatttctttttagagacacgtgccctcattttttagagaaaactggagctcataaaagtacaagtcatttgcccagtgctacacagttggctagatgatagccccactgagaggagttaaaggagccctttaaccctcgaggaatgtacacttatccatcagtttcacaggctagattccagaaacatcaaggaattctagtgtcagctattgggggttacccaaatgtcccccaagcattcagtacctgtgagtggaagaaagaaattctcacttattgaaccagtactatacaaccatgacagctccagaatgatgctgcaaggcagatattattttcctcattttacaaatgaagaaactgaggcttatgaattgagtaatgtgcccacagatggcagaaccaagcttgaaatttgctcttactactggccttacattaatttttaggatgttaaagccaactgtatacattgtgcattgactgtaatatataattaagcattccttcaaaaaaaaattacagtggaattgagttcatgagcaaatacatagtgtgagcctctcagctttcttcttgtgaaacagcagttctgaagccagactgcattgatgagaaccaggctccattccttacttgagtaaacttagccaaggtaccagacttctttgtgctttagttcctcatttgcaataaattagaataataataataccggggttgctgtgaaaattgaatgatttaatgtatgcaaaagctttgaaacaccacctaacgtgtagtggcactatgtagctggtcccgtctctatcattactattcatttgcattcactatgattttttttaatccaagaggcttatctgagtttccaattagaaattaatatctcctcctagccccagaattttagagttttgctttgtcctcttaacagtatagttatgagaaagtgatgcccagatagttacctaaggggatacagagcagatgcaagtggctaacctgatttgatccttcacgctcagtaaattgaaacgtcaagcatatttatgcctcagggcctttgtcttctactcttctcactgactggaatgctctctccctgtgtaatagaacagcctccctgagtaatttcttcaggtctctgttcaaatgtaaccttatcaaaaggcttgtccacaccactctatctaaaatagcatctccttcccaccattactttctattttcttactctatttttcttcaaagcacatcatcagaagtattacacgtctatttattgagggtctgtctccccattagagcttgagttccgcaagagcagggatttggtctgttttgttcacagctgtattcccagcacctaggacaggccctggaacatcacaggccatcagtaaagatttgcagaatagatgagtggatgtgtgagtgaatgctaagttacagttcacacaatgggattcatggctatctgcaaagaccaccatgatttacaggtgcattgtcacctacacaactttgggacaaactggacagctccagcccctcactgcagttaagagtactaccatctgtccagttccccaggccaaataacctcttcatcattctaggcacgggatttttttttcaccctccttatttgttcagtcccaagttctttcaaacctacctccactagatctcaagtccgtctatttctcctttcgttctggttctaaccaccatcttgtctcacctggctactagaataactttcttattgaacttcccactcctatgcttcctgtggaccattctctgcaaaacatgcagcacgcacttttggaaacaagtgatccctgcctgtaactcattagtggcttcctattggccttggaaaataaatccaaacttcttaccacattgtacctggcctggcatgatcattcccagccctcttctctaatcctatcttaggtaactctctccacctcacactttacaatgttcaatcaccccagccttttagttcccggaacaatctctgggcctttgttcttgctgtttcttctgcttggaatgcttctcacttgactcttcctatgcctaacaccgtctcatctttcagatttcaggataaaagtcacctaatcacagatcaaccagcaaatcttaatcaggtgcctccagttcttttctgccacagaactatattcttttcctttttaaatacttttcataattttacatcatgcttatttgttgtctgatgtctgtctcccactctagattgtaaatcctatctactgtggtatatccatcacctggaagagtccctgacacagagtagccacttaatgaacatttttgggtgttattgaatgaatgtcacagacgaacctgcaggaaaccctgaagatactgagggaaaaaagacaggaattgggtgcttggatctcaggatttctggtggttcgggcttgtcatcaaagactgataaatccttccaaaatactggtttcttatttattaccttctcaggttataatttgagtgagtaggaatgctgtgttcttttcaccataccaccaatatgatgtggcccctcttggagataacaacaagcatatttttagatttactatgagcaccttaacggcattatgccatttaatacgattcaataagatatgcattgctatcatttcctattttacatttgaacaaactgaggcacagagaagttaaatagcttgttcaagatcacagggctggtaagaggtagataaatgaatataaatatgtgaaatccaacctcacagtccgaattgctaacctctgaggcacagatgcccacatggcattgtacctatactcccatagtggcctctaccagccctttaaatatcatgtttatcctggacacacttgctttgtatctctggcccagacttctaccctgagctccagactcatttgtctaactacccacaagacatcttctcctgggcatgtcaaacttaacttttccaaaactgagtttatgatctacctctgtacccccatcccccatgcccaaacctggtctgtctctatttcctcttctcaataaatggcaacaggaatcatgagatgtggagatgtgtgtgtttatactatatatatacacacacatgtatatatatacacacacacacatatatatatacacatatatatacacacacacatatacacacatgtatatatatatacacacacacatacacacacacacacacacacatacatatatatatgcatacacactcctttgagagatggactgcttggattagatagtggcatggcatttctcctgccttactgttgcaaggactgtgactgttacataccaaggcatggaccaaaatttattaaatagaaggttttcagtatgttcttgctgaacaaaagaaaaaaaaattttgtgtgtgaatcttatctctttttactccaggtaatttcccatgatactcgttaattttctcagtcatttttctaagaatattttcccaaacttctctaagtggtaatttttctctccccaaggttttattcccaggaatttgtattgcagtatattaatgaaacaactctatgtttcataaaaatcattttcatttcttttcactttggctcttgtgcacttggatttatgtggcaaggaatacttaataataaggaaagacctatctagaaacagcggtgtaatcatttggcagtagagaaaagaatgatttatgggccatataattagcaatcatctgtttctcatttatttctcagggctgaagttcagaaggcattcagtaacaagcagtaggtaatgccttctcagttcttccttgaaaaactgaatataaataataagccccatacactatattttcccttaagtatgtaaagaggacacacacacacacacacacacacacacacacacacagaggactcatagatattcatcgccattcaagagaattcaggtaatattttttctcaagataatcaaaaaaacctttaatagccccaaataaaatcacagttcattagtaacttaagtttgctttacatgaaggaaagcctctttatttttgttgctttgttttctaaaatatgaaattcttttaagatgaatttgtataaactgataaagcaacaattcagtctatgcatcttaaatgcatttgcaaagccatggatttatttaaacttcagaagttatcaggtataattcaaaaggaagttaaaaggtgagggtatggaatcagctctgtctggggtaaacattcagtttggctgtgggtgagccacttgtcacctctctttctcctcctctaagaaactgaaggaaaaccactctcacagggttcatatgggaataagatggggtaacatgtgaatgtgctttgacaattgcaaaacatgaaaaataataaataaataatattgttattatttaaataataagtgatttttatccagctgaataaatcaaaacagctatccttttatgcataaaatggttgagatcccacgtcagaattttagttgattcagtatgtgttcagataatgaacttagcttttctacatatagaaatgtatttatattgttctctgagtggaatattttaatatatttttaatgtttacatacatttatgaaaagtcttcaaatgattattttcccactagattgtttattttctgtaagacctaacacttacagtaaatctatggagagagtatactctaagcgctatattctgctctaaatcatttgtttaattcagtgactctatcacatttccatatagtgtcttcggtgttgcccaattttactctttctctcataggaagatgagtgaatatagaaccttataggaaagctaagtgaatttaaagaaatcccattatcatgattaaaatttccaacttaggaagccacaaagccttcccagatctgaagtatatcttcatataaagaaaaagaactatttttaggaaatacagtctttcttctgctttataacttggaaaactgtactatgtattgaaaagcaagcggcaatcttttctgaagtccaacaaatgctcagctgaaaagctgtgagaccatttcagatccccaaggcatcattgcgtccacaggcatgaaatggggcaggactgactgtgtgtgtgtgatgtttctgtatgttctctatgggcatcgcagcctgtgagctcattcacatacccctaactacttagctctgatctaagcagctgtgccgggaggactgaccataataggttactcaacagaagaaaacagtgtttacaaagagacaaagcattggccatcaaattttcagttgttactggtttgtccactccctggacaggcacctcatttgcagtaacctgcagtgttcactctaagagtcacttcattgacagtcacttcctgcttcacaggaatcacaatatccacctaggccaggtctaacggcccacatttcactaatcatgttcatggattagataaatattgtgtgtgtggtccctccatgccaagcactgtgctaggcccaaaagatccaactatgaataacagaaatattccttgttctcaggagggttatactcagggcactacttgtcccaagccagaagataaaacctcatttcagcctgaactgccagaaagttagacttttcagaccaatattagagagtgcctcccactactgatgggccctggccttcctacccttaggaaattcagcatcacaccagtctctgagaacactgcagttgatgccagtttgattttcataatatcttgatgagttgatttgtgtagagtatttataacccttgaatgtttataattcaggtcaaaaagactctgaattaaagtatcataaatgaattacaactttacatccatctgcaatttgaaaacaatttcccggagtgcaaatttaccccagctagaggaaaaagttgagcttctatttttgtcagttgtgcaaaaacaacaagaagaaacaacaaaggattgttatacaatactagtataaggaaagtctagccacaaagcacaaagtcctaacatatctgtcaacattcctaaactataaaaacttaaatgccatgcagtccagatcaatcctatatgagaaagatggggataagtaattggccactttactaatttaaactagcttggctcatattttctcactttccttctacaactgatccctccttgtggaaagtgacttccaaagagaaatctcctaattggtttttcatgtccttttgtccagaggcatagaccaaaatctgttggatggttactggggtgtgaagtcctaattttacttccctatgttctgggttgataaaaagccctgaaggaggcaaaggtctttgtccaaagaacacagctctttcaaaaagctttgccagtcacccacccagattgcaatctcacatcttttggctcccttcatctccaccaccaccaacttttgcttttgcctggatgactgagaacattccttcttctccctcatcatttattctctatgaaacagccacagtgacctttgacaacctaaatcaaagtggtttcccagtgttcctagaataaagtgcgctgcacgtcctgtcttctgctcactttctcagcctcttctgatgccactcttccctccttagtacgccttagccctttgctcttctttctctccctcaacataccaggaagcttcccagctcagggcctttgcacccagagcgctcatcccatgctctttccccagctggtgccttctcctccttaggtctcagctcacatgtcacttccacagaggagactttccttgaccccttgtccagatgagtatgtagccccctcccataactgtttctgtcattactttatcttcagaacactcaatattatctgagtcttccctccctcccttcctccctccctccctccctctccttccttccttccttccttccttccttccttccttccttccttccttccttccttccttccttctttctttcgacagagactccctcttgttgcccagattagagtgcagtggcacaatctcagctcactgcaacctccacctttcgggttcaagcgattctcccgcctcagcctccccagtacctggggttacaggcacctgccaccatgcctagctaatgtttgtatttttagtagagacggggtttcaccatgttgtccagtctggtctcgaactcctgacctcaggtgatctgcctcagcctcccaaactgctgggattaaaggcgtgagccaccacgcctggcctatccttgcttttcaacttgtttttgcctatcttctttaacatttttgtagaatgtaaatgttattcatacctcccttgtttacagctgggtctccagctgacatgagtgccacacacacagtgggatgtttgttaaatgaatacttgcacttgtaagggtctggcctattggtgaggaatgccccaaatcataaactctgtccaggtccatgcattctaagttccaactcaacttaaactgtgggagccttgaatatacttttcaatttagtttcttttttctgtttcagtcctctctaataaatagtgacattatctttgtgaagttgcatgccccatgggaagtccttggaagatatgcagaacaaatgaatgtaagaatgcctttcaggtaggtggaaatgtattttattccactctctctgctgcttcactgtaaatctaatgttctcctctctcagaacaaataaaactgaaatgcagattggaaggccattagaggagggaatctttcaaatgtttaggatatgcaaataagccttcatggccaataatgatttcatggctttttgtgaaaaattctggctaatttagttcttagcaggtagatatttccagtgcctgtaataaagaagcattttccaagtggcatttttatttccaaagtgccatttttagaagtcctgtgtactgctgctttgaacagccagaccacaggcagcagttgcacaggggcatgttttcatgttctttactgactagtctcttccagaaaaacattaaaatgtatttctgtagatacaagtgcaagaaatttcatgacagtgtgatcttctttttaaaaaaaaaacaaaaaaaaccactttttttaattttaaaaagtcataaatactttgcaaacacgaatattgatatttgttccaaggggaatagaaaatactttgtattccttagttatttaaaaggattaatttaccttcatttcacaatgaatatttttattttccctatggattatggaaaagtgatctgcatttgctatacagaaataaaatattaaacctcaaattagaaatgccaagatatgtgggtcttttgtaatggaatctgctaaaaagatggatggatgtagtcccaaggacagttctgaggggactcgaagaataacgtacttttggtttgcaatttgccagtaagaccacattaggtgacagaaatgaggcaaattggtaccaactctacagtctgtctcttaatgagctgtggaaagttgtggagacaaagaacatttatagagacagagagaagggttagggactcatttagagaaaggcaatttccattcacaggcttgtaatgtatctccctggtgcatcttatcttctttgttcattggcctgtatgtcctaataccaagtcaaaatagaggctatgatttctagcatctgttttcctggaggcaaaattctcaaaatggataataaatatagttctgatcttatgatttatttttgtatttaactgttaaaaagaaaatctgagaactcaaggattaaaaaaaggaatacatatatatatccactagggagagataaggaatgtcaatttagattccactgaaaatttttatactataatagttaaagccaaatatgtatcaatgatataataagtgtctaatgtggattaataccatattatacctaagaaccgaaagagaaagaaagaaaaccctacaaaatatgtctagatagaaatttatacacccctctccagtataaataaatctcataaaaccttctgccagaacacacttctgtaacaaagaacccagggagatgatagaaacttgagcaatggtaatgcaaagccaattctcttactacctgcaaaggattttgtatctgaagggcctggccacatcatgaataacacttctgcatgcctactacacagcagaaatgtgctgcctccaagcagcattaatactgttttaatgcagcattgagagaatgtgaaccaagcaatgaaatgaaaatgaacatgaacaattatcttctttttagatataggaattcctgcaggacaattttagaagaaaatattgttaatgtgtgacactaattgacctcattaatattgatgtaggtttacctactaaacatggcttcacttgttgtaacctgatggattaaaaacttttgctattattgtgtccacagtttcagacaaataactctagtctaaggagatacatgcatttccaaaggaggaattctcctactacatcatttcaacaaaatgtacaaacatcattttagctgaattttaatacgcaaagaatcttacctgtattcataattttctgtagattcataattttctgtacttctgaatcccaagtttagtctccatggatttttatccctataatgtttaaaaggaaatataggaatagatttcttatgagaaattacagtaaaacctgcttcttaaatacttatatgtccatggatattttttataactaatagaccttactttttagagaaatttttaggtttatagaaaattgagaagatactagtgttccaatataccccttctcccccagcctacagtttctttattattaacattttgcattagcgtgatatatttgttaaagttggtggaccaatattgataaattcttattaactaaagtccatagtttactctagggttgactctgtgtgtgtggttctgtgggttttgacaaaggcatatcatgtatccaccattgcaggatcatgcagagtagctgcactgccctaaaagtctcctgtgtttcatcaccttccttctcccccgacctgtacctctggcaaccactgatctttttattgtctctatagttttgcctgtgttttaaagctttcacaaatacgcaaaaaaattggtgatatataaacttaccatttacagaagtcagagagttcagtaacagttcgggatatacataaaaagcacctgtttcattattattccattcagtttcggttgaagcctgaaatatggaaagtgaggttgcattttaataaagaatctaatacatgtattctccattcaaactacaccaagaattttcatttttaacatttttaaaagatagatatatagcaatctgacagaataagactgatttttgtatagtttccagaattccttgattttacttatttaattcatctaaagccagggccagtggttagccagtgtgccccggtgtggttatgtacagctgggtgttgatgctgacaagtgagtgtccttcccatactggttgtgaaatacatatatatatatttatttatatttatattactcctgtctataccatgagagacgtgtcttgtgtaaacttaaaatgctatataaatattagttaatataatagcgtgcccactaaattatgtatgttgccctctgatccatctttgcattttcctggggaaaaaagctgacctcagctgaagctgtgcaaataccaatcactccaaattatcatactgcacatgctttgtaggcaaggagcaaccattaaaaaaaaattatggtaatgggtagaggaagaaatatcaatggaaactgtttcataagatttcatgactcaaaaacgcatgccctgtgttcccactgtatttctcactgttaatctctttttagttttttcttcttcacctcttacaggcttctatcttcaatctcctttccttccttgctagttcaaactgtaactgacgatgggttttcttctcgactggcttcatttttgctgttcttccaggagaaaaatctattacctgccccgccgttacaagttcatgagcaggttagtagcacgctctgtcctgacagtgtttgtctttctgttggcccgtgtgctccaacaatgacaaggagctataagctggggaagatgagcctgtgtcacatgggaaagttggctgccatgcacattttaaaatcagctgtgtctgattagcctgaggagaaaaaaagatgaaaacgtccctctccgcgtcttcccagtaacttcttcccacttggggggattgccattcatctgcaagtgtgctggggctattgctttttagcccattcttttttttttttttaatttcaatagtttttgggaaacaggtggattttggttacgtggataagttatttagtggtgatttctgagattttggtgcacccatcacctgagcaatgtatactgtacccaatgtgcaggctttcatccctcgccccctctttttagcccattctattagataaattatcaaaaatcccaatatctttggcctagatgttctcccttcccttccctttctttttcttttttctttttctttctttctttcttttttttttttgagacagagtcttgctctgtcacccaggctggagtgcagtggtaccatctccgctaaccgcaacctccgcctcctgggttcaagcgattctcctgcctccaagcgattctcctgcctcaacctcttgagtagctgggatcacaggcatctaccaccacgcccagctaatttctgtatttttagtagagagagggtttcaccgtgttggccaggctagtctcgaactcctgacctcaggcgatccgcccacctcggcctcccaaagtgctgagattacagggtgagccaccacgcctggccaatgttatttttttctacaaaaattcctccctccactatatgtaatttgaaagcttgaagtgcagatagtcatccttagctgctggctacttgacttcatgagtggggtcctcctatgttagtaatattttgttaataacatatgcagatgtatagcctcactcaggtgcccttcctaccctcttttctgccaaaaaaaaaaaaagaaaaaaaaaacccaccagatgaagattgcatctactatactttgtatcctccgaaagcttgtttttccttgttttttgaggagctagggagaaggggaatgcatcaatgatgatgtcctctaatttgattctgttgtgatcattggagaatctaatttcaaaatcttaattgatcttatgttttcattcaccctgagctgagctgagctgatggttaaactgggaaactagtaaatttctctgaaaatcctagttagttcaactctatgaaatttagaattcaggttccctctgtttatatgctatgttgagtgataaataaaagagtagttggtacattatggtgggtttactcaaatgcatgtttactcagtgaagtacagtgtgagaactgacctccaaagaagtgaaaatgttgtttctcaaaaattgcctgcgagcaagcttattggcagttctttcattaagcagttgacatgacatttggattcaccatgatttagattgctaccttgtcacactgtaatcatctgtacaatcctgatataacagtttagcctatattaatagttctcaaactccagccagcatcagaatcaccttgttaaggcacagatttctaggcctcaaccccagagtgtcttgttcagtagatctgcagtggggatggggaattttcacttctaatggattcccagctgcagctaatgctgctggtcacgggacgatgttttggaaaccattggtctgtatgataggccaagctccatcttctcattaaaatacggatttgactgactatgggacgggaaaacaaaaaccaatatcaaagaaaacctgaaggaaacacagcaaggtgaagagaggtttctcccaactttgagggctaagtggaaatatcaagtttgtacatgatactgtttcagtattctagattctaaaaagaatgtagggttgggagaagtcttattcttgtttggaattgccaagtcagcaaagtcagtatgtgtggaacagagcacattggggtcataaaacctatgttggcactggatgactttgggcaggttacttcacttctctgagcctaagtttttcacatttataaaatgatattaacttctcccctgtatggtttatgtgaggtttagtgcctagtatgtagctgatgtgcacaaatagtatctattaatacttattacatgtaataattaatacatgtaataattaataattacatgtaataattatgtctttgcagaagggtatccttctattctttctgtcgtgcttctgaatttgttatccatctgtaagtctctcctttcttctatcctctagcaactagtccactaactgttctgagtttatctgccaagtagtcattttctccatttatattctctatacaggcattggctctacttcccacacagtcacctaatttaaaacctaagggtccaggtgtggtggcacacacctgtagtcccagatacttgggagtctgaggcagtgggatcacttgagtcaaggtgttcaagcctagcttgggcaacatagtgaggccccatctctaaaaatgtaaataaaaaaaacctaagggtcattttggatgttttgcttgctcatctagtcagtctctcaaattctgcgggtgcagatgaatatttctaaaagtctatatattactcttcattcccactgccattgacttaggctgagctcccatcacctcttgcctaaacatcagtttatcttcctgcctcctttctgaccccttccaaactctcttctattcatctcctgagtagcaaatctgattattgtcacttggtggctaccatagagtgatcacaataaggttaaaagcattagcttaattacagccctttataaactgtcctcgcccatcgcttccctcccaccactctttgctccatccatattgagctcatcgtttccaaacatatgttatgctcacgtgggtttatgtgcttttgcgtatagtggtccttctggaagatcctttcctttattgttcaccaaggtgaggtctactcagtcctcaaaactcagtccacatttttgccttttgcccaggtcaaatgatctcttttctgcttttccattagaatcctatggccccatcaccctgtgctgtaatctatgatgtaggtgtctagctctctacctgggtggtatttgaaggcaaggatgactcattcaattctatatttccagcaccaagcacataggagatggagtgaatgaacaaatgaatctccacatgcgtgtatgaggattggagtagggagaaaggaaatcacgaagaaaagaagcatagaaaaaccaggtctgcctaaagtttcagacacagccttggggtgaaaacatttgctcaaacagtgggggtgggatggacaataagggcttaaaagaaaacagtgataaaaggaactatagaatctcaaggttttatgggatattaaatgccatcaagtccaaccattcatcagatacttaaacttctgctttctggtcagccagtctatgtttgaacatctctggagatagtaaactccctggcccatctgtgggcagctgtgactgttacaaagttcttctttaaaataagctataatctctatctctttagttttcactctttgattggagttctgccccctggatggataaaaaaataatctagagcaaaaaggcaaagcatgtgagaaatattctgaaatataggcaaaagggcttagcacttagcagctatttggaaattcagagttgaggagaatgaggttctgacacctaagggctagggaaaatattgttggaggtaaaagaagactggaaatcgagaggagatacaggtgtggtgaggaagttgactttttaaaattgattctgtattataactcaacagtagatttcttaggtgttggtgtcttaaaggcctttggaactgatggcaaagcagctgaagagagtggtaatgctagagaatccagtgtgggagtcagcatgaccttagcgaggggagtgtatggaatatcccaggaggagatgtaaagggtgaagagaagagcgcctgtggcagttcctttgaaaatctgcattaatgggatgggggagacctgaggagaatgaaaaagaacaattagagaagtagaaggagaatgaagagagggtggtgtcaaaggcaccaagaatgagattccacaaggagggctgtgcttcagcttctgatgatcaatcagagatgagaatcaattttggatatttagaagtttcagtaatctctgtgacagcagtctccatggagtgatggttctcaaacatgtgtcaggatcatctggagggcttttaaaaacacggatcactgggcgcatccccagtgtgtctgatttggtaggtctgaggtggggctcgataatttgcacttccatcaagatcccaagtgatacctgtgctgatgttactgatcctggaccacatgttgagaaccatcactatagagtggaggataatggaaaccaaattacagccagtggtggaaggatgagggctggatgaatcagaggcaatgagggttcactgctactttgataagtttcatggtagaggaaggagaaagaggggacaggatttaaaacaggagccaagaggaggaaggcagaggagactatgaccttgtgacccatcacatgttctccatgtgtgcagaggagaggctttgagtgaataagagcttgagaaataaactcttctttcttttatttatttttttttttgagatggagtctcactgtgttgcccaggctggagtgcagaggcacgatctcggctcactgcaagctccgcctcccgggttcacgccattctcctgcctcagcctcccgagtagctgggactacaggcgcccaccaccacgcccagctgacttttttttttttttttttgtatttttagtagaggcagggtttcactgtgttacccaggatggtctcgatctcttgacctcgtgatcctcccaccttggcctcccaaagtgctgggattacaggcgtgagccaccacgcccggccgagaaatccttctttctaaagctgaaggaatggcttacaaaacactagtctttgggctggaaacattggtgctacttctagcgcacacatcacaactacagaagaatttaggcattggaaggtactggaagactctgggccaagctaaaggaaaaagaaatcccaacgaaggtagttgattcagaatggcctctcaaaataggcttcattgcataccacatagaattaagtctttgatatcactgggatgtgtgactttctgaagcccagtgtatggtgtacatttaaaatccacgttgtcagaaaatgttgcatctaccttaactcttcatttcacatcagaacagactgatttagatgatggagagtgtctttttctttgtagccagctctgatattctaaattgaaggccacatatacaacttgccatctagtagtacatcaataatgcaacactgacctccaatatcctaaaattcccgtcgtatgaaatcttgatatttaagttagcttggagtttcatttatataagtgatattgaattttattaatccatgaaagcatctctgaaacaaacctattccctaagaataaatgaattaatatctctaaggtttctgagcaggcagagaaataaagcacttcttcataatatctttattttaaaaaatcacttgactctcataaagcatactcatgtagttcagacatggatttttggagttaatgctctttttatccatgtacttggtctattaaatgctgctttctttcttatctttggacaggcttatagccattataaattgcctatccaataaaaaggaggaatttatcatcttttggctgccctttttttttgccttcataaaatattgcaaatatagtctgtggaagatatgattacaaaataacaaatctgattattatgggtggcttgtaggtggagtctcattactactccttccttccaccccccatatgcattctgcctgacttgatcctgggtgaggcttgacagtgtgaatgctggactgtattgcattatacattcaatgcagtcacaacttatcagatgagcatacaggcaaaaggacaaaatggcttgtgtattttcatcctcgttttaaaaaactaatacatgtaaatgttccaaagcctttggagtcttctataaggtatttaggctatgctccaaatagtacccctgtgacctaaaagaataacattagctttctaagatctctaaattctatccaggcagaggcttgtaaatctggagacttggctctaagaaaatgaaaaacaaattcatgcctctgctgtctattatcattccaagagggtgtcatttactgtaatgtagagctgtgtgctactgaaagaaagaaaaggagggaaggaaggaaggaaggaaggaagaaaggaagggagggagggaggaaggaagggaaaagaaaagaaaagagaaaagaaaagaaaagaaagctcatctgtaggttccctctaggcatatcatcgctgataatgtaatctgttagaaacatgatgctattattataatattctttactggggaaaagtaggtgtcttcaaagtaggcctgcttcatttaattcagtctgattaggttatcattagtgtacagtccctcctgggttgttagtggctcaagggaaatgacctttcttctacttcctcaggctatgcccacagcatgcaggttggcattctgtacattgtaggcagtttataaaggtctcctgacaggttagcatgttgggagcaagatcctttgcacatatgtggccttttccttaatcatcatctctcctaagttgggtaagattatctcccctttagagctgagggaactgagggtcaaagagatcaaatagaaccttcccaagaccaaacttgggaagccatcgcagagctggcaagtttgtacccatttgcttatactgtattgtcagctcttcccaggtacccggaatctcacctatcatgaatcagcatgaaggaaacctgagcttaccatcagaacaactttctgtaaaaataactcacattgtagtccagatattaacttgacaagttagggccagaaatgcccaagtgtctgatccattttccctttattgatttgcctgtgtagtgtgtaagagggcttttgctcagtaaatagcaaaaatggaacaaagtgacaacatacccaaccaaaatcaatgctaaatcattaagccaatgttttctcttttctattccctattggtggaggcttcattaagtaaagtctatactaaagtccactcctatactgaagagacaaatggggtgctttctggttagttggtttccagactttaacatatctaagtaaatttcagggttaactatttagggatgtttattaggtgggaacacagacatcaatctactagggagattcacagattttgaacttttattgggaaaagagcaatctatgtagaagttcatcattattgtcaccataattttcttcgtcctagaaactatcactcaatcgagccctttgtgcatccaaggcattgtgtaagcacttgatatccatgatcatgtttaatccttaccattgccttgttctatggattctgttggctcatagaggtttaattacttgcccagcaaggtctataaaactggaatgtgaatcatcagcttccagctgactccaaagtccatcattgtatactaaaggttatctaacattgtatactaaaggttatcattaattcaagtttgaattaatcacataagtgacataatcaagatattatcacccaaatcaccaacaacctgtagtatctaaagaatatctggctgatcatcattttagagatgagagcactaaggttaggtgaggataaagggcttgtcccaggccacactgatgtatgaccacagaatcaagagtccaacttgaatcttatgctttccagcctagtggcttttgcattatgtgcttctgtcttgcatgattgaagggggccctaagtgaagtctgagtgtggcaaagtttggagacaggaatgtgtttgtggaagagcagactaggggagcactcactcattatcctgccacagagagatagactcttgttcccagagccacctaactgggaggtgagaacagcatgtggaatggcagccttaacagtgggagcctggctagctgttgccaggtcttgaggagaggatcagaccgagagtgttttaagaggtgtattcatttcctattgctgtcctaacgcattgcgacgaatttaacagcataagactacacaaatgtattagctcacaattctgtaagtcagaggtccaggaagaggaggctcaactggtttgtctgttcagggtttcccaaggctgcaatcaaggtgttggtcaccctgggcttttatctggagactctggggaaaatctgcttctgggttcatttaggttgctggcacaattcagttcatgtaatcataggactgagatctccatttctttattggctgaaagtcttcctcagcttctagaggctgcctgcattccttgcctcctagctcttttcatcttcaaagccagcaatggtgggtcaagtgcttctcaaactttgaatctctctgattctccttctgccacatccctcctgctagagaaagttctgctttcaaaggtctcatgtggttaacttgagcccatctgagtaattcaggatgctccccctatcttaaggtctgtaaccttccttacatctccaaagtcccttttgccatgtaacataacatattcacaggttctggtgtgtacatctttgtgggggcaactctggtaaccagaggaagacacaaactgctgaccatgtttgagtgtttggtttagtcgtagtgaagtgcacacagcatgcacagccgtgtgtaatggaacctggacaacatgccttgtccacctgcttctgctcaggctcctcagtgaaggccagttcacaccctccagcccccatgcccaaccagtgtctcggggattttatttatttatttatgacacggagtcttactctatctcccaggctgaagtacaatggtgcgatctcggctcactgcaacctctacctcccaggttcaagtgattttcctgcctcaacctcctaagtagctgggattacaggtgcacaccaccatgcctggctaatatttgtatttttagtagagatggggtttcactatgttggccaggctggtctcacgcctgtaatcccagcactttgggaggccaaggcaggcagatcacggggattttatttttaagatgttcttttgaatgtgtttcttccaccacagttttttaaaaagcccagttcctttgctttccatcacttttatgttagtcctgtgtggtccttaagaaattattaataatgcttgctatctgtctggcagcttctccaaagcatttcatactcaccatgttttatgagcccactaaccactctgtaaggtcagtaagatgataatgatgataatgatgattattgttactattacctctattttataaccttggaaaagaaggctctgaagggtaaataacttgtggaaggtcatacagctgaggcgcaagagagccaccccagttacaaatctcagcttccttttaccatgccaagcagcatcctcttgcctccttcttgcttcctctttttcacatatttcaattaattaatcattttaattaccctgttctactctcttttcatcatctccacatttcaattaaattgtggtgccacaggctggctgctgaaagctgccatttcactcctatagagtagttatgcctgattttttttttttacagctttatttgtttttatccatgctgagcactgtacccagctggattcaattcatagtcatcgcacacagagcccagattctgtgggaatgtgaattttacaaagtgtgatctgattagtcctgcagactggagatgtgtgggaggtaaaagctctataataaaaaacctttgggccaatggcctctttcttgaatgagttttaaggcaatcaaatgaaataaagccaagagccatggggaaggccaccatcttagctgaggaagtctaatttatgtgtccatataaggactaaatcattgagcatagactagtgatagatgctggtgaaacacaattaactttgaattaaaaagcaaaaaacagaaatgttaagcggcaagctggttgctcaatatttttatttttggaaaaaagagaaaaacagtaataatagccagcatttcctgtataccagacagttctaaagactttatatatgtattaataagttcatcatcacaactctacgaattgggtatcattatcatgcccattttatagataaggaaactgaggctcagcaaagttaaatcacttgcccaaggttttgctgttaatattaacagagccaggatttgaatctaggcattccagccccatagttcatgttgtcaaccactgtgtcatgctgcttctctaaagcccatcatctcactatattttaagtatatttcttttggggcggagggttctcttggggaggagggtcctagagccactgtgagattcttttcagtttgaccctttgggagttctgaagaaggacagccaccaccaagcagagttgggatcatggtgaggctggaacaatgctgagaataaaggagatagtgaaagagaagtttaccattattttttagtttggaattgattggttatataaataatattatcttcagctgagagtttcactgtgatggttaattttatatgttcaacctggctgggctaaaggatgcccagatagctggtaaaacattattttggggtgcatctgtgataatgtttccagaagagattagcattcaaatcagtagacttagtaaagaagctgatcctccccagtgcaggtgggtgccatccaacccattgagtggaactagaagatggaggaatagtgaatttgctgctgcttgagctgggacatctctcttcttctgcccttagacatcagtgctcctggttctctggccttcagacttggatcaggatttgcacggttagctcataagattctggagagcaagaagtcccgcaatctgcagtttttaagaaggaggcctaggaaacctgatggtgtaagtcccatttccagtgtaaaggcctgagaactaggaaggccaatgtccaagggcaggagaagatggatgttccatctcaagcagacagcaaattcaccctgcctccacttttttgtcctattcaggtcctcaatggattagatggtgcccacctgtgttggtgaggaccaacttctttactaagtctacaaactcaaacactgatctcttcaggaaacaaccccacagacacacctcaaaataatgtttaccagctatctggacatcccttaacttagccaagttgacacagtaaattagccataacattcactgaaaagaatacattgccatgtaaatatattgttttaattaggaaaaaaataaagcatgaccaaattccacgtgttttcagttaataaatttagaaggtattttttccagtagtatagacacttgaggtagtgctatcattttaaagtttggtgtggtttttgcgccttctggtgtttttctgtgaacagtgattgggaactgttcacttggaagccagatgttttcatcagcagaagtcagtggaaccgagggaccagggagatagccagagagaaaactgtagctgaaaaccacttttaggatactgttgttttcattgacttggcttcattagagtgacacatgtgtgtcacgatgccctagcaccatgagaaccatggagcctgcttaaaaagagatcaatgaaagccaaaaatccggctgcctgctgagaggctgctcaggggaggtgggagaggcaggaagcaaatcatggcatggagctctctgcacaactcccaggatgtgctgccagcaccccctcccgaaagttaattacagctagagctcttctctgacctcagatgttttccaaacacaaaatgaattttttagaacctacagaatgtaagttaagatctctgctgcttgcttaagggactgttggaatccttttcagagctttccagccttgttaggactgcttggtcatttattattggcatgtgggtggacatctaactcacagctgctatttcacaaacagtaataatattgaggccacttggtgaaatcaaaacaacactagagttctggctgtcttctttccatctataaaacaaggatatcctgagtgcagtgagagggcctggaatgtgtggtatgatagttgtggctctgcggagaccttcctcctgtgtttcagggcattgctgacatgctgtaccctttggtcttgccttccatgtaccacaggatcgataaacaaataagcaggtttcggagatggttacctaagaagccaatgaggctggacaaggagacactgccagacctggaggagaatgactgctacactgcccctttcagccagcaaaggatccatcagtgagtgttccatgttaaagccccatctcactaaggatgtgcagctgtggtagagcctcaccctgcacgcctttgattcctgggcatgaggaaggaacagcatagtgcccttctcccctaaaagtcttgtgagtgttcatatcccttttatttcagtcaggggaagataactgctgtaaccaacaatccctgcatctcagtggcttaagatgatacaatgcttgctcatgtgtgtgttgggtaaatgatcttctccacagaaaggcagtgacccaggctctgtcattctcattgctctgccaactccctgtgcacggagccccctgcaggctcatctgcatctagccagcagacaggaggagtggcctacaccttttcccattgaaaagagggttttttgttttccggtttttgttttatcttggttcacttctcagttcccctttcttcagcagttcactgggttgccttaggaaaagccacatcacctggcagcccacttgctgagtcatctgtcagattgtctcagaatggttatttgtcacttttgacatggggggaggaaaaacaagttggctaagtcactgagcctgtgaggaactgcaaaaatgaaagagaatttactctgaagcttctgagatgacaagaaatgatggctggatgcagggcagggcaggcaggaggacagaaaagcctgccgtgtgctggagactgtaaacaataggagaaacacagcctctcagtggaggcagagatcaggtcagccccacctcccttgcaacaagatcaggaattccaggccctcttgctccagcagtagtgacagcctccataaaaatgacttacctggagggaagaaaagggtgatggatttaaaaaaaaaaaaaaaaaggttgctgattttgtgagaaagtaaaccaggctgagtgctgtggctcacatctgtaatacctgcactttgggaggcagaggcaggcagatcacgaggtcaagagtttgagaccagcctgaccaacatggtgaaaccccgtctctactaaaaacacaaaaattagctgggcatggtggtgcacacctgtaatcccagctactcaggaggctgaggcaggagaatcacttgaacctgggaggcggaggttgcagtgagccaagattgtgccattgcactccagcctgggtgacagagtgagactctgtctcagaaaaaaaaaaaaaaaagaaagaaaaacaaaaaacgaaggtaagccaaatggcagttttcaagaagttgcagggagtgccaggtggggacatatttcagcaacagaaaaacggttaaagtctgtggagctctgcagggcaaaggggaaaagaaaaatcaaagaatagatgttctgaatcaaaaatgtgtaacagtaagagcagtctaatgcaggggaagcaactctgtacgcctctgaaatagccgagctgatccccacaggtcagattaaagccaacccagctgcagtatgtgaacatttgaaagggtcattgaagcaaacatggaattcacagactggcctcaaaatcttagttcgatcctcaagagaaagtgggaactggaagggacataatgttaattcagagatcagggtgttttcttaagagaaaaagacagaaaaaagctgatacgttcccattcttaatttaaacccctaccatgtctctcttgttcatcttggaagttttttagacaatgagttgtttccctaattcttccggaatgatgtctggtttacaggcaggttttccctgtgcttctacctgtttatgatagagttcctagcacagtgcagaagggtatcaccaattttggatgatggatggatggatacattgataggttgctgggtgggtgggtggatggatggatggatggatggatggatggatggatggatacatggataggtcactggatggatggatagatggatggatggatggatggatggatggatggatggatggatggatacatggataagtcactggatggatgagtggatacatggatacatcaccagatggatggatgggtggatagatggatggatatatggatggatggatggatggatggatggatggatggatggatggatggatagatggatggatagtgtatatggataggtcactgaatggatggttgggtatacacatggataggtcaccagatggatggatggatggatgggtggatggatggatggatggatggatagtgtacctggataggtcactgaatgaatggatgggtatatacatggataggtcaccagatggatggatggatggatggatggatggatggatggatggatggatggacagatggatgaatagatacatggatgggtataggagtggttgtgtaggtgtataaatgaatagaggaataaatgaagtaagtggtatacactctgggattttatttcacttcaaagggaggatatatgagatataggtaaatggaagaaaaaaatgaatgaatatatggatagatggatggataaattagtgaagtatgtgatgtgtgctctggtattttgtttcacttcaaagggttataggtgtatggaagaggagggtttcccacctcctcttttcatgctgtttatattctacagtgttcttgctttagaacaatacttctcagcgtgattcttaaagtcagaagcccttggatacccagtagaatttctagggactagaactgagaatcatatttttggaagtatttaaaaatatataataaatgagggatgattagattagggatatttagccaactctctcacatatttgagaagcccttttgacatgctttggtattaatttgtcaaataattgatttattcaatagtcactaatttagtgttcacttcttgccaggcactgtctgggtacagagggtataaagataaacaatactcagtttggaccctggtgtagtaaagatgcagactattttaaataattgtaaacagtatgatgggtgtgacttaagagggggaatactcaattctccagatttggagggaggttggtaagtgatgaggattgatcacaagagaatgcttgatatgggtcttgaaggataagacttgcccaagtggataaggggcgaaaggcatcccaagaggagacagtaacgtgtgtataaatgaacgaaggcgtgaaataggatggagtgttttgaggaaccacaagtagccttctctgagtaagagcataggtttgtgaggaggacctagtgttgtttgaaaaaagagagtgatcaatggaagatgagatatcaagacaggagaaccaaggaagaaaaagcagaggacagctggaatgaatcaaaccgaagaaccagacctcagtgggaccaagagaatagaggcaattttatcgtgtaaataagaggtgaaaaattaaataagtgtcttgaatattatgagtggtgaggatttatttctctttgaaaattgccatgtcacatagatagcatccctcgggtgtataaaagtatgacttgaagaatgctggctgtcaaattggaaacaattgttgggtacaatcagaaaagaattccctaaggatgttttgagagtgacattaatggatttaaattaatcagaagtagctggttaataagctctgggaattatagcatgatattcctggctttccaaatatagtccaaaatcccatgtgacttcttagttttccagaatgtttcatattgtgtttttcttggaatacaagctaataatagaaatgtaagtgtgttcgttagggggtgaggtgggaggagggcatgaaaatagtaaaaaaaaaaaaaaaaaaaaagagaaaaacattgaaagtttaataagtgtttcatcagagacatttcccactgaaaaacctttcgagattttccaacctccacccccaattctggttgagatgtactcatctatgttttagtaatatttttcttttccttaaccaatattaccacccattttaattactttctccaagtctagagactccttgaaagactatgcctttctcactcatttttgaatcccatagtaagtgcttaataatgattttttaaatgaaaaaataaatgaatagatagaaacaaaagtaggagaatcatgtaagtaaagaataaagctgatgtgaagtcagctgactgcacactcatctcaaaccaaatccaagataccttcttttcaaatgtagactacctccattgttccctgtctcagtaaacagcactaatatttgtccagttgctgaaactggagtctggaagctattctagacacctctctcatctctgcttcttacaagttatacatctccacggattgatgattttacatcctaaatatctctatacttcagactttgtcactgtatttcacttgaaattcagaaataatataacaggtctccctggttttactcttgtcaccaccaatccattctctcaggtgcatactgcatggtgtcttcaaaatgtgcatctaatcatgtcacttcattctctttaaaaactttagacaccaaaattattactatgacttacaagctcttaaatgcctacctgcactgccatcccctctccagcctcatctgcctttcttgcctcccactcttcatttgttgtgatccagacacatgcagcctctcctctctcagctctttggatatactctgccccaggacatttgcatatgttgtttcctctcctggaattctcttccgattctttccttcttcatgtagtatgctgttattcatcctccagaactcagctccaaagactcctgctatggaagcctcccctgaccctctccttccccactaatccttccaaagattgggtctctgttctatactgttgtagttaatgtttcctagataacatttttttaacaattgaaatgctataattatttgagtagcatatgattaatgcctgtctctctaggtaaatggtatactctgtggagccataggccatatctgtttttgcccatgattgtatctccaatacctaacacaatacctagcataaaattggcacacaatgctggtcttctaaatgaaggagtgaggattgaagtcagaaagacagcacagaataatctaattgtaaacctttattctttaactgcactgtacaaaaatattaaagttgagaatctattaaaaaacaaatacctgccagccacagtgtctcacccctgtaatcccagcactttgggaggctgaggtgggaggatcacttgagctcaggaattcaagaccagcctaggcaacagagtgacacccatctttacaaaaatttaaaactagcagggcgtggtggtgcatgcctgtagtcccagctacttgggaggttgagctgggaggatcatttgagcccaggaggttgaggctgcagtgagttatgattgtgccaccatactccagcctgggcaacagaatgagaccctatctctcaaagcaaacaaacaagcaaacaaacagcctagcattccatttgaaaatatatctgtatttaaggaggaagaaagcaaacctgtgggtgtacaagtcaacatacaaatgctacttggtcactttatatgagcttaccaaggtgggcctacaggtagaaaaattcttattgtatgccagacactatttaagaactttaatacaatagtttgagggctgaggtattattattatcaccaatttacggatgaggaaagtgaggaacaaaatggtcaaagaacctgctataggtcgtacacctaggcgaggctacctgtctaaacaactcccaaatatcagcagtagaacagcatagaagtttacttgttcacagcactatctagtgtgggtcactctgggggaaggaggcatatgtctctgattcatgtagtcattcaggtacctaggctactgttatcttgttattctgccatcccctaaatcccttacagacaaggaaaaagagagatgagtgattttttaggaaatttttatgggccaggcctaagagtggtatatagcactttcacacacatttcgtagtctagagcttagtcatgtagtaatgctgggataactagtctacctgtgtgcccagaagaaaaaaagaagcagatttgccgaataaataatcgcagtctgtctgagtgatagagcaggaattcaggttcgaacaggaaggctctaggtctcacccttataagcattacgctctattgtgagatttctcagcctcagcactaatggcactggggctgaataactccttgttgtagggaagagtcctgtgcagtgtaggatagtaagcagcatctttagccactagatgctagtagcattccccaaccctttagttgtaagagaatcaaaaatgtttccagacactgccaaatttcccctggtggtagtggtgggatgggtacaaaatcacatccctttcctccagccttgaaaaccatggttctactgtctttcatcacatgacaccctttaggcagggccacccattctctgtgataaattaaactctatttgaatctaatgactatgacagccaagtccatttaagaattaatttatctctcttcacctctgtgcctgtgaatgttgccctgcttaagtatcattgcccttcattcttaaaatggcattagcgatgacacccttgaggcaattactttctaaggtcaatacccataataaaggttttctgctggtagacagaaaaaaggaaatatgcaagaagagtcgtgttactttttataatagatatacaggacattctttcaggaaatagatcaattctgattgtctttcagaaaaatgtgctagatatagacagaaaaatgttctcccctgcattttctgtgtttttattattaccattattttatttttgtaaacacccataaaaattgaggttaaattaaataccagttcttaagagaagaatatgaaatttatgctatgctacgtgcacatatgtttaaatatatattcactcatccacgtattccataccagttgttgctctgggtgcttggagatcaacagtaaacagaaaggcaaaaattcctgccctcctggagcttacattgtagctgggtgtaactggtaataaattataaaccagcagttgtcagtgaggggtaatttgacaacgtctagaaaaatttttggttgtcacaagttaggagtggagattgcgactagtgtctaacgtgtagaggccagggatgctgctgaacatcctgtaatgcacccaacagctccccacaacaaaaaattatccagcctcaaaagtcactattagtgtgctgaggtaaacattttttgaagtcaatttaaaagcaagtgaaaaggggataaatgctatgggaacagagaaaaagagggtggggtgaggggaatggggaggactgcatgggggtgggggtgcaggttgtatttccaaaagacagtgtttcagttcttcaaggcaggcctcctacagaaggtgtgattggaaaaaatcttgcaggaggtgagaagggcagagagagttccaagaggggaacagaaaacaaaaccaaggccctaatctgggagaagctctgattgtgtttggggaagagaacaaagaccttgtggctggagcagaaataccaaggagaacaacaatagtgatgagttagaggcgtgggagggagcctgatcctgtaaggcctgtgggcttttacagaggaatgacgtggtctgacttaacttttgacagtgtcattctgactgctctggcaactgcagtcatccgtgtgaagcatgatgtatttatattttttcaagtttctatcttttcaaaatcaataatgaaaatacatgccacatataactcagcattgacccatttctttgcaaagcttttgtgttgtacacaaaatgttttaactcatgtactgtgcatgtatgaaacagatattattgaaagaccccttgaaataaagtctgcctttaaaaggcacagattttatgtgaaataaaatcacatggctttagactcctactttcatctcctactagaccgtgagctacctgaggacaggagctatgtgcctgggagcaaggggcacccagggaatgtttgtgagaccaaagagaacaggaaaggagcaaggcagaattggcattgttaccgctgggggacagagccagggctctggagccagcttctctgatcttgatgcagcatctaaaaactgtagaatatttagaagagaagtgaaaaatgcggtcaaccacaatggtcaattgtggtttccatgtccaacttgaactttcccttgacttgattcagttttggctttagttctgctaactgataatctatcttctctatcaaacattttacggccattaaattctgttatcaggattcacatctgatactaagatatttaattcatgcatcacactttttaattatgtgtgatgtgtagtatacaaaatgggcattataaaaagaccacctgacacaaaatttgctttcacgcctttttctgcttctatgctgtgagctagggcataagaaaaaagtctagagaataacaaaatgacatagttctttgtgcctaagaaaaagcgctaacaatggaaatgttggtgctggggtcatggagggtttgtaagaatgggaaaatgttggctgggtgcagtggctcatgcctgtaatcccagcactttgggagaccgtagcaggtggatcacctgaggtcaggagtttgagaccagcctgccaacatggtgaaaccctgtctctactaaaaatacaaaaaattagctgggcgtggtgatggatgcctgtaatcccagctactcgggaagctgaggcaggagaatcacttgaacctgggaggcggaggttgcagtgagccgagattgtgccactgcactccagcctgggcaacaagagtgaaactccgtctcaaaaggcagtggggcagggagaagaatgggaaattgttgctggagggacagtgagtgggagattctctgagattctctgtaacatccctttgattgtcttcttatcttttgactgttctcagcagaaaaggcagcaagttaaagccagtagtgatcagccaatcaaacagtggtagcaccaatggcaacaataaaaatgatagcaaccactgtttactaaacaactccttcattccagggttacaccataggtatattacaagtctgtgagggtaagggtagaataatgatggtcagagaggctgagtgacttgctcatggttgctctggtcactgttagatgagtgaacagaaagaagtgtcttttcagctgggtgtggtggctcacgcctgtaatcccagcactttgggaggccgaggcaggcggatcacgaggtcagcagtttgagaccagcctggccaacatggtgaaaccctgcctctactaaaaatacaaaaattagctaggcgtggttgcgcgtgcctttaatcccagctactctggaggctgaggtaggagaatagcttgaaccctggaggcggaggttgcagtgagccgagatcccaccactgcaccccagcctgggacagagcgagactctgtctcaaaaaaaaaaaaaaaaaaaagtgtcttttctccacagtgctgccacctcctgtaggtgccacataaatggagcctaaatacaatttttcaactgccttaccctagggataagcctgtgcatgtgaagacatctgatttcctttggaatttattgttaaagcattcgagatgcattaaacagacatgaaataaaatggtaaaaatataaatgaatattctgaaccaaggagaatataagttaaagtaggcattcaagttcagggaaaaagtaggctcagatttgcaggcctcagtggcctatgtatctgtaatggttgacgaataaactagaaaattggcctttacaccaaaggggccaagcggaagggagaaacgtagtaactcatgtgattctgattgtcagagacgaagaaaaccaataccataggtaatgggttgctttttgactctgaaataaaattcttgcacagggtcattggagtggacagtgaaatagtgatatggtggacagtatccctggtaacctctttatcacaggtgccttgcaggacttttctgaaggctgtttctggtagtcccatcagcatggttctgaagacttaactgctcatggccataactttctgtgagagtttaggcaaggtatccagcaaaatactgcagtatacctgtgatggttaatactgactgtaaacttgattggattgaaggatgcaaagtgttgatcctgggtgtgtctgtgaggccaaaatagattaacatttgagtcagtgggctggggaaggcagacccacccttaatctgggtgggcaccaccaaatcagctgacagtgaacataaagcaggcagaaaaaacgtgaagaggcgagactggcctagtctcctagcctacatctccctcccgtgctggatgcttcctgcccttgaacgtgagactccaagttcttaagtcttgggactcagactggctctccttgctcctcggcttgcaggcagcctattgtgggaccttgtgatcatgtgagttaatacttaataaactcccctttatctatctatctatctatctatctatctatctatccatcctattagttctgtccctctagagaaccctgactaatacaacacccaaactaatctagttgtctttgttgtttgaactgtattctttaaaaactaaatttgaaaactgatcaaaaagcaaataacatcacattctagttgaaaatggttccatgtttgagaaacaatagaagctaaccagtgggtacacatctctatacgtcaatgcataaagcccttcgtcattttatatcttatcacaagagctaggcctacaggctgcccatcagccatgattgtatggccacctaaacatctgaccccacagaaagctctctcacactagccagctatggaaactcaggttgtcaatattagagtcagtcattccaggaggcccctctcaaaactcaatttcagaaaaggtcatttcaatagaaccatatgaaatttattataggaatatgatagctaacattcatatagtgcttagtgggttccaagtacttcacggttataaactcatttagtcctgtgagtaaggtatcgtcattatccccatttttacagaggaggaacctggggcacagaagggttaagtaacttatccaatgtcaaacagttggtaagaggtagggcctggatttcaaggccaagcattctggccccagtcttatctttttaacattgcatgttagttttctatggctgctataacaaattatcactgacttaactgtttaaaacaacaaaatttatcatcttacaattctgaaggctagggtgcaacatgggtgacactgagctaattaaggtatgtcaaggctgcactcctttctggaggagaatctatttctttgccttttctaatttctggaagctactacattccttagcccatggcttcttcctttatctttaaagccagcaacggtagttgagtccttctcacatcacatcactctgactttgcttctgtcttcacatctttttcttctctgactcttttgctttcctcttccatttttagggacccttgtgattatattgtacctatctaaataatccaggtaatctccctgtcttaaggtcagctgattagcaactttaattccatctgcatcattaattcctctttgccatattgcttaacattctgaggatgaggatgtggatatctttggagggccataatattgcctatcacagctgtacaaatttgccaatccaaaaagtgccaagggttgggacagaggacaggaaagttttgatgggaaaaaagaaggaaagaaaagagagagggagagaggaaggtggcaataggatttggggacattaaatgaaatgacatatgtaaaagacttagggcctggcgcgatggctcacacctgtaaccccagcaatttgggaggccaatgcaggcagattgcttgcagccaggagtttgagaccagcctggccaacattgtgaaaccccctctctactaaaaaaaaaaaaaaactttagccaggcatggtggtgcaagactgtagtcccagctactcaggaggatgaggcaggagaatcacttggaccagggaggcagaagttgcagtgagccgagatcatgccactgcactccagtctgggcaacagagcgagactccatcttaaaaaaaaaaaaaaaaaggcttagtccagtacctggcagatagaaagcactcaacaaatcaacaaatgatagttatcattatcattattaccacaaaccagcagtatactgagaatcctttggagaatctgcaaagttgcagttggtgtgtaatgggaaagtttgaggtgacagagactgattttgcaaaggctcataactgacctgaactggaattgctttgcttttaagccaaatgttactcagtgttccagatactttgccatttaacattttatgtgtcagtaacatatgactacttgcttttaaactctcagcatagatatcggaagatagtgattcttctaacctgtgccttttactgtatttttgtttcaaagaactgaagagttttttttattgttttcatcgatctgaaatctttagagaatccttcaggcagaggtaccaagattgatttacgtaggattaaggttcttttagtgcctcaatgacttaaagcagtctctgaacacttattttattgcagttacttattcggcattaggatcctcaatattcaggttgtttgtattgatccttagagtcaggggaaacatatctatgttctggaaagtcttaaactgaaatgaaaatgaaaaaagccacgcatcttgagatttgtgcttctcaagatcatacagctccttttaagtaggacataatttaatgactttaaagggacaaagaggtcacctaatcaggtgggaaaagcatacctctgggtatctggaggcccagtagttagttgggtctgttatcttaatatttgtgagaacatctgtgaataagtcacttggaaatattttattacatttatctatctgtaaatacatagtttgtttttctgcttatcagttcattcatttaacaaacactttcaatgcctattatgtgccacatattgtactataatagaaaaatatatacaatatgttgatgtatatttatgtgtgcatgtatatttatgtgtgcatgtatatttttatttaaaattttaacttcagtatgttaagttcgatagtcaagaggctattttcctcatcagaatggtaaaaggcaatttaaaacacctataggaaagggaaagagttgtcaaatttacgtacagtaaaataaggaggggttaacctaagaggaaggaagggaactaggatcccatctgttgctatagtatacgtatgtagtcacactgtgcattaagtcttaggaaacaacagtggtgagaggagacaaggaagagcagaggtgaggaaaacctagtgcttcacaggcaggtagacactctggtgccccattggtcagtattctgtgccaggctgtgcactgcacgccctccacattatcttttttgacccttgcaaaaaccctgaaacataattttacagaaggaggcgcagaaactcagaaacattaaatactttaagccagggttacccagtaacaaatagacttggagttagaacccaaatctgtctcattgcaaacccatgctccttccataatacaacctgacatatattgactgcccactagacaccgggctacctgggaggctactggtattgttatttccgtttagagaaatggaacacggaggagtaagtcacctacctgagttgcacagttggtcaaagtaggaaaacaccctgagcagctgggggagggtcatttctgggcctgcttctgactcacatccaggagtggcactggggagaaggagttgttaaacctgtaaactgtgaagatggtagtttattcaaataaccactaattcaagaccacgtcttagaaatgtctttgtctgtggggaaaaacctgattcttctcacttcccactttcctcacccctgatacaacacccacaccatcagtttggtgtttcccattctagatgagtgatttcaccactgtgtgttgaccaaccttgacgctcccatcttcctcgctgcccaccatcaccaccaaatcctttcggcccttctcctcctttctaaccccactgccattgccttagtggaagcagccacttagatgaacaattacgacagtctcttcacctctgtctttcctcactcccaaatctgtctatcccactcatgtcacaggacatttgcaaggctgctggcactggttcctacagtacctgtgcacagttagaagaaggacatccttcctctaggaatattcgtagcgcatggattggcaagcagagtatggacagggtcaacccttcatcatgcccttggctgtgcacctgcaggagtgaataatgcacagtagtgccacgtgtagtaacattgcttccttgcttaacagcttttaatgattccccagggcctttgggataaagcttaaatttcttcacatggcatacaaaactgcctttttagcttcttcccttctccccccagccttttgggctggtgctcctgcagcatgggaatggaagtgaccctaaatattccatgactatttttcctcttcccaaggtgtgctctctttcctctcactctttggtaatatcctgttcttccctcagtaacgagttcaggtgtcatcttctttatgaaacatcttatgtctcatgtctcatgcagacagcattagacttctgggcccattagcctctgtaaatgctttaattatggcactgactattatatcacagttacttgttttcatgactgtgttctacacaaagcccaattcagcagccaaaagtaattagaagggagctccagactaagtttctcaaaggacataaagggaaaccatatcctcagcatccatttattatcatcctttcctctccttccttagtcaaaggtcatcctcctactgttgacaaaagcattcctcctctgccctagcctatacggtttttctttcctcttcctatgttgctctcctccccacaaacctcagccctctctcctattgctttcttatatggattgccacagcttctccatcaggaaaaaagaaaacactcatcttcttcaggcgaagccataaattacaggattatcattgttaggttagagactgtgtcagccaggttctgctgggttctgatacaacaaaccctcaaatctcagtggcctgcacaaaggtttatttatagctcacataacatgttagcaacgggtcaactgaggctttgcctcacatgattcctttatcatgggatctggactgaagaagcagtctgtaagacatgcattctcatagcagagggaaaaagtaatggcacaaccacacattgacttttgaaatttctgctcagatgtggcatatatcacatatcctcacactctgtgtgccaaaacaagccttatgaccaagcatagtatcaatgtggtagggaattatatgctttctccaggcagggagaatgtcagtaacatggtaatgagtagagatatattttcaaagcagcaaattgggactaataagacagtatgctcaggaatacctcgtattaatattgttttgttttgtcacattcgcatggcacatcagtctgtgagcttacggggctcagatgatgtctcatacttttttttatgatttacacgtaattgcacatatttatataggaggaataagttctggtgatctattgtatagtaggatgactagaattaacaatcatgtattgtatatttcaaaatatctagaagagaagtttttgaatattctcattagaaggaaatggtaaatgttttgttctgaacacctagcatatttttagaaaaggaattttccatgcaagttaacaaagacctgggcagaagagagatctctgtagggtagaaatcacacttgaaactggaatatttgaaaattccaaatcaaaaatctatctttatacttgggtgatattcctatcagattaccaagcaggataggtagatggctgcttctgtggtgtgtagtttctcagagaaggaggtctcctctccaaagaatgtttctttctctagatccctatactacttaggttccattcaggaaaactgaaacctggcagttatttttttaaaaaaaggatactgtgggggaagtgaagaactatagtgtcgcaaaggaaacactgaagtcaagcagatgataactgcaggaagtgaagcagctactgcctctagagttgggggagcaaaatgaagaggttggggttatcggaaccaagatgctcagagaggccctgtggagctgagcctcggactcctggggaggagattctgcccttgtggtgctgggccctcaaggatatggggcaacggagtgagcctagtttggggagtgttgcttttcagctggaaactggaaccagctgccattgtgaggtcagaggatcattgctgacaggaacaggcaggcaaacaagaaggaccaaggtcctttcacctgttctcccttccagtctccctctcatgccctgtactgacagagcatatcagagagacagacagcaatgcagaaatgtagtttgcagagtctctattctggcattgtattatagaaaagagtaaggaaggggaaatcagagataacttaatagacagcacactccctaatacctggaattttacaatttgaactttaatcctttggctaaagtcatcctcaattaaaataaaaatgtcccttggaaagatgaaaattttaatgtccttctttattgacaccccattatgaatagtttattgaaaataagaagaggaagcaagagatacagatgaggtattttggccgtagcaggggcagatagagaatgccacaaagatggtggagggccaaaaaagagcaatgaaaacagggggatcatggaagataaattttaccaacttccagattttgcagatgcttggcagagtttctaggactttgctgctcccagcaatataaatgaacagcagggacagagatggatctgtccatttggtcaacattcagaacaactcagctcatataaaaatgagacccatgactaagatcagactaagatggagggagccatggttgagtcactgaataataaacttatgcagggacaattgcctaagtaattcaagcaaaaccttactattgactgaattacagtagtgccctaattagtggaacgctgagagcttagcttattctaaattggatttttctggtctgaggattaattaggaaatatttccagacttgttttatagattaaaaaaaatgatttcctctttattctggctcacttttgaatagcaaataaaactaatctctaataaatttgaatattgcattgttttcatttttgagtgtctatctcagttgagtctgcatcaagtaccagttctgtggcaagaactgtgtagagctggacaaagatgaatgaatcattttctgaccttaaggattaatggttgagctcactcaagctctggttggaaacacagggcctgggtgcccaatcccagctctgtaacttgtaaggtatgtgattctgagcttcaacctcttcatctgtaaattggaaataataaaaaatagccatataatattgtgaaaattaacaacacagtatatcagtgcttatggtatatgttcgataaaggtattttatttttgttgataattttgatggaaccttatatataaatagataattttagtatatgtgaattctataaatgctgattttcatgatccagtcttaaaggtagatagtttaagattggtgggaagttttcccaattctaggatattacttttttctcttacttttttcttctcttttctatagcatcctttctcctttcttttcccctatcatttcctcttcctgcctcctcctcttcttccagaattatccagattgctatccacctctccatttctcttggttgtgtatacctagccaatatcaaaggtactgtttggcctactgtgccttaccaataggttttcaacctctggctcaattaatgcatatccttttgttagataactgactctttaaaatatttattgatgcaaccaataaataaaaagaaaaaggctattccccagcctttttctactgtgatactttacttatgcaacatgctccctcatgttttcctgttcctgcagaaagcacgttagaatacctgggagtaaaatgatcctattataaaggtaccttaaatccattctgatttatttttttaatcattcccaagttttggcattctaatcatcattactgtcaaatacacacctcaccattttgtcttattaggatgttgtgacacatgggtgaataagaccccaaaatttgactattgcttctttcttaagacctgtcctattggacatgcacccttagtcctagtaatgctcttcctaaagtaggtacttcctcaaaacacttgcacatgtgcattttgcagaacgttcattagagcattgtttataataataaaactttataaatagcctaagtatccactagcaagacaatgagccagtaaactgtactgtcccatacagtagacttctgagcagcagggaacatgatggactagagctccttgtatgaacatcatgaacctcaatgctgagcaagcaaagcaacttgcaggagagtaattatagcatgataccatttctataaagttctaaaatatgcaatactgtatttttaggaatacctgcatgttgtggattataaaacattcctgatagtggttacctctaggggaggagaatacaattaaaaaggaggacacagagaaacttcaattatatttgcaaacttttgattcttaagtttgttagtgggtatataggtgtttgatgtcgttcaccagtgcatttttgtatgtttaaacatattttattaaaagaaaaagatgttcacaagatcttatttcaaaatagcaggaacttatacactgggggcctgtttgaaccatgagagtcagtaatcttataaaaagtgacaaatagtgggccaggcaccatggttcatgactgtaatcccagcactttaggaggccgaggtgggtgtatcacttgaggtcaagagttcgagagcagcctggccaacgtggcgaaaccctgtctctactaaaaatacaaaaattagctgggtgtgatggcatgcgcctgtaggcctagctacttgggagactgaagcagaattgcttaaatccgagaggcagaggttgcagtgagcggagattgcaccacggccctccagcctgggggagagagtaagactccatctcaaaaacatttaaatgaaaatttttaagtgacaaatagatgataataaaaatcatgaaactaccatttatgagcatcatgtgtatgtaaccacactgcatgcagtatctcttaatcctcaaacatcctctgaagtgggtgttatggttgtccccatttgaaagataagaattctaaggcttagagatgttacttttctaaattcaaacagttagtgcttggcagaaccaagattctaacccaggtttgttttttctttaaccaacaaagtagatattattgtattccttcaagatgttgtcattccaaccaataagatataacctagctatattatttgggggggaaaagagtgacccagaactcagagttttgtttttgtttcatttggagataaggtcttgctctgtcacacgggctggagcacagctgcgtgatcatagcttactgcagccttgaaatcctgggctcaagcagtcctcccatctcagcctcccaggtagctaggactacaagtgtgtgccagcacactcagcttgagtttctaaaaaaaaatattgcgagctgcccacatgtttacaatatcttgggctcacaaaaggtaaattctatctatgaggcgacttccctcaaaagtctaccttcaagctggaacatcagtatttgtcagtctaatctagtgcataaaatactgagccctaaaagcaataagaatcattgtgaagattctgactttatttcaatgtggatgttttatttttgaaaataattcaattttttaaaatgttagttatctttgacaaatatgttattccaaagggttccttccttccttcctttcctaccaccttataaattaaattaaaattagacatgtatacattttaaatagccctacaaggtttgttttgaaaaacagcaatcccatgcttcaaccctttatatttgcccctcccaagaagcagcccctttcaactcttttacctgtttattttggcaattaatgcctcatatctaaataaactattttattattactttgctgtttttcagttatagcagaatctattacttcccccatagagaataagaatttgctgtttgtttcttccctacaattcttactacagtagatacctattcttatcctttcaacgtagttatattacaatttaattacattatcataatgtagatcactatttacataatgactatacaaatgctacccagagctaggtcatatagtacaatatgaatcattttccttttttgcgctatttttgcttgaactggagtaactcattctcttgatttttaattttcaaaattttctatgtacctattactaattccatcttacattctgccagttatttggcagagtttacctaaattgtctaaatttcaagatgttcagatgcatcatacgtaatcaatttcatcttcctgagaaaattactctggagccttctgacaagttccaatctgaactcttgccttccgctcctgttataaattatcatcttggtatcttcctttaccaaggatatcctaggattctctttgtctttcacttttgtggcatcttctgtttcctgtgtatcatttcttacactttttttattgtaccctcattttgcattctctagtgacttcctaataagattacgtggatgatattatttttgcgatcatgcatactgttatgggtcaaattgtgaccttctgaaattcacatgttaatatcctaacccccaatatctcagaatgtggccttaggtggtgatagggtctttaaacaggtaattatgttaaaatgaagttattaggatgggccctaatccattatgactggtgctgttatataagagaaaattaaaacacagacatacacacagagaagatcatgtgaagacatatagagaaaacagctatctacaagtcaaggagagaaaatttagaagaaaaaactctgctgacagcttgatcttggactttcagcctccagaactgtgagaaaacaaatttctgttttttgagccactcagggtatggtactttgttatgacagcccaagcaatgaagtatatgttcattatactgcactcattatgatagttgggctaggtatagaattctgtataaaaccaaaatctgtttttctcacaatttttaagttcttgatcttttaacttctaaaattaatattcaatattcctgctgagaacttcaaaaacattccaattcctaattctctgtgcgtaacctttctcctctatggaaccttatataattgtctctttggcctcagtgttctataatatcataggaatgtatcttgatgtggttctatgtttacttatattactggatgctcagtgaaccctttcaacctgtatagtcttgtctttcggttcagaaaaattttcttgaataattcttgaatgttttagctgatttattccttttttgtctttctggaattcctatttttcagttattggacttcctgggctgatcctctaatgtccttatcttcctctttttttgataatctatatatttttgctctgggagaattcttcaagttattttctggaccttcaccccacttctttaggtcactgtgtgccccagttctaagattttctgggatttcgtagtataaatattattgttcttgggttttccccagaactggtttagcattcagttttttctggttttctaagtctattattacatagatctgtctgcttggcacattccaacattttgatgctgttgttttgtgctatctttgttctatgagtgttcttactgttatttaaacatacacacccactatgcatgttactatcattttcatgggattttgagagagacagaaaaattgtatgcaaatgtttaattttccatctttacttggaagctcaagagcaaatgtttcttaatttgtatttaacacttagataacgaagatgatatcatgaagtacaattagaaatggccatttgaataaggaaaatgactcacagtcctttacatttcagtaacctgtcatcctgatctaaaaaaagaaactttaaaatctttaccaaatagtcagaactttcaatgttatatatttggcctgacaatcttctcatctttttgctcataaaatgtctactcaagattagaagttagatattgtgctgcagttgcctaaggcccagaaaacgctcaaaataggccttgtcacataaaaaattaattggttgctttgttcctacttagattttcattaatttgaggacataatataagtgacagttaactgtatcacctttgcttctccttgttaaaaaagaaatacctatttaaaagtctaattaagaaagtttcctgaaatatttatttttaaggcattaaccttcccttattatattatggaataacacaactttaaacatcagaaaagactggtatgttggttatctattgctacataacaatctactacaaaatttactgacttaaacattttatttgcttattattcttttgttttagcaatttgtgctagattcagctgggaagttcttccactgctttcacctggagtcaacatgtggctgcagttgtccctttgctcaatgagctggacagtccaaaatggtctctgtcattcacatagctgggggatgctgccagctcttggctgcatttctgtctccacatggctcatcttcaaagaggctcgtttgggcttctttaccctggcagccttggggcagcattccaagtgggcaagaatggaagctgcagaacctatgccaaaaaatcatggaaattacttctgctgtatactgtagattaaagccattcacaaatccagctcagtctacctcttgatagaaggagcaagaaattcacatcccaaaggagtgtatatacagacataggaggaatcatggccttttttctttttttttttttttttgcaatctaccacagactgctgtctggctgaaacttattcacattttttccatatagaaaatattctcattcccattccaggatctccatgggtctcatcccaatattgcatcaggttcacagtcttagatctcatgctctgcatcaggtgagttgaggatgaaaacccttggctacaactcctcaggtgtacactctttgtgagccagagacctgtgaatgaaaaagacaagttacctgctccctacaattccaacacatggtgatggaacagaggcagaataattacaataggtactgccattcaacatggggaacaacaagaagactgtagcagtcacttgttcacattaatctgaaacccagctggtcacatgcttcaggctccttcactccagggtcaaaaaacctaccttgattagttatctgtttctgtttcctactttgccacatgccttaaatttttagattcacagaggtcaataatgtgactataattctaaaataattgtacaaaaccatctgtaggtagttaagtgcttcttgacaaagttaccccttcctcctgaagtttttaaccatgcagattttcatacctttgagaatacttgtttgtttgacccacctcagaaatttcataatatatgtaaaaaaaaaatggaaaaaccatcttccttgcctttacttccccaaaagtagtaccacatacaaagcatcattataaaatgatactgattttgagaatcttcaaattacaaaaaaagttaaaatttatctataatataacctgacagtttctggaacacccagtggttctctatgggaatcacatgatttacttatttacttggggcctagagtagagcatgagacagaccaagccctgccctcacagagcttgcagtctgtagggggagaggggcagacaacaaaaatgtagacacatccccacctcatcccagctctatttttaaaaattttagggagtaaaacataagagaataaaacagggtaatggaggagagagaatgagtgacagagtgagagagagagattattggggcaggagagtgactatcttagctaggatgatgaagaggtgacatttaatttgagaacaaaatgttgggaagaaacaagttgtgcaagaatctaagaaaagcatgatcaaaagccctgggcagtaacagtctgggtttgtttgttcagggtcagaaaacaaattcaatgttgcttgtttacaatgagcaaagggaagaaaggagataaggtcattggtatgggcaggaaccatgaaggactgtgtggaaaggtgaagtcattgaagagttttaactggaaaagcataagatcttattcattttttttaaaaaatcattgtggttgctgtgtagaggatggacaaaagagacagtgaaattagatagtacagttaggaagctattgtagtagtcctagaaacaactttgcagtaggagggtgagaaagggtcagattcaggataatatttgggaagaggagcccagagaccttgatggattggatgttgggcataagagagagggtcaaggatgcatctcaagtttgtgacttgtgaaattgggtgcacttcagttccttttttttccacttttattttaggttcaagggtacatctggagaaaagggaactctcatacactgctggtgggaatgtaaattagttcagccattgtataaaacagtttggtgatttctccaagcatttaaaacataactaccatttgacccagcagtgcccttttttaagatggaaaagcctaggggaagaacaggtttttcctttataagggtccagatcaaaagttctgttttggaaatatttggtttgagttttttcttagacatcaagcgagatgtcaaacaggcagttgaatgtgggagttcagtcatttaccagcaagccttgatgacttgcctcatcaatactttatagtctcactttgtgactatctaaccctatccttgggcaactaagacatggggaccctcatttcctgacaagtagagactcaatgaattacccaaggacacacaactaaagtggaagagcagggcttgaaccaggtcttctggcaacctacacatagtcctgtagggcactgctaacccctcctctactctcctgcttattgtaatcaaggggagatgcagggttttaagataccattctggaggcagtgggtgtgccacatcctcaaagtgtcacccatgacttaggcaattgtttatccatgctgttcatatagtatccaccagccacatgtagctacttaaatttaatttttaatcaattaaaattaaactaagttaaaattcactttcttagttttactagtcacagttcaagtgctcaatagttacatgagtaccatattggatagcacagataaagaacattttcatgatctcagaaatttctattaaacagtgctggagtctagattaatctaatgttcccttcagttatattaatttgtgaagaaagtgtagtcttatcctaaaagctgtgatctaagaggaaagtttaggaaaaaaagaaagttacctgctttaaaattagcatattttataataagctgattttagatccagcattaatgagcacctttccccagctcacacccttgaatatttgtgtgtttctcatgttatctatgaaggtgtaggttcctctgaggagagaaactaggtttttttcacctttgcattcccctctcaaaatatataaatatacaacgcccatgcccatatatacacaccctcaatacatattgctttgcacagaacaaacataatatttacttgttaaatgacccagcatatcacagcattttacaacactactgtggacagttggccacaggaagaacctatcaatcagagcaaataaactccaggaggtctgtaactaaaacccgattgcgcagcgtatttatttctcatttctcccttcctagcaaaaggaatattgggacctcaatcttccaccaccccgggtgaaaacgaggttgctcactaccctagaaagcataaaggtcgagcctagaggagagtcagtgggaagttcaggccctggtctgcccattacttcatgagcaggccagcaaggtcttcctcatggggtgtgatggagatatgcagaaagcccttcacacacatgcacacaggcagacctgggcccctcacagttcccttcacaaacgcaggagaaaatttggagcaaaacagatgttttctgaattcctccttgccacttgctgtttgtgtgactttgggcaaattacattagcccgtcaaagtagcaggataaggagatgtgtggatataggccttgatcacagagttgatgctacacccattcagcagtttattcccctcttcaccgaatttcagggggaatgtgagagcaaacctagaacagaaatgtgctttccttttaagttttctttttaaaaatattttcaaatgttttttaagaggcagaatctcactctatcacccagactggagtgttgtgttcatagctcactataccctctaactcctgggcctaagggattgccctgcctcagcctcctgagtagctgggactataggttcacaccaccacacccagctaatttttttttttgtagagatggggtctcactatgttgccctggtcttgaacttctggcttcaagcggtcctcctgcatttgcctcccaaagtgctgggattgcaggcatcagctactgcacccagccaaaaattgcagttttttaaaaaatgtgtaatagtacttacacatggtaaaaatttcctaagtatgtacaatgaagttttcctcctgtctatccagccacccagttctccccagaggcaaccaatgttttccgaggtgtatgtgtcctcccatagtcattctgtgcatgcacaagcaaatatgcctatcaacatattcatatgcatgtacttcctaatatgtgcacattttcctctgacacaaatagctgtgtgactgttttgaaccttttctccttgtcctgtcttggagatttttttagatctacaccaagggcccttaatctatttacaggtgcagaatattccactgtagagttgtaccataattttcttatcctatcccccactgattaataatttaggttatttccaggcttttgctattataacccatgccataatgaacattgttgtacatctgtcactttgcacacgggtaagtatatttgtagaatacatttctaaaaaaagaaatccctagattagatggtatgtagtgaagatatatgcgtagttttgatagacctgaccaaatggcccttaaagagtttgtatgtttgctctccccctagcagtgcatgggagtggatatgagtttacaagccaatgtgaagccctggtcagagactgagccccaagcctcatgtttgccagagttgcttagcttacattgtgtgcatgaggggatgggggatatgtgtgtgtatgagagagagagagagacttcatttggagaaagctgtggctaactgtgagaaccatgatatggggaatcatcactgttccttctcataatcctccagtttgaaagaatgacccagaaaatgaaagtgttccacaccccgcaggaagatccttagacatgcagtgtggaggcagtagttcagctgatagctagaagagatggcaagagcaagagcagaggccaaggtataaggagatgagatttagtttcatagcccctgtgttaggttatttgcattgctataaaggaatacctgagactgggtagcttataaagaaacgaggtctattttggccacagttatataaacctgtacaggaagcatggcaccagaatctgctcctggtgaggacttaggaagcttccaattgtggtggaaggtgaagagagagcaagcatgtcagatggcaagagtgggagcaagggcaaggtggggcagggggaagtggggagccacactcttttaaacaaccagctcttacataaactaccagagtgagaactcactcattaccatgggcgtaacaccaagacattcatgagagatccacccccatgaaccaaacacctcccaccagaccccacctctaacactggggattccatttcaaaattagatttagaggggacaaacatccaaactatatcagccaccaacattagctagtgttcttcagatggtcagctcatttgatccaactttaagtgtttatcatgtgctaagccctttacctgtgctggaaatacagagatgagcatggccggtttctgccctcaagaagctcacccaaggaagtgggccatgtgggcggacagctttcatggaatgtaatagaaactacagcaatgatgacagctaactctgagaacatcttcaatgccagccagtgggctcagcactgcgtgtcatctcacttaattgtacaatagccctgtgaaggtgattacagtgttatccccatttcacagatgaggaaaccaagacccagaaaagttgagggatagccctaaaaccacatcataggtggcactactggagtatatgctgaggtctgtctgactgcagagtattgagataaatcagagtgttcagcatactcagagctaaaagtcgctcctcctcctccatcagtggttctttgcttccttctctctttatagcatcacattagttgttctcacgctgctaataaagacacacccaagactgggtaatttataaaggaaaggaggtttaatggactcacagttccaaatggctgaggaggccttgcaatcatggtggaagatgaaggaggagcaaaggcacatcttacgtgttggcaggcaggagagatcatgtgcaggggaactgccctgtataacaccatcagatctcatgagacttactcactatcacaagaacagcactggaaaaactcacccccatgattcgattacctcccaccaggtccctcccatgacacatggggattatgggaactatgattcaagaagagtgtggggacacagctaaaccatatcaagcaccacactgcatttcagagtgagggcatggaagtcaagccagggcctctggggaagatatggcctgagctgagatttggaaacaaatgaataaaaacctggaaacaagagcaatctggacagaggaactctcagctgacctccaggagactcagcctccaggcctcaggaagtagctggcagacagaggcaagcgagcaaacagagtcaccacaggggtagcctttggagccagactgcctgagttcaaatgctggttcagcccttttttagctcagtgacgttgggtgcatcacttaacctctctgattcttcacctgtaaaatgtggctaataagtactacttcccttatgggttgaaatagggattgaataagttcatgtattgagactgtttagaatagtgtctggcacatgccctgtgtgtgtattcctctacagaacctccaggctccaggtacagcctagatgtaaggaaaagaaaaacaaaaatttgaagcttgtctgtggtgcttattatagagaacatttacatgtgctcagaaaatgtaatgtgatgctataaaaagggaaggaagcagaaaaccatttaatggaggagggacatgggcttttggccttcaattttcttgtcaagcatagttgtgcttctcagctttcagttatcatctagaattgtgaggcaaaatgtgctttttatttattgtctatttctttatgacatctttacttggtgttaaaatataatggcctgtctcaaatcaggtgaaaaagcagaggaagataaaatacaaagaaacacattcagtgagactctcggttttctcctcttcctctttgatgctgtaaaatgttttcagagataaatgtcagataaatgctgcagcatcctcatttacccacacagcgtttatcgctcatccaccaactcaaattacctttctccaagagcggtattcagtaagagaatccaagagaagtaaaagtgagagaaaaatacttcggtaaatcagttctcatgatttactttttgtctccatattccctggcctttctttcctttatctgttatcccaaagtcacatttccagccctgtttccaaaccaaaccccatgcttggactactctttctcgaggccaattttttctcttcctctcattatttgaacaactcctgagaattcatttccttgaagaaaaacatttagcaaattccacatcataaattaccatgaccctcacatacctgtgtaccagccactcaccggatccctgggctacagaagtgatgattcagccctttgtcctgaatgagctcatggtcttacatggaaggaaaggcatgcagaaggaggttgaccttgcctttctctggcatacactcacattcatttccttgatgctcttgcttccccactatactgtaagcttctcaaggacaaggattttatctgttttgtttaccactgtataatttgtaccttaaaagagtatcctcagtaaacatttgacgaacaaatgaaaaaaaaatgacaatatggaatgatcagtaaattgatgtgcttgcaaaataagaaatagcacaaaggaaggagtaactgaatgctttgggggacagaagtgtagttggaggggtggggagacttgctggaggaggtgacttctgagctgagtgttggggaaaatgcctacatttatatgcctttgcatgatgtccagcttataggaggtgcccaaggaaagtttgcagggttgataaactttataatttatgaaggagttacatatacagtatctctaatattctaccattttttgcattcgtaaaaaggggaaacatggccatttcatgctggattatgtaaacctggaagctctatctgctacctagaaaacctcttagtagggtacaagcacctactggaaagccgtgtgtgtgtgtgtgcgcacacacacatacacacacatacctgcacatgcacccttgacaaagtagagactggctagggcacttgctgggaggcaaatcaatcttaagtgtgtgctttagaagaaagatcctattcacgaaagaacatggaaaaggtaaggacagaggtgatttccagagactggcctctcacctcacctgtgagccagaccacagctcattacctaactcctatatccaccacccaagccagttttatatcttaaaatttctgaaaatccattgattatgccatgggagagcctgaggtaggagagaagaggagagaaaaacaaaatgaatttttagttgaattaatataatgagcttactgagaaaaaacaagatacaagacctagacttgctattagtttatttttaggtttcttaactttgtttagctccagctccttcctagcatgaacgatgttgatgctgaaaaccaaaactactcatacctatgagcctactatcctggtgtgatctctggctccctcaggctgttccagacacaccctgtctatgactgactgaagacatctgcatctgagcaacaccaaattataacaaaaattagatccttcacctccgattaattctcaacttgtatttttaatatatgtatgcagcttcatcatacacaacaaagaaacgttcttcaacaatgccacaagaagtagaatcgtgcatcacattttacaaagaataaaatatgaagaa

SEQ ID NO: 15413 - DNA, 55263 bp, Homo sapiens
ttacagctagagctcttctctgacctcagatgttttccaaacacaaaatgaattttttagaacctacagaatgtaagttaagatctctgctgcttgcttaagggactgttggaatccttttcagagctttccagccttgttaggactgcttggtcatttattattggcatgtgggtggacatctaactcacagctgctatttcacaaacagtaataatattgaggccacttggtgaaatcaaaacaacactagagttctggctgtcttctttccatctataaaacaaggatatcctgagtgcagtgagagggcctggaatgtgtggtatgatagttgtggctctgcggagaccttcctcctgtgtttcagggcattgctgacatgctgtaccctttggtcttgccttccatgtaccacaggatcgataaacaaataagcaggtttcggagatggttacctaagaagccaatgaggctggacaaggagacactgccagacctggaggagaatgactgctacactgcccctttcagccagcaaaggatccatcagtgagtgttccatgttaaagccccatctcactaaggatgtgcagctgtggtagagcctcaccctgcacgcctttgattcctgggcatgaggaaggaacagcatagtgcccttctcccctaaaagtcttgtgagtgttcatatcccttttatttcagtcaggggaagataactgctgtaaccaacaatccctgcatctcagtggcttaagatgatacaatgcttgctcatgtgtgtgttgggtaaatgatcttctccacagaaaggcagtgacccaggctctgtcattctcattgctctgccaactccctgtgcacggagccccctgcaggctcatctgcatctagccagcagacaggaggagtggcctacaccttttcccattgaaaagagggttttttgttttccggtttttgttttatcttggttcacttctcagttcccctttcttcagcagttcactgggttgccttaggaaaagccacatcacctggcagcccacttgctgagtcatctgtcagattgtctcagaatggttatttgtcacttttgacatggggggaggaaaaacaagttggctaagtcactgagcctgtgaggaactgcaaaaatgaaagagaatttactctgaagcttctgagatgacaagaaatgatggctggatgcagggcagggcaggcaggaggacagaaaagcctgccgtgtgctggagactgtaaacaataggagaaacacagcctctcagtggaggcagagatcaggtcagccccacctcccttgcaacaagatcaggaattccaggccctcttgctccagcagtagtgacagcctccataaaaatgacttacctggagggaagaaaagggtgatggatttaaaaaaaaaaaaaaaaaggttgctgattttgtgagaaagtaaaccaggctgagtgctgtggctcacatctgtaatacctgcactttgggaggcagaggcaggcagatcacgaggtcaagagtttgagaccagcctgaccaacatggtgaaaccccgtctctactaaaaacacaaaaattagctgggcatggtggtgcacacctgtaatcccagctactcaggaggctgaggcaggagaatcacttgaacctgggaggcggaggttgcagtgagccaagattgtgccattgcactccagcctgggtgacagagtgagactctgtctcagaaaaaaaaaaaaaaaagaaagaaaaacaaaaaacgaaggtaagccaaatggcagttttcaagaagttgcagggagtgccaggtggggacatatttcagcaacagaaaaacggttaaagtctgtggagctctgcagggcaaaggggaaaagaaaaatcaaagaatagatgttctgaatcaaaaatgtgtaacagtaagagcagtctaatgcaggggaagcaactctgtacgcctctgaaatagccgagctgatccccacaggtcagattaaagccaacccagctgcagtatgtgaacatttgaaagggtcattgaagcaaacatggaattcacagactggcctcaaaatcttagttcgatcctcaagagaaagtgggaactggaagggacataatgttaattcagagatcagggtgttttcttaagagaaaaagacagaaaaaagctgatacgttcccattcttaatttaaacccctaccatgtctctcttgttcatcttggaagttttttagacaatgagttgtttccctaattcttccggaatgatgtctggtttacaggcaggttttccctgtgcttctacctgtttatgatagagttcctagcacagtgcagaagggtatcaccaattttggatgatggatggatggatacattgataggttgctgggtgggtgggtggatggatggatggatggatggatggatggatggatggatacatggataggtcactggatggatggatagatggatggatggatggatggatggatggatggatggatggatggatacatggataagtcactggatggatgagtggatacatggatacatcaccagatggatggatgggtggatagatggatggatatatggatggatggatggatggatggatggatggatggatggatggatggatagatggatggatagtgtatatggataggtcactgaatggatggttgggtatacacatggataggtcaccagatggatggatggatggatgggtggatggatggatggatggatggatagtgtacctggataggtcactgaatgaatggatgggtatatacatggataggtcaccagatggatggatggatggatggatggatggatggatggatggatggatggacagatggatgaatagatacatggatgggtataggagtggttgtgtaggtgtataaatgaatagaggaataaatgaagtaagtggtatacactctgggattttatttcacttcaaagggaggatatatgagatataggtaaatggaagaaaaaaatgaatgaatatatggatagatggatggataaattagtgaagtatgtgatgtgtgctctggtattttgtttcacttcaaagggttataggtgtatggaagaggagggtttcccacctcctcttttcatgctgtttatattctacagtgttcttgctttagaacaatacttctcagcgtgattcttaaagtcagaagcccttggatacccagtagaatttctagggactagaactgagaatcatatttttggaagtatttaaaaatatataataaatgagggatgattagattagggatatttagccaactctctcacatatttgagaagcccttttgacatgctttggtattaatttgtcaaataattgatttattcaatagtcactaatttagtgttcacttcttgccaggcactgtctgggtacagagggtataaagataaacaatactcagtttggaccctggtgtagtaaagatgcagactattttaaataattgtaaacagtatgatgggtgtgacttaagagggggaatactcaattctccagatttggagggaggttggtaagtgatgaggattgatcacaagagaatgcttgatatgggtcttgaaggataagacttgcccaagtggataaggggcgaaaggcatcccaagaggagacagtaacgtgtgtataaatgaacgaaggcgtgaaataggatggagtgttttgaggaaccacaagtagccttctctgagtaagagcataggtttgtgaggaggacctagtgttgtttgaaaaaagagagtgatcaatggaagatgagatatcaagacaggagaaccaaggaagaaaaagcagaggacagctggaatgaatcaaaccgaagaaccagacctcagtgggaccaagagaatagaggcaattttatcgtgtaaataagaggtgaaaaattaaataagtgtcttgaatattatgagtggtgaggatttatttctctttgaaaattgccatgtcacatagatagcatccctcgggtgtataaaagtatgacttgaagaatgctggctgtcaaattggaaacaattgttgggtacaatcagaaaagaattccctaaggatgttttgagagtgacattaatggatttaaattaatcagaagtagctggttaataagctctgggaattatagcatgatattcctggctttccaaatatagtccaaaatcccatgtgacttcttagttttccagaatgtttcatattgtgtttttcttggaatacaagctaataatagaaatgtaagtgtgttcgttagggggtgaggtgggaggagggcatgaaaatagtaaaaaaaaaaaaaaaaaaaaagagaaaaacattgaaagtttaataagtgtttcatcagagacatttcccactgaaaaacctttcgagattttccaacctccacccccaattctggttgagatgtactcatctatgttttagtaatatttttcttttccttaaccaatattaccacccattttaattactttctccaagtctagagactccttgaaagactatgcctttctcactcatttttgaatcccatagtaagtgcttaataatgattttttaaatgaaaaaataaatgaatagatagaaacaaaagtaggagaatcatgtaagtaaagaataaagctgatgtgaagtcagctgactgcacactcatctcaaaccaaatccaagataccttcttttcaaatgtagactacctccattgttccctgtctcagtaaacagcactaatatttgtccagttgctgaaactggagtctggaagctattctagacacctctctcatctctgcttcttacaagttatacatctccacggattgatgattttacatcctaaatatctctatacttcagactttgtcactgtatttcacttgaaattcagaaataatataacaggtctccctggttttactcttgtcaccaccaatccattctctcaggtgcatactgcatggtgtcttcaaaatgtgcatctaatcatgtcacttcattctctttaaaaactttagacaccaaaattattactatgacttacaagctcttaaatgcctacctgcactgccatcccctctccagcctcatctgcctttcttgcctcccactcttcatttgttgtgatccagacacatgcagcctctcctctctcagctctttggatatactctgccccaggacatttgcatatgttgtttcctctcctggaattctcttccgattctttccttcttcatgtagtatgctgttattcatcctccagaactcagctccaaagactcctgctatggaagcctcccctgaccctctccttccccactaatccttccaaagattgggtctctgttctatactgttgtagttaatgtttcctagataacatttttttaacaattgaaatgctataattatttgagtagcatatgattaatgcctgtctctctaggtaaatggtatactctgtggagccataggccatatctgtttttgcccatgattgtatctccaatacctaacacaatacctagcataaaattggcacacaatgctggtcttctaaatgaaggagtgaggattgaagtcagaaagacagcacagaataatctaattgtaaacctttattctttaactgcactgtacaaaaatattaaagttgagaatctattaaaaaacaaatacctgccagccacagtgtctcacccctgtaatcccagcactttgggaggctgaggtgggaggatcacttgagctcaggaattcaagaccagcctaggcaacagagtgacacccatctttacaaaaatttaaaactagcagggcgtggtggtgcatgcctgtagtcccagctacttgggaggttgagctgggaggatcatttgagcccaggaggttgaggctgcagtgagttatgattgtgccaccatactccagcctgggcaacagaatgagaccctatctctcaaagcaaacaaacaagcaaacaaacagcctagcattccatttgaaaatatatctgtatttaaggaggaagaaagcaaacctgtgggtgtacaagtcaacatacaaatgctacttggtcactttatatgagcttaccaaggtgggcctacaggtagaaaaattcttattgtatgccagacactatttaagaactttaatacaatagtttgagggctgaggtattattattatcaccaatttacggatgaggaaagtgaggaacaaaatggtcaaagaacctgctataggtcgtacacctaggcgaggctacctgtctaaacaactcccaaatatcagcagtagaacagcatagaagtttacttgttcacagcactatctagtgtgggtcactctgggggaaggaggcatatgtctctgattcatgtagtcattcaggtacctaggctactgttatcttgttattctgccatcccctaaatcccttacagacaaggaaaaagagagatgagtgattttttaggaaatttttatgggccaggcctaagagtggtatatagcactttcacacacatttcgtagtctagagcttagtcatgtagtaatgctgggataactagtctacctgtgtgcccagaagaaaaaaagaagcagatttgccgaataaataatcgcagtctgtctgagtgatagagcaggaattcaggttcgaacaggaaggctctaggtctcacccttataagcattacgctctattgtgagatttctcagcctcagcactaatggcactggggctgaataactccttgttgtagggaagagtcctgtgcagtgtaggatagtaagcagcatctttagccactagatgctagtagcattccccaaccctttagttgtaagagaatcaaaaatgtttccagacactgccaaatttcccctggtggtagtggtgggatgggtacaaaatcacatccctttcctccagccttgaaaaccatggttctactgtctttcatcacatgacaccctttaggcagggccacccattctctgtgataaattaaactctatttgaatctaatgactatgacagccaagtccatttaagaattaatttatctctcttcacctctgtgcctgtgaatgttgccctgcttaagtatcattgcccttcattcttaaaatggcattagcgatgacacccttgaggcaattactttctaaggtcaatacccataataaaggttttctgctggtagacagaaaaaaggaaatatgcaagaagagtcgtgttactttttataatagatatacaggacattctttcaggaaatagatcaattctgattgtctttcagaaaaatgtgctagatatagacagaaaaatgttctcccctgcattttctgtgtttttattattaccattattttatttttgtaaacacccataaaaattgaggttaaattaaataccagttcttaagagaagaatatgaaatttatgctatgctacgtgcacatatgtttaaatatatattcactcatccacgtattccataccagttgttgctctgggtgcttggagatcaacagtaaacagaaaggcaaaaattcctgccctcctggagcttacattgtagctgggtgtaactggtaataaattataaaccagcagttgtcagtgaggggtaatttgacaacgtctagaaaaatttttggttgtcacaagttaggagtggagattgcgactagtgtctaacgtgtagaggccagggatgctgctgaacatcctgtaatgcacccaacagctccccacaacaaaaaattatccagcctcaaaagtcactattagtgtgctgaggtaaacattttttgaagtcaatttaaaagcaagtgaaaaggggataaatgctatgggaacagagaaaaagagggtggggtgaggggaatggggaggactgcatgggggtgggggtgcaggttgtatttccaaaagacagtgtttcagttcttcaaggcaggcctcctacagaaggtgtgattggaaaaaatcttgcaggaggtgagaagggcagagagagttccaagaggggaacagaaaacaaaaccaaggccctaatctgggagaagctctgattgtgtttggggaagagaacaaagaccttgtggctggagcagaaataccaaggagaacaacaatagtgatgagttagaggcgtgggagggagcctgatcctgtaaggcctgtgggcttttacagaggaatgacgtggtctgacttaacttttgacagtgtcattctgactgctctggcaactgcagtcatccgtgtgaagcatgatgtatttatattttttcaagtttctatcttttcaaaatcaataatgaaaatacatgccacatataactcagcattgacccatttctttgcaaagcttttgtgttgtacacaaaatgttttaactcatgtactgtgcatgtatgaaacagatattattgaaagaccccttgaaataaagtctgcctttaaaaggcacagattttatgtgaaataaaatcacatggctttagactcctactttcatctcctactagaccgtgagctacctgaggacaggagctatgtgcctgggagcaaggggcacccagggaatgtttgtgagaccaaagagaacaggaaaggagcaaggcagaattggcattgttaccgctgggggacagagccagggctctggagccagcttctctgatcttgatgcagcatctaaaaactgtagaatatttagaagagaagtgaaaaatgcggtcaaccacaatggtcaattgtggtttccatgtccaacttgaactttcccttgacttgattcagttttggctttagttctgctaactgataatctatcttctctatcaaacattttacggccattaaattctgttatcaggattcacatctgatactaagatatttaattcatgcatcacactttttaattatgtgtgatgtgtagtatacaaaatgggcattataaaaagaccacctgacacaaaatttgctttcacgcctttttctgcttctatgctgtgagctagggcataagaaaaaagtctagagaataacaaaatgacatagttctttgtgcctaagaaaaagcgctaacaatggaaatgttggtgctggggtcatggagggtttgtaagaatgggaaaatgttggctgggtgcagtggctcatgcctgtaatcccagcactttgggagaccgtagcaggtggatcacctgaggtcaggagtttgagaccagcctgccaacatggtgaaaccctgtctctactaaaaatacaaaaaattagctgggcgtggtgatggatgcctgtaatcccagctactcgggaagctgaggcaggagaatcacttgaacctgggaggcggaggttgcagtgagccgagattgtgccactgcactccagcctgggcaacaagagtgaaactccgtctcaaaaggcagtggggcagggagaagaatgggaaattgttgctggagggacagtgagtgggagattctctgagattctctgtaacatccctttgattgtcttcttatcttttgactgttctcagcagaaaaggcagcaagttaaagccagtagtgatcagccaatcaaacagtggtagcaccaatggcaacaataaaaatgatagcaaccactgtttactaaacaactccttcattccagggttacaccataggtatattacaagtctgtgagggtaagggtagaataatgatggtcagagaggctgagtgacttgctcatggttgctctggtcactgttagatgagtgaacagaaagaagtgtcttttcagctgggtgtggtggctcacgcctgtaatcccagcactttgggaggccgaggcaggcggatcacgaggtcagcagtttgagaccagcctggccaacatggtgaaaccctgcctctactaaaaatacaaaaattagctaggcgtggttgcgcgtgcctttaatcccagctactctggaggctgaggtaggagaatagcttgaaccctggaggcggaggttgcagtgagccgagatcccaccactgcaccccagcctgggacagagcgagactctgtctcaaaaaaaaaaaaaaaaaaaagtgtcttttctccacagtgctgccacctcctgtaggtgccacataaatggagcctaaatacaatttttcaactgccttaccctagggataagcctgtgcatgtgaagacatctgatttcctttggaatttattgttaaagcattcgagatgcattaaacagacatgaaataaaatggtaaaaatataaatgaatattctgaaccaaggagaatataagttaaagtaggcattcaagttcagggaaaaagtaggctcagatttgcaggcctcagtggcctatgtatctgtaatggttgacgaataaactagaaaattggcctttacaccaaaggggccaagcggaagggagaaacgtagtaactcatgtgattctgattgtcagagacgaagaaaaccaataccataggtaatgggttgctttttgactctgaaataaaattcttgcacagggtcattggagtggacagtgaaatagtgatatggtggacagtatccctggtaacctctttatcacaggtgccttgcaggacttttctgaaggctgtttctggtagtcccatcagcatggttctgaagacttaactgctcatggccataactttctgtgagagtttaggcaaggtatccagcaaaatactgcagtatacctgtgatggttaatactgactgtaaacttgattggattgaaggatgcaaagtgttgatcctgggtgtgtctgtgaggccaaaatagattaacatttgagtcagtgggctggggaaggcagacccacccttaatctgggtgggcaccaccaaatcagctgacagtgaacataaagcaggcagaaaaaacgtgaagaggcgagactggcctagtctcctagcctacatctccctcccgtgctggatgcttcctgcccttgaacgtgagactccaagttcttaagtcttgggactcagactggctctccttgctcctcggcttgcaggcagcctattgtgggaccttgtgatcatgtgagttaatacttaataaactcccctttatctatctatctatctatctatctatctatctatccatcctattagttctgtccctctagagaaccctgactaatacaacacccaaactaatctagttgtctttgttgtttgaactgtattctttaaaaactaaatttgaaaactgatcaaaaagcaaataacatcacattctagttgaaaatggttccatgtttgagaaacaatagaagctaaccagtgggtacacatctctatacgtcaatgcataaagcccttcgtcattttatatcttatcacaagagctaggcctacaggctgcccatcagccatgattgtatggccacctaaacatctgaccccacagaaagctctctcacactagccagctatggaaactcaggttgtcaatattagagtcagtcattccaggaggcccctctcaaaactcaatttcagaaaaggtcatttcaatagaaccatatgaaatttattataggaatatgatagctaacattcatatagtgcttagtgggttccaagtacttcacggttataaactcatttagtcctgtgagtaaggtatcgtcattatccccatttttacagaggaggaacctggggcacagaagggttaagtaacttatccaatgtcaaacagttggtaagaggtagggcctggatttcaaggccaagcattctggccccagtcttatctttttaacattgcatgttagttttctatggctgctataacaaattatcactgacttaactgtttaaaacaacaaaatttatcatcttacaattctgaaggctagggtgcaacatgggtgacactgagctaattaaggtatgtcaaggctgcactcctttctggaggagaatctatttctttgccttttctaatttctggaagctactacattccttagcccatggcttcttcctttatctttaaagccagcaacggtagttgagtccttctcacatcacatcactctgactttgcttctgtcttcacatctttttcttctctgactcttttgctttcctcttccatttttagggacccttgtgattatattgtacctatctaaataatccaggtaatctccctgtcttaaggtcagctgattagcaactttaattccatctgcatcattaattcctctttgccatattgcttaacattctgaggatgaggatgtggatatctttggagggccataatattgcctatcacagctgtacaaatttgccaatccaaaaagtgccaagggttgggacagaggacaggaaagttttgatgggaaaaaagaaggaaagaaaagagagagggagagaggaaggtggcaataggatttggggacattaaatgaaatgacatatgtaaaagacttagggcctggcgcgatggctcacacctgtaaccccagcaatttgggaggccaatgcaggcagattgcttgcagccaggagtttgagaccagcctggccaacattgtgaaaccccctctctactaaaaaaaaaaaaaaactttagccaggcatggtggtgcaagactgtagtcccagctactcaggaggatgaggcaggagaatcacttggaccagggaggcagaagttgcagtgagccgagatcatgccactgcactccagtctgggcaacagagcgagactccatcttaaaaaaaaaaaaaaaaaggcttagtccagtacctggcagatagaaagcactcaacaaatcaacaaatgatagttatcattatcattattaccacaaaccagcagtatactgagaatcctttggagaatctgcaaagttgcagttggtgtgtaatgggaaagtttgaggtgacagagactgattttgcaaaggctcataactgacctgaactggaattgctttgcttttaagccaaatgttactcagtgttccagatactttgccatttaacattttatgtgtcagtaacatatgactacttgcttttaaactctcagcatagatatcggaagatagtgattcttctaacctgtgccttttactgtatttttgtttcaaagaactgaagagttttttttattgttttcatcgatctgaaatctttagagaatccttcaggcagaggtaccaagattgatttacgtaggattaaggttcttttagtgcctcaatgacttaaagcagtctctgaacacttattttattgcagttacttattcggcattaggatcctcaatattcaggttgtttgtattgatccttagagtcaggggaaacatatctatgttctggaaagtcttaaactgaaatgaaaatgaaaaaagccacgcatcttgagatttgtgcttctcaagatcatacagctccttttaagtaggacataatttaatgactttaaagggacaaagaggtcacctaatcaggtgggaaaagcatacctctgggtatctggaggcccagtagttagttgggtctgttatcttaatatttgtgagaacatctgtgaataagtcacttggaaatattttattacatttatctatctgtaaatacatagtttgtttttctgcttatcagttcattcatttaacaaacactttcaatgcctattatgtgccacatattgtactataatagaaaaatatatacaatatgttgatgtatatttatgtgtgcatgtatatttatgtgtgcatgtatatttttatttaaaattttaacttcagtatgttaagttcgatagtcaagaggctattttcctcatcagaatggtaaaaggcaatttaaaacacctataggaaagggaaagagttgtcaaatttacgtacagtaaaataaggaggggttaacctaagaggaaggaagggaactaggatcccatctgttgctatagtatacgtatgtagtcacactgtgcattaagtcttaggaaacaacagtggtgagaggagacaaggaagagcagaggtgaggaaaacctagtgcttcacaggcaggtagacactctggtgccccattggtcagtattctgtgccaggctgtgcactgcacgccctccacattatcttttttgacccttgcaaaaaccctgaaacataattttacagaaggaggcgcagaaactcagaaacattaaatactttaagccagggttacccagtaacaaatagacttggagttagaacccaaatctgtctcattgcaaacccatgctccttccataatacaacctgacatatattgactgcccactagacaccgggctacctgggaggctactggtattgttatttccgtttagagaaatggaacacggaggagtaagtcacctacctgagttgcacagttggtcaaagtaggaaaacaccctgagcagctgggggagggtcatttctgggcctgcttctgactcacatccaggagtggcactggggagaaggagttgttaaacctgtaaactgtgaagatggtagtttattcaaataaccactaattcaagaccacgtcttagaaatgtctttgtctgtggggaaaaacctgattcttctcacttcccactttcctcacccctgatacaacacccacaccatcagtttggtgtttcccattctagatgagtgatttcaccactgtgtgttgaccaaccttgacgctcccatcttcctcgctgcccaccatcaccaccaaatcctttcggcccttctcctcctttctaaccccactgccattgccttagtggaagcagccacttagatgaacaattacgacagtctcttcacctctgtctttcctcactcccaaatctgtctatcccactcatgtcacaggacatttgcaaggctgctggcactggttcctacagtacctgtgcacagttagaagaaggacatccttcctctaggaatattcgtagcgcatggattggcaagcagagtatggacagggtcaacccttcatcatgcccttggctgtgcacctgcaggagtgaataatgcacagtagtgccacgtgtagtaacattgcttccttgcttaacagcttttaatgattccccagggcctttgggataaagcttaaatttcttcacatggcatacaaaactgcctttttagcttcttcccttctccccccagccttttgggctggtgctcctgcagcatgggaatggaagtgaccctaaatattccatgactatttttcctcttcccaaggtgtgctctctttcctctcactctttggtaatatcctgttcttccctcagtaacgagttcaggtgtcatcttctttatgaaacatcttatgtctcatgtctcatgcagacagcattagacttctgggcccattagcctctgtaaatgctttaattatggcactgactattatatcacagttacttgttttcatgactgtgttctacacaaagcccaattcagcagccaaaagtaattagaagggagctccagactaagtttctcaaaggacataaagggaaaccatatcctcagcatccatttattatcatcctttcctctccttccttagtcaaaggtcatcctcctactgttgacaaaagcattcctcctctgccctagcctatacggtttttctttcctcttcctatgttgctctcctccccacaaacctcagccctctctcctattgctttcttatatggattgccacagcttctccatcaggaaaaaagaaaacactcatcttcttcaggcgaagccataaattacaggattatcattgttaggttagagactgtgtcagccaggttctgctgggttctgatacaacaaaccctcaaatctcagtggcctgcacaaaggtttatttatagctcacataacatgttagcaacgggtcaactgaggctttgcctcacatgattcctttatcatgggatctggactgaagaagcagtctgtaagacatgcattctcatagcagagggaaaaagtaatggcacaaccacacattgacttttgaaatttctgctcagatgtggcatatatcacatatcctcacactctgtgtgccaaaacaagccttatgaccaagcatagtatcaatgtggtagggaattatatgctttctccaggcagggagaatgtcagtaacatggtaatgagtagagatatattttcaaagcagcaaattgggactaataagacagtatgctcaggaatacctcgtattaatattgttttgttttgtcacattcgcatggcacatcagtctgtgagcttacggggctcagatgatgtctcatacttttttttatgatttacacgtaattgcacatatttatataggaggaataagttctggtgatctattgtatagtaggatgactagaattaacaatcatgtattgtatatttcaaaatatctagaagagaagtttttgaatattctcattagaaggaaatggtaaatgttttgttctgaacacctagcatatttttagaaaaggaattttccatgcaagttaacaaagacctgggcagaagagagatctctgtagggtagaaatcacacttgaaactggaatatttgaaaattccaaatcaaaaatctatctttatacttgggtgatattcctatcagattaccaagcaggataggtagatggctgcttctgtggtgtgtagtttctcagagaaggaggtctcctctccaaagaatgtttctttctctagatccctatactacttaggttccattcaggaaaactgaaacctggcagttatttttttaaaaaaaggatactgtgggggaagtgaagaactatagtgtcgcaaaggaaacactgaagtcaagcagatgataactgcaggaagtgaagcagctactgcctctagagttgggggagcaaaatgaagaggttggggttatcggaaccaagatgctcagagaggccctgtggagctgagcctcggactcctggggaggagattctgcccttgtggtgctgggccctcaaggatatggggcaacggagtgagcctagtttggggagtgttgcttttcagctggaaactggaaccagctgccattgtgaggtcagaggatcattgctgacaggaacaggcaggcaaacaagaaggaccaaggtcctttcacctgttctcccttccagtctccctctcatgccctgtactgacagagcatatcagagagacagacagcaatgcagaaatgtagtttgcagagtctctattctggcattgtattatagaaaagagtaaggaaggggaaatcagagataacttaatagacagcacactccctaatacctggaattttacaatttgaactttaatcctttggctaaagtcatcctcaattaaaataaaaatgtcccttggaaagatgaaaattttaatgtccttctttattgacaccccattatgaatagtttattgaaaataagaagaggaagcaagagatacagatgaggtattttggccgtagcaggggcagatagagaatgccacaaagatggtggagggccaaaaaagagcaatgaaaacagggggatcatggaagataaattttaccaacttccagattttgcagatgcttggcagagtttctaggactttgctgctcccagcaatataaatgaacagcagggacagagatggatctgtccatttggtcaacattcagaacaactcagctcatataaaaatgagacccatgactaagatcagactaagatggagggagccatggttgagtcactgaataataaacttatgcagggacaattgcctaagtaattcaagcaaaaccttactattgactgaattacagtagtgccctaattagtggaacgctgagagcttagcttattctaaattggatttttctggtctgaggattaattaggaaatatttccagacttgttttatagattaaaaaaaatgatttcctctttattctggctcacttttgaatagcaaataaaactaatctctaataaatttgaatattgcattgttttcatttttgagtgtctatctcagttgagtctgcatcaagtaccagttctgtggcaagaactgtgtagagctggacaaagatgaatgaatcattttctgaccttaaggattaatggttgagctcactcaagctctggttggaaacacagggcctgggtgcccaatcccagctctgtaacttgtaaggtatgtgattctgagcttcaacctcttcatctgtaaattggaaataataaaaaatagccatataatattgtgaaaattaacaacacagtatatcagtgcttatggtatatgttcgataaaggtattttatttttgttgataattttgatggaaccttatatataaatagataattttagtatatgtgaattctataaatgctgattttcatgatccagtcttaaaggtagatagtttaagattggtgggaagttttcccaattctaggatattacttttttctcttacttttttcttctcttttctatagcatcctttctcctttcttttcccctatcatttcctcttcctgcctcctcctcttcttccagaattatccagattgctatccacctctccatttctcttggttgtgtatacctagccaatatcaaaggtactgtttggcctactgtgccttaccaataggttttcaacctctggctcaattaatgcatatccttttgttagataactgactctttaaaatatttattgatgcaaccaataaataaaaagaaaaaggctattccccagcctttttctactgtgatactttacttatgcaacatgctccctcatgttttcctgttcctgcagaaagcacgttagaatacctgggagtaaaatgatcctattataaaggtaccttaaatccattctgatttatttttttaatcattcccaagttttggcattctaatcatcattactgtcaaatacacacctcaccattttgtcttattaggatgttgtgacacatgggtgaataagaccccaaaatttgactattgcttctttcttaagacctgtcctattggacatgcacccttagtcctagtaatgctcttcctaaagtaggtacttcctcaaaacacttgcacatgtgcattttgcagaacgttcattagagcattgtttataataataaaactttataaatagcctaagtatccactagcaagacaatgagccagtaaactgtactgtcccatacagtagacttctgagcagcagggaacatgatggactagagctccttgtatgaacatcatgaacctcaatgctgagcaagcaaagcaacttgcaggagagtaattatagcatgataccatttctataaagttctaaaatatgcaatactgtatttttaggaatacctgcatgttgtggattataaaacattcctgatagtggttacctctaggggaggagaatacaattaaaaaggaggacacagagaaacttcaattatatttgcaaacttttgattcttaagtttgttagtgggtatataggtgtttgatgtcgttcaccagtgcatttttgtatgtttaaacatattttattaaaagaaaaagatgttcacaagatcttatttcaaaatagcaggaacttatacactgggggcctgtttgaaccatgagagtcagtaatcttataaaaagtgacaaatagtgggccaggcaccatggttcatgactgtaatcccagcactttaggaggccgaggtgggtgtatcacttgaggtcaagagttcgagagcagcctggccaacgtggcgaaaccctgtctctactaaaaatacaaaaattagctgggtgtgatggcatgcgcctgtaggcctagctacttgggagactgaagcagaattgcttaaatccgagaggcagaggttgcagtgagcggagattgcaccacggccctccagcctgggggagagagtaagactccatctcaaaaacatttaaatgaaaatttttaagtgacaaatagatgataataaaaatcatgaaactaccatttatgagcatcatgtgtatgtaaccacactgcatgcagtatctcttaatcctcaaacatcctctgaagtgggtgttatggttgtccccatttgaaagataagaattctaaggcttagagatgttacttttctaaattcaaacagttagtgcttggcagaaccaagattctaacccaggtttgttttttctttaaccaacaaagtagatattattgtattccttcaagatgttgtcattccaaccaataagatataacctagctatattatttgggggggaaaagagtgacccagaactcagagttttgtttttgtttcatttggagataaggtcttgctctgtcacacgggctggagcacagctgcgtgatcatagcttactgcagccttgaaatcctgggctcaagcagtcctcccatctcagcctcccaggtagctaggactacaagtgtgtgccagcacactcagcttgagtttctaaaaaaaaatattgcgagctgcccacatgtttacaatatcttgggctcacaaaaggtaaattctatctatgaggcgacttccctcaaaagtctaccttcaagctggaacatcagtatttgtcagtctaatctagtgcataaaatactgagccctaaaagcaataagaatcattgtgaagattctgactttatttcaatgtggatgttttatttttgaaaataattcaattttttaaaatgttagttatctttgacaaatatgttattccaaagggttccttccttccttcctttcctaccaccttataaattaaattaaaattagacatgtatacattttaaatagccctacaaggtttgttttgaaaaacagcaatcccatgcttcaaccctttatatttgcccctcccaagaagcagcccctttcaactcttttacctgtttattttggcaattaatgcctcatatctaaataaactattttattattactttgctgtttttcagttatagcagaatctattacttcccccatagagaataagaatttgctgtttgtttcttccctacaattcttactacagtagatacctattcttatcctttcaacgtagttatattacaatttaattacattatcataatgtagatcactatttacataatgactatacaaatgctacccagagctaggtcatatagtacaatatgaatcattttccttttttgcgctatttttgcttgaactggagtaactcattctcttgatttttaattttcaaaattttctatgtacctattactaattccatcttacattctgccagttatttggcagagtttacctaaattgtctaaatttcaagatgttcagatgcatcatacgtaatcaatttcatcttcctgagaaaattactctggagccttctgacaagttccaatctgaactcttgccttccgctcctgttataaattatcatcttggtatcttcctttaccaaggatatcctaggattctctttgtctttcacttttgtggcatcttctgtttcctgtgtatcatttcttacactttttttattgtaccctcattttgcattctctagtgacttcctaataagattacgtggatgatattatttttgcgatcatgcatactgttatgggtcaaattgtgaccttctgaaattcacatgttaatatcctaacccccaatatctcagaatgtggccttaggtggtgatagggtctttaaacaggtaattatgttaaaatgaagttattaggatgggccctaatccattatgactggtgctgttatataagagaaaattaaaacacagacatacacacagagaagatcatgtgaagacatatagagaaaacagctatctacaagtcaaggagagaaaatttagaagaaaaaactctgctgacagcttgatcttggactttcagcctccagaactgtgagaaaacaaatttctgttttttgagccactcagggtatggtactttgttatgacagcccaagcaatgaagtatatgttcattatactgcactcattatgatagttgggctaggtatagaattctgtataaaaccaaaatctgtttttctcacaatttttaagttcttgatcttttaacttctaaaattaatattcaatattcctgctgagaacttcaaaaacattccaattcctaattctctgtgcgtaacctttctcctctatggaaccttatataattgtctctttggcctcagtgttctataatatcataggaatgtatcttgatgtggttctatgtttacttatattactggatgctcagtgaaccctttcaacctgtatagtcttgtctttcggttcagaaaaattttcttgaataattcttgaatgttttagctgatttattccttttttgtctttctggaattcctatttttcagttattggacttcctgggctgatcctctaatgtccttatcttcctctttttttgataatctatatatttttgctctgggagaattcttcaagttattttctggaccttcaccccacttctttaggtcactgtgtgccccagttctaagattttctgggatttcgtagtataaatattattgttcttgggttttccccagaactggtttagcattcagttttttctggttttctaagtctattattacatagatctgtctgcttggcacattccaacattttgatgctgttgttttgtgctatctttgttctatgagtgttcttactgttatttaaacatacacacccactatgcatgttactatcattttcatgggattttgagagagacagaaaaattgtatgcaaatgtttaattttccatctttacttggaagctcaagagcaaatgtttcttaatttgtatttaacacttagataacgaagatgatatcatgaagtacaattagaaatggccatttgaataaggaaaatgactcacagtcctttacatttcagtaacctgtcatcctgatctaaaaaaagaaactttaaaatctttaccaaatagtcagaactttcaatgttatatatttggcctgacaatcttctcatctttttgctcataaaatgtctactcaagattagaagttagatattgtgctgcagttgcctaaggcccagaaaacgctcaaaataggccttgtcacataaaaaattaattggttgctttgttcctacttagattttcattaatttgaggacataatataagtgacagttaactgtatcacctttgcttctccttgttaaaaaagaaatacctatttaaaagtctaattaagaaagtttcctgaaatatttatttttaaggcattaaccttcccttattatattatggaataacacaactttaaacatcagaaaagactggtatgttggttatctattgctacataacaatctactacaaaatttactgacttaaacattttatttgcttattattcttttgttttagcaatttgtgctagattcagctgggaagttcttccactgctttcacctggagtcaacatgtggctgcagttgtccctttgctcaatgagctggacagtccaaaatggtctctgtcattcacatagctgggggatgctgccagctcttggctgcatttctgtctccacatggctcatcttcaaagaggctcgtttgggcttctttaccctggcagccttggggcagcattccaagtgggcaagaatggaagctgcagaacctatgccaaaaaatcatggaaattacttctgctgtatactgtagattaaagccattcacaaatccagctcagtctacctcttgatagaaggagcaagaaattcacatcccaaaggagtgtatatacagacataggaggaatcatggccttttttctttttttttttttttttgcaatctaccacagactgctgtctggctgaaacttattcacattttttccatatagaaaatattctcattcccattccaggatctccatgggtctcatcccaatattgcatcaggttcacagtcttagatctcatgctctgcatcaggtgagttgaggatgaaaacccttggctacaactcctcaggtgtacactctttgtgagccagagacctgtgaatgaaaaagacaagttacctgctccctacaattccaacacatggtgatggaacagaggcagaataattacaataggtactgccattcaacatggggaacaacaagaagactgtagcagtcacttgttcacattaatctgaaacccagctggtcacatgcttcaggctccttcactccagggtcaaaaaacctaccttgattagttatctgtttctgtttcctactttgccacatgccttaaatttttagattcacagaggtcaataatgtgactataattctaaaataattgtacaaaaccatctgtaggtagttaagtgcttcttgacaaagttaccccttcctcctgaagtttttaaccatgcagattttcatacctttgagaatacttgtttgtttgacccacctcagaaatttcataatatatgtaaaaaaaaaatggaaaaaccatcttccttgcctttacttccccaaaagtagtaccacatacaaagcatcattataaaatgatactgattttgagaatcttcaaattacaaaaaaagttaaaatttatctataatataacctgacagtttctggaacacccagtggttctctatgggaatcacatgatttacttatttacttggggcctagagtagagcatgagacagaccaagccctgccctcacagagcttgcagtctgtagggggagaggggcagacaacaaaaatgtagacacatccccacctcatcccagctctatttttaaaaattttagggagtaaaacataagagaataaaacagggtaatggaggagagagaatgagtgacagagtgagagagagagattattggggcaggagagtgactatcttagctaggatgatgaagaggtgacatttaatttgagaacaaaatgttgggaagaaacaagttgtgcaagaatctaagaaaagcatgatcaaaagccctgggcagtaacagtctgggtttgtttgttcagggtcagaaaacaaattcaatgttgcttgtttacaatgagcaaagggaagaaaggagataaggtcattggtatgggcaggaaccatgaaggactgtgtggaaaggtgaagtcattgaagagttttaactggaaaagcataagatcttattcattttttttaaaaaatcattgtggttgctgtgtagaggatggacaaaagagacagtgaaattagatagtacagttaggaagctattgtagtagtcctagaaacaactttgcagtaggagggtgagaaagggtcagattcaggataatatttgggaagaggagcccagagaccttgatggattggatgttgggcataagagagagggtcaaggatgcatctcaagtttgtgacttgtgaaattgggtgcacttcagttccttttttttccacttttattttaggttcaagggtacatctggagaaaagggaactctcatacactgctggtgggaatgtaaattagttcagccattgtataaaacagtttggtgatttctccaagcatttaaaacataactaccatttgacccagcagtgcccttttttaagatggaaaagcctaggggaagaacaggtttttcctttataagggtccagatcaaaagttctgttttggaaatatttggtttgagttttttcttagacatcaagcgagatgtcaaacaggcagttgaatgtgggagttcagtcatttaccagcaagccttgatgacttgcctcatcaatactttatagtctcactttgtgactatctaaccctatccttgggcaactaagacatggggaccctcatttcctgacaagtagagactcaatgaattacccaaggacacacaactaaagtggaagagcagggcttgaaccaggtcttctggcaacctacacatagtcctgtagggcactgctaacccctcctctactctcctgcttattgtaatcaaggggagatgcagggttttaagataccattctggaggcagtgggtgtgccacatcctcaaagtgtcacccatgacttaggcaattgtttatccatgctgttcatatagtatccaccagccacatgtagctacttaaatttaatttttaatcaattaaaattaaactaagttaaaattcactttcttagttttactagtcacagttcaagtgctcaatagttacatgagtaccatattggatagcacagataaagaacattttcatgatctcagaaatttctattaaacagtgctggagtctagattaatctaatgttcccttcagttatattaatttgtgaagaaagtgtagtcttatcctaaaagctgtgatctaagaggaaagtttaggaaaaaaagaaagttacctgctttaaaattagcatattttataataagctgattttagatccagcattaatgagcacctttccccagctcacacccttgaatatttgtgtgtttctcatgttatctatgaaggtgtaggttcctctgaggagagaaactaggtttttttcacctttgcattcccctctcaaaatatataaatatacaacgcccatgcccatatatacacaccctcaatacatattgctttgcacagaacaaacataatatttacttgttaaatgacccagcatatcacagcattttacaacactactgtggacagttggccacaggaagaacctatcaatcagagcaaataaactccaggaggtctgtaactaaaacccgattgcgcagcgtatttatttctcatttctcccttcctagcaaaaggaatattgggacctcaatcttccaccaccccgggtgaaaacgaggttgctcactaccctagaaagcataaaggtcgagcctagaggagagtcagtgggaagttcaggccctggtctgcccattacttcatgagcaggccagcaaggtcttcctcatggggtgtgatggagatatgcagaaagcccttcacacacatgcacacaggcagacctgggcccctcacagttcccttcacaaacgcaggagaaaatttggagcaaaacagatgttttctgaattcctccttgccacttgctgtttgtgtgactttgggcaaattacattagcccgtcaaagtagcaggataaggagatgtgtggatataggccttgatcacagagttgatgctacacccattcagcagtttattcccctcttcaccgaatttcagggggaatgtgagagcaaacctagaacagaaatgtgctttccttttaagttttctttttaaaaatattttcaaatgttttttaagaggcagaatctcactctatcacccagactggagtgttgtgttcatagctcactataccctctaactcctgggcctaagggattgccctgcctcagcctcctgagtagctgggactataggttcacaccaccacacccagctaatttttttttttgtagagatggggtctcactatgttgccctggtcttgaacttctggcttcaagcggtcctcctgcatttgcctcccaaagtgctgggattgcaggcatcagctactgcacccagccaaaaattgcagttttttaaaaaatgtgtaatagtacttacacatggtaaaaatttcctaagtatgtacaatgaagttttcctcctgtctatccagccacccagttctccccagaggcaaccaatgttttccgaggtgtatgtgtcctcccatagtcattctgtgcatgcacaagcaaatatgcctatcaacatattcatatgcatgtacttcctaatatgtgcacattttcctctgacacaaatagctgtgtgactgttttgaaccttttctccttgtcctgtcttggagatttttttagatctacaccaagggcccttaatctatttacaggtgcagaatattccactgtagagttgtaccataattttcttatcctatcccccactgattaataatttaggttatttccaggcttttgctattataacccatgccataatgaacattgttgtacatctgtcactttgcacacgggtaagtatatttgtagaatacatttctaaaaaaagaaatccctagattagatggtatgtagtgaagatatatgcgtagttttgatagacctgaccaaatggcccttaaagagtttgtatgtttgctctccccctagcagtgcatgggagtggatatgagtttacaagccaatgtgaagccctggtcagagactgagccccaagcctcatgtttgccagagttgcttagcttacattgtgtgcatgaggggatgggggatatgtgtgtgtatgagagagagagagagacttcatttggagaaagctgtggctaactgtgagaaccatgatatggggaatcatcactgttccttctcataatcctccagtttgaaagaatgacccagaaaatgaaagtgttccacaccccgcaggaagatccttagacatgcagtgtggaggcagtagttcagctgatagctagaagagatggcaagagcaagagcagaggccaaggtataaggagatgagatttagtttcatagcccctgtgttaggttatttgcattgctataaaggaatacctgagactgggtagcttataaagaaacgaggtctattttggccacagttatataaacctgtacaggaagcatggcaccagaatctgctcctggtgaggacttaggaagcttccaattgtggtggaaggtgaagagagagcaagcatgtcagatggcaagagtgggagcaagggcaaggtggggcagggggaagtggggagccacactcttttaaacaaccagctcttacataaactaccagagtgagaactcactcattaccatgggcgtaacaccaagacattcatgagagatccacccccatgaaccaaacacctcccaccagaccccacctctaacactggggattccatttcaaaattagatttagaggggacaaacatccaaactatatcagccaccaacattagctagtgttcttcagatggtcagctcatttgatccaactttaagtgtttatcatgtgctaagccctttacctgtgctggaaatacagagatgagcatggccggtttctgccctcaagaagctcacccaaggaagtgggccatgtgggcggacagctttcatggaatgtaatagaaactacagcaatgatgacagctaactctgagaacatcttcaatgccagccagtgggctcagcactgcgtgtcatctcacttaattgtacaatagccctgtgaaggtgattacagtgttatccccatttcacagatgaggaaaccaagacccagaaaagttgagggatagccctaaaaccacatcataggtggcactactggagtatatgctgaggtctgtctgactgcagagtattgagataaatcagagtgttcagcatactcagagctaaaagtcgctcctcctcctccatcagtggttctttgcttccttctctctttatagcatcacattagttgttctcacgctgctaataaagacacacccaagactgggtaatttataaaggaaaggaggtttaatggactcacagttccaaatggctgaggaggccttgcaatcatggtggaagatgaaggaggagcaaaggcacatcttacgtgttggcaggcaggagagatcatgtgcaggggaactgccctgtataacaccatcagatctcatgagacttactcactatcacaagaacagcactggaaaaactcacccccatgattcgattacctcccaccaggtccctcccatgacacatggggattatgggaactatgattcaagaagagtgtggggacacagctaaaccatatcaagcaccacactgcatttcagagtgagggcatggaagtcaagccagggcctctggggaagatatggcctgagctgagatttggaaacaaatgaataaaaacctggaaacaagagcaatctggacagaggaactctcagctgacctccaggagactcagcctccaggcctcaggaagtagctggcagacagaggcaagcgagcaaacagagtcaccacaggggtagcctttggagccagactgcctgagttcaaatgctggttcagcccttttttagctcagtgacgttgggtgcatcacttaacctctctgattcttcacctgtaaaatgtggctaataagtactacttcccttatgggttgaaatagggattgaataagttcatgtattgagactgtttagaatagtgtctggcacatgccctgtgtgtgtattcctctacagaacctccaggctccaggtacagcctagatgtaaggaaaagaaaaacaaaaatttgaagcttgtctgtggtgcttattatagagaacatttacatgtgctcagaaaatgtaatgtgatgctataaaaagggaaggaagcagaaaaccatttaatggaggagggacatgggcttttggccttcaattttcttgtcaagcatagttgtgcttctcagctttcagttatcatctagaattgtgaggcaaaatgtgctttttatttattgtctatttctttatgacatctttacttggtgttaaaatataatggcctgtctcaaatcaggtgaaaaagcagaggaagataaaatacaaagaaacacattcagtgagactctcggttttctcctcttcctctttgatgctgtaaaatgttttcagagataaatgtcagataaatgctgcagcatcctcatttacccacacagcgtttatcgctcatccaccaactcaaattacctttctccaagagcggtattcagtaagagaatccaagagaagtaaaagtgagagaaaaatacttcggtaaatcagttctcatgatttactttttgtctccatattccctggcctttctttcctttatctgttatcccaaagtcacatttccagccctgtttccaaaccaaaccccatgcttggactactctttctcgaggccaattttttctcttcctctcattatttgaacaactcctgagaattcatttccttgaagaaaaacatttagcaaattccacatcataaattaccatgaccctcacatacctgtgtaccagccactcaccggatccctgggctacagaagtgatgattcagccctttgtcctgaatgagctcatggtcttacatggaaggaaaggcatgcagaaggaggttgaccttgcctttctctggcatacactcacattcatttccttgatgctcttgcttccccactatactgtaagcttctcaaggacaaggattttatctgttttgtttaccactgtataatttgtaccttaaaagagtatcctcagtaaacatttgacgaacaaatgaaaaaaaaatgacaatatggaatgatcagtaaattgatgtgcttgcaaaataagaaatagcacaaaggaaggagtaactgaatgctttgggggacagaagtgtagttggaggggtggggagacttgctggaggaggtgacttctgagctgagtgttggggaaaatgcctacatttatatgcctttgcatgatgtccagcttataggaggtgcccaaggaaagtttgcagggttgataaactttataatttatgaaggagttacatatacagtatctctaatattctaccattttttgcattcgtaaaaaggggaaacatggccatttcatgctggattatgtaaacctggaagctctatctgctacctagaaaacctcttagtagggtacaagcacctactggaaagccgtgtgtgtgtgtgtgcgcacacacacatacacacacatacctgcacatgcacccttgacaaagtagagactggctagggcacttgctgggaggcaaatcaatcttaagtgtgtgctttagaagaaagatcctattcacgaaagaacatggaaaaggtaaggacagaggtgatttccagagactggcctctcacctcacctgtgagccagaccacagctcattacctaactcctatatccaccacccaagccagttttatatcttaaaatttctgaaaatccattgattatgccatgggagagcctgaggtaggagagaagaggagagaaaaacaaaatgaatttttagttgaattaatataatgagcttactgagaaaaaacaagatacaagacctagacttgctattagtttatttttaggtttcttaactttgtttagctccagctccttcctagcatgaacgatgttgatgctgaaaaccaaaactactcatacctatgagcctactatcctggtgtgatctctggctccctcaggctgttccagacacaccctgtctatgactgactgaagacatctgcatctgagcaacaccaaattataacaaaaattagatccttcacctccgattaattctcaacttgtatttttaatatatgtatgcagcttcatcatacacaacaaagaaacgttcttcaacaatgccacaagaagtagaatcgtgcatcacattttacaaagaataaaatatgaagaaggaaaaaacaagattggtaagtagtatgttagtataacaaactacatttggcatttgggaattacagacttcttcccttggttttattaagtttgtatcaattctagcaatgcttgtcacttataaaacccctaactaatcctttgatgaataattcacaagtgtaaaatcttcgtcgcatccttaaatatcttctttaaatagcatgttgtctcatttgtctaagatcatggagaaattctctcattttagaaaatgttgtgtgccaggcactgaactagatgttggggagatatgcatagttctgatctggagcttgtgttcaagaaattaaaagcagacaataaaccaataagtaaatacaataacatgaagaaattaaactggatgatgatacagagataggctggtaaaaggtgggagtgagttcaagctgagatttgatgatgagggcaagcttcactgagaagctgaaatttgaactgagacctgaatgctggggaaccagtgtgggaagatcgaggggtagggtgttcccatgcagagggagctgtaagcacggagatgagctgtcccacaaaagcaacttctccagtcatctcctccattaaatagcctctaccatatatattttaggcatttttatgagaatgtgtccatattatattacacatttcctgccttattaaacagattattatatatcaggaagggttgggtggctttgttcttatctctttttccagcaagttttttatcaatagttttaataatgacctatatcagtcagggtctaatcaggagacaaaggcacaagtaaattgaacagagaaagttttatataaataattaactgtgacaggggattggagtaatggagggttggctagtcaagggtaagaataactctaaagaatacaggaatagcagatgttaggagcagctaccacctctgagaagactcctcgctacaatgctaagctgcagatcctgctggaagaggtacagccatggcagtgcagtttgctgggggctctagaaatctgccctctggagtactgggggaagctgcctcgagtggctccaaggaagtcattctttgggagttgctacatcagcagcactactctgtgaagccccccaaggggatactgaaaatctgcctttgaggagtaccatgtgtttccagccaccacgcactgcaggagctgggtactgtagaagtatgtgctacagaagcctgctgagatatcatactggtatcaggaagagaaaccccttcctcctccagtgtccctcccagtgtcttctgctggcaaagcttaacattgaatcagctgacaaaggagaaatagttacaatagttacattattgcaaagcaggcaatgaaggtgcatttggagctgaggggaaataagttaatatctggtgcatagcccagatgacctgctcatcaagctttcgggtagggtgaaactagaaggttgcattaaatgacaagactcagtagctggcactcagccaaatccagcaagatgacatttaataattttgcgttgaccatttctaatgtgtattttcttttcctttcagtcttttaaaaaatatttactaattcagtgaaaatgttatttaaacatacatttggttattaatgagatttgagatttttcaaatgcttattttattcatttacatttgttcgaatagaaaaggaagtacataaaattttacattaatatcactgtaaaaaattaaaaaaataatttttaaggtaaagtcttacagtcaaattcagcaaaacaactaccttggtacagtgtgggagaaatgttgctcaacatcataagaggaacagatttgagagttgagctgaatgcaagcttggtgtgagtcactagcataatgactctgccaaaaaaaaaaaaaaaaaaacacctactttgatcccaagctgcataaattaaaatataacatggagaaatagatagctttctagtccagatctgattacaactggaatattatgttttgtgagagtcaatgtatgggggtatggtgaagtcaaacctgatttaggtctttcttaactttgatggattttagttaaacacattcccatttctctgcattagtcatccttccttgaaacacattccttcaataaagtcctctgtgaccattccagcttgaatgaattcttctctcttctgaattcctatggcaactatttttggagtctatttgatagttagtcatatacaactcttcttttgttgtcttgaactacattcaataacattatgaaaatctaccacataaagagaaccactcataacatttgcgtactgaataatttaaatgttaccttagttacttttatatcttaatttcttattcattcatatggtttttagaaacaaacttaggatgtgctatgcatcctttttacgaacttttttcagttaacattgtaccataaacatactagaaagcaagtgagtgaaagtgaagttattattgcagtagctgttctgaatcacttcataaaatgcaaataactccaaatggcatcttcactaataatggtattatcatttgcagtacaacttatgactcttttttttttgttgagacggagtctcggactgtcacccaggctggagtgcaatggcaagatctcagctcactgcaatctctgcctcccaggttcaagtgattctcctgcctcagcctcctgagtaactgggattacaggtgcccgccaccatgcccggctaattttttgtatttttagtggagacggggtttcactatgttggccaggctgatctcaaactcctgatcttgtgatccgcctgcctcggcctctcaaaacgactctttatgagacactagtgtattaagaatctgcagctgaatgctgctcatctggataataagatccttaactgtaaataaactgccttatttatctttatatcatcactgcctagcacagtgcctggcatatagtaggagttcaataaaggcgtgctgaactgaaaagcttttaaattattgtgcctaattttgcgtctcaaaatgtgggatgcttttataagcaaaagaaggacagagacagtgatttttaaatgttctgaagaagcacaggaagtgtagtattgttgctagtcagaaagggtctttataaaagtttctttcatttgatgaaataaggagttttctattcaaagacctccatgtgttgaaaattggtaataggccaggcacattggctcatgcctggaatcccagaactttgggaggctgaggcaggaggattgcttgagcccaagagtctgaaaccagcctgagcataatggtgaaaccccatctctacaaaaaatacaaaaagttacccaggcgtggtggtcagtacctatagtcccagccatcaggaggctgagatgggaggattacttctgggaggtcaaggcggcagtgagctgagattgtgccactgctctccagcctgggcaacagaacaggagtctgtcacaacaaagaaaaagaaaataataaaagaaaattggtaatgatgaactggaatcatatctaattagaaataaccaatcagatagtaaattattaagccacaaccaagcattatgctgaaaaacatggagcaaaactactaatggcctgtagattcaatatttcattatcatctttggttttgtaaataaaagaaataatatgttagaagaaattttaatttcttgatagaactaatgtttatccagtattattttctgcctgaaactctttctgaaagtggcatcttgcatgagccaacatcgattagaaataacatgaaaatactgatttgtagacatgattcataaggatattttagtggaatgtaaactgccactatgtacatttttcaacttcactctgaatttatttcaactgtaaaaatcaaacctggtgaaacccactttcaaaatagagccatttaatagctcaacaaagatttatttaacaatgtgggtgcatacaataaatcttgaaattgatttgtatttttgaatttggtgcttagaggagaaattagtaaagtgaaaaagatttcaaatattggctactttctcactttgcaggactttgataaattatgataaacttataaaagttatcatctgaggccaggcacggtggctcatgcctataatcccagcactttgggaggccaaggcaggtggatcagttgaggtcaggagttcgagatcagcctgaccaacgtggtaaaactccatctctactaaaaatacaaaaattagctgagcatggtggcactcacctgtaatcccagctacttgggaagctgaggcacgagaattgcttgaacccgggaggcagaggttgcagtgagccgagatcgcaccactgcattccagcctgggcaacagagtgagactctgtctcaaaaaaaaaaaaagttatcatgtgagtctcttattaggtccttatgaatcctattttttctaacatctgggatgtttgaaagttattgatgagatatgtagaattcccaatagagactccagggaatcaaagctttctacatagtaattcattacaaaggtatttattgagggcctctggtgcgctagacaaactataaagccttgtgatatttggatttcaaatgtttttcttagatatttagtattaatgtgaagcatcttaaaacatattaatgtgttactatgattaaaagcatctaaatattgattgatcctccatcaatgaaaagtgaatcagtgcatgtgccattttccagttaggctaaacctctagattctggtaaggatctaaagcataggtagcattcctctcaagccacttgagaaattatgataatctcctttgaggtgtattttaggaagtagcagaaatcttgatctgaaaggagctttaaagatcaacatgttaaacttccacttctggccaagatggagcaacaggcacaagatttactctcccacctgaaacaatcacaaaagaaaaaacagacaaaatgtatgaaacaactattttcaagacactgaatattgggcaacccaaaacaaggatctctgagagacagaaaacaaatgaaatgagccctgctgggccctatcttaccaccttgacatagtttctagacagcaccatgaaaagtgagaatgtaggcaggacctgaaagactctctaagttgagaagttgttgctaggagttgggaaacaaaggcagcgagagttcacagaaagaagtaccggaaggcagcgagagttcacagaaggaagtaccagaaagcagagaactgcacagggctagaaccttgaagatctgtagagggtctccctcaagtattcagcaagtgctgatcagtgcatacatgtccggagaatacccaaggccagagaaagaaccatccaaaagaatttccagtaagactggaacacctcataattcacagagcagtgaggagaatactcagaaaagtctttcctcctgcaaacataaagaaaatttagcaaataaagtttaacaatgtataacaagggtaatacatcatgaccaagtagaatttatcctggactgcaaggttggcttagtatatgaaaatcaatcaatataattcaccatagtagcaaactaaaaaagaaaaaccatatgttcatatttatgaacatgggaaaagcatttcacaaagttcaacatccattacagataaaaactcagcaaactactaatagaaattatcttcctcaacctcataaaatacatctatgaaatgcttatagttaaaattatgcttaatgataaaagactgaatattttcctcccaagataatgaacgggacaagtatgtctgcacttgccacttgtattcattttactatccagtgcaataaaataaaaagaattaaaactgtcctaattatcagatgacatgatcacctataaagaaactcacaatggaatccattaaaagggactaataggtgaatgtagctaggttgcaaaaaatgagattgatataaaaactcaattgtatttctctcaatctgcaacaaacagtgagaaactgagattttaaaaaccaaatcacttataattagcccccaaatatgaaatattaaatacttaaggataaatcaaacaaaagatacttaagaattgtacactgaaaactacaaaacattgctgagataaatttaagaagacccaataaatggagacatatactatgtttatgagtcagaagactcaatattgttaagaggtcagtcttaacaaattgatctatagattcagcacaatccagtcaaattcccagaaggtgttttgtgtgtgtatatgtgaaaattgacaaatgaattcaaaaattcatagggaaatgaaaggacctagaatagccaaaacaactctgaaaaagaacaaaaagtcaagtctttgacttgagacaaagggtcgaagtcaattcagtgggtaaagaattgacttttcaacatatgatactgaattcaaacccatatgcaaaaaaatgaatttaggaaaactcgtatacaaaagttaactcaaatggattatagttcaaagtgtaaaatttaaaaccataaaaattctaggagaaaatagaaaatctttgttaccttgggttaaccaagggtttcttaaataaaagcataattcataaaagaagaaaaaaatggataacctagacttcaaaattaaaacttcccttttcaaatgatgttttcaagagaatgaaaagaagggtggggccaagatggctgactagaaacagaagtgatcagaggctcccatcaaaaagaaccatcattaatgtgtgaatccttcattggcaaccaaggtatcttctcatcagaactgactaggtggctagacttgatccacagagaggaaggaagagcagtgtggtgcggcagcccgtctgagagccacacggggcaggggagcccccactccccagccaagggaggcagtgagtgagtgtggtacccagcgtgggaaaccgtgcttttttccatgggactgtgcaacccacggattagaagatcccactcaggaacccacgccactgggacctagaatgccaaccccagagctgcacagattctcaacaacctctcagctggaatctgcctaaccctgcagagctcctgcggggaggggtgaccagtgccacagctgctgctgcctgctgcctaagccatttgagctccttgggggaggggcagcagccagcactgggactcataactgcctgataagctaagctctctgtgggggaaaggatggcatccatctctataactccaggccatgcttttcccctgctggagccagggaggctggatggcttggtccccaagagtggtcccccacagctcaacacactggctgtggcagactgcaacaagagcgcctcttcaggcactgacatatccttcctcacttcctatatggtggggcttccctacaggaactccaataactccagccagagactcagggacagaacctggatctccctgggccttatcccctagtgggaggagtggctgcagtctctgcagaccagcagacttagcccagaatgccacccagcaaggcacactccctccaccaagagacagtgaaaatgcttcattaaatgggtcccatttcccttgtcacccaaataggtaagaccttccaacaggggttgtcagataccctatacaggagtgatcctactggcatcaggttggagcccctccgggttagagatcccagaagaaggagcaggcacccatctttgccttctccagcctgcttgagtgacatctccaggtgcgggagcgaaccagataaatagggcctaaagtgaacccccagcaaaccacagcagccctacagaggagggacctgaccagtgaaagaaaaacaaacagaaagcaacaacaacagcatcaataacaaaagaagtcctcacaaaaaccccatccagtggtcagctgcctcaaagatcgaaactagacaaactcacaaagatgagaaagaatcaatgaaaaaatgctgaaaacccaaaaggacagagtttctcttcccctccaaatgattgcaatgactctctggcaagggcataattgggtgaaggatgagatggacaaattgacataagtaggcttcagaagatgggtaacaaaaaactccactgagctctaggagcatgttctaacccaatgcaaagaagctaagaaccttgaaaaaaggttacaggagctgataactagagagagtttagaggggaacataaatgacccgatggagctgaaaaacacagcacaagaactttgtgaagcatacacaagtatcagtagctgaattgaccaagaggaagaaaggatatcagagtttgaagaccacctcactgaaataaggcatgcagacaagattagagaaaaaagaataaaaaggaacaaacaaaacctccaagaaatatgggacttcataaaaagaccaaacctacaattgattggagtaccacctgaagcagacgtgaagaatggaaacaaactggaaaacaaacttcaggatattatccaggagaatttccctaacctaggaagacaggccaatatgcaaattcagaaaatacagagaacaccactaaagtactccacaagaagatcaaccccaagaaacataatcatcagattgtccaaggccaaaattaaggaaaaagtgttaagggcagccagagaggaaggtcaggtcacctgcaaagaaaagcccatcagactaacaatgcacctctcagcagaaactccacaagtcagaagagattgggggccagtattcaacattcttaaagaaaataattttcaacacagaattttatatccagccaaactaagcatcataagcgaaagagaaataaaatcctttccagacaagcaaatgctgagggattttgttacccccacgctggccttgcaagagctcctgaaagaagcactaaatatgcaaaggaaaaactggtactagccactgcaaaaatacaccaaaatataaagaccaatgacactatgaagaaactgcatcaactagtatgcaaaataaccagatagcatcatgatgacaggatcgaattcacacataacaatactaaccttacatgtaaatgggcaaaatgccccaattaaaagacagacaggaaattggataaagactaaagacccattggtgtgctgtattcaggagacccatctcatgtgcaaagacccccataggctcaaaataaaggatggaggaaaatttaccaagcaaatggaaagcaaaaaaaatgcaggggttgcaaacctcatctctgacaaaacagactttaaaccaatgaagatcaaaaaagacaaggtcattaaataatgataaagagaacaattcaacaagaagaactaactgttggctgggcatggtggctcaaacctataatcccagcactttgggaggatgaggtgggtggatcacgaggtcaggaaatcaagaccatcctggccaacatggtgaaaccccatctctactaaaaatacaaaaattagctgggtatggtggcatgtccctgtaatcccagctactcgggaggctgaggcaggagaattgcttgagcccgggagacagagattgcagtgagcctagatcacaccactgaactccaacctcgtgaaagagcaagtctccgtctaaaaaaaaaaaaaaagagctaactattctaaatttatatgcacccaatacagaagcacccagattcataaaacaagttcttagagacctacaaagagacttagactcccatacaataatagtgggagactttaacactccaccatcaatattagacagatcaacaaggcagaaaattaacaaggatattcaggacttgaactcagctctggatcaagtggacctaatagacatctacagaactctccaccccaaatcaatagaatatacattctcagtgctacatggcacttattctaaaattgaccacataattggaagtaaaacactcctcagcaaatgcaaaaaaactgaaatgataacaaacagtctctcagactacagtgcaatcaaattagaactcaggattaagaaacttattaaaaaccacacaattacatggaaattgaacaactcgctcctgaatgactcctggttaaataatgaaattaaggcagaaataaagaagttctttgaaaccaatgagaacaaagagacaacataccagaatctctgggatacagctaaagcagtgttaagagggaaatgtatagcactaaattgcccacatcagaaagctagaaagatctcaaattgatacactaacatcacaattaaaagagctagagaggcaagagcaaactaatccaaaagctagcaggagacaagcaataactaagatcagagcaaaattgaaggagatagagacacaaaaaccctccaaaaccaggaactgtttttttgaaaaaaataagaaataccactagctagactaataaagaagaaaagagagaagaatcccataaaaaatgataaaggggagatcaccactgacctcacagaaatacaaactactaacacctctatgcaaataaactagaaaatctagaagaaatggataaattcctggacgcagacactctcccaaggctcaaccaggaagaagttgaatccctgaatagaccagtaacaagttctgaaattgaggcagtaattagtagcctacccaccaaaaaaagcccaggaccagacaggttcacagccgaattctaccagaggtacaaagagaagctggtaccattccttctgaaactattccaaacaatagaaaaagagggactcctccctaactcattttatgaggccagatcatcctgataccaaaacctagcagagacacaacaaaaaatagagaatttcaggccaatattcctgatgaatatcgatgcgaaaatcctcaataaaatactggcaaaccgaatacagcagcacatcaaaaagcttagccaccacaatcaagtcagcttcacacctgggatgcaaggctggttcaacatacataaatcaataaatgtaatccctcacataaacggaaccaaagacaaaaagcacgtgattatctcaatagatgcagaaaaggccttcaataaaattcaacagcccttcatgctaaaaactctcaataaactaggtgtcgattgaacatatctcaaaataataaaaactatgacaaacccacagccaatattatattgaatgggcaaaagctggaaacattccctttgaaaaccagtacaagacaaggatgccctctctcaccactcttactcatcatagtattggaagttctggccaggacaatcaggcaagagaaagaaataaagtgtattcaaataggaagagtagaagtcaaactctctctgtttgcagatgacatgattgtatatatagaaaactccatgatctcagccaaaaatttccttaagctgacaagcaacttcagcaaagtctcaggatacaaaatgaatgtgaaaaaatcacaggcattcctttacatcaacagtagacaagcagagagccaaatcatgaattaattcccactcacaatcactacaaagagaataaaatgcctaggaatacagctaacaagggatgtgaaagacttcttcaaggataactacaaaccactgctcaaggaaatcagagaggacacaaacaaatggaaaaacattccatcctcatggacaggaaaaatcaatattgtaaaaatgttcatactgcccaaagtaatttatagattcaatgctattcccatcaaactaccattgacattcttcacagaattagaaaaagctactttaaatttcatatggaatcaaagaagaccgcatacagccaagacaatcgtaaccaaaaagaacaagctggaggcatcatgctacctgacttcaaactatactacaaggctgcagtaaccaaaacagcatgataatggtaccaaaacagacacatagaccaatggaacagaacagagacctcagaaataacaccacacatctacaaccatccgatcttcagcaaacctgacagaaacaagcaatggggaaaggatctcctattcaataaatggtgctgggaaaacgggctagccatatgcagaaaattgaaactggaccgcttgcttacgtcttatacaaaaattaactcaaagcaatggcaacaaaagccacaattaaaaaatgggatctaattaaactaaagagcttctgcacagcaaaagaaactaccatcagagtgaacaggcaacccacaaagtgggagaaaattttctcaacctactcatctgacagagggctaatatccagaatctacaatgaactcaaacaaatttacaaggaaaaaacaaacaaccccatcaaaaagtgggtgaaggacatgaacagacacttctcaaaagaagacatttatgcagccaaaaaacacatgaaaaaatgctcaccatcactggccatcagagaaatgcaaatcaaaaccacaatgagatatcatctcacaccagttagaatggcaatcattaaaaagtcaggaaacaacaggtgctggagaggatgtggagaaataggaacacttttacactgttggtgggactgtaaactagttcaacccttgtggaagtcagtgtggcgattcctcagggatctagaactagaaataccatttgacccagccatcccattactgggtatatacccaaaggactataaatcatgctgctataagacacatgcacacgtatgtttattgcggcactattcacaatagcaaagacttggaaccaacctaaatgtccaacagtggtagactgggttaagaaaatgtggcacatatacaccatggaatactatgcagccataaaaaatgatgagttcatgtcctttgtagggacatgaatgaaattggaaatcatcattctcagtaaactatcgcaagaacaaaaaaccaaacaccgcatattctcactcataggtgggaattgaacaatgagaacacatggactcaggaaggggaacatcacactctggggactgttgtggggtgggggaaggggggagggatagcattgggagatacacctaatgctagatgacgagctagtgggtgcagcacaccagcatgtcacatgtatatatatgtaactgacctgcacaatgtgcacatgtaccctaaaacttaaagtataataataataataataaaaattaactcaagatggattaaagacttaaatgtaaaaccccaaaccataaaaaccctagaagaaaacctaggcaataccattcaggacataggcatgggcaaagtcttcatgacaaaaacgccaaaagcaattgcaagaaaagccaaaactgacaaatgagttctaattaaactaaagagcttctgcacagcaaaagaaactatcatcagagtgaacagacaatctacagagcgggagaaattttttgcaatctagccatctgacagaaatcgaatatccagaatttacaagcaacttaaagaaatttacaagagaaaaaacaaccccatgaaaaagtgggcaaaggatataaacagagacttctcaaaagaagacatacatgcagccaacaaacatatgaagaaagctcaacatcactgattattagagaaatgcaaatcaaaaccgtaatgagataccatctaacaccagtcagaatggcgattatttaaaagtcaagaaacaatagatgctggtgaggctgtggagaaataggaacacttttacactgttcttgggagtgtaaattaccccagccattgtggaagacagtgtggggattcctcaagtatctagaaccagaaataccatttgacccagcaatcccattactgggtgtatacctaaaggaatataaagcattctactgtaaagacacatgcacacatatgtttactgcagcactgttcacaatagcaaagttgtggaacctactcaaatgcccatcaatgatagagtggataaagaaaatgtggtacatatccactatggaatattatacatccataaaaaggaatgagattatgtcctatgcagggacatgtatgaagctggataccatcatcctcagcaaactaagacaggaacagaaaaccaaacactgcatgccctcactcataagcaggaattgaacaatgagaacctatggacacagggatggaaacaacacacaataggcctgttggggagtaggagggtgaggggatggaagttagaggacaggtcaataggagcagcaaaccaccatggcacacgtatacctatgtaacaaacctgcacatctgcacatgtatcccaaaacttaaatacataaatagaatgataagagaagccacacattaggagaaaaaagttttcaaaaaatatggctagtaaaggacatctatatcttgcctctagaatacataaagaacactcaaaactcagtgaatccaaaaatcttattgagcataagatatgaacagacatttcacaagagaagatatacagatggcaaacagcacacaagatgattttaaatattattcattaaaaaatgagaattaaacacgatgagatatcacaacacacccatgagagtggctaaaatttaaaagactgaccataccatgtggaggaccttgaactctcatatgctgctgatggaaatgtaaaattgtacaaccacttaagaaaacagtgtggcagtttttcaaaaagttaaatgttcatctactatatgatctagtggaatcacttctaggtatttgctaagaaagttaaagcatatattgatgcaaagttttgtatatggatgttcataacagcttaatttgtaatagcccccaaactataaaggacccaaatgtctatcatcaggagaatagataaacaaattattacatgtgatggaatactactcagcaataaaaagaaatgagctactgatatttgcaacaacatgaatgaatctcaaattatgttgagtgatgaaaaagagtaaatgttatatgattccatttatataaaactctggaaatttcaaactaattgatagtgacagaaagcagatcagtgtttgccctggagatagcacggggaagggtggcagattagaatgtggcatgataaaactttggaggcaatggatatgtttagattcttagtcgtactgatggtcttatgagtatatacttatgtcgaaacatctaattaaacaacttatgctgtctattgtatgattgttatacctcagtaaagctgtttttaaaaagatctgcgcatcccttcccattttatggatgaggaaattgagtcctgaggacaagagaacttttccaaagtcataccactagtccaatgcagaggcattaggtttgtccataatgaagcttctgaatgaaaatagaagagctcctggtgtaattccagggagctgaaggccattatcctaggtgaattaatgcagtaatagaaaaaccaaacaccacatgttctcacttataagtgggagttaaacattgagtacacatggacaaagaagggaacaggagacactggggcctacttgagggtggagggtgagaggaggatgaggattggaaaactacctgtcagtactatgctcattacctgggtgacataataattacaccaaatcccccaacacacaatttacccatgtcacaaacctgcacgtgtactccctgaacctaaaataaaagttagaaggaaaaaaatgttaaaagttaaaatgggcagagaaactgaatagacatttttccatataaaacacacaaatggccaacaggtatatgaaaaggtgctcaatatcactaatcatcagagatatgcaaatcaaaaccacggtgaagtatcatctcacacccgttagaatggctcttatcaaaaagtggtaagtgttggcaagtgtgtggagaaaaggaaacacttgtgcgctgttagtaggaatgtaaattggttcagctgtgatgaaaaacaatatagaggttctttaaaaaataaaaaatgaactaccgtatgatacagcaatcctacttttgggtacatatcccaaggaattgaaatcagtatcttgaagagatatctgcacgtccatgttcattgcagcattatttacaatagccaagatatgaaaacaacccaagtgtcccctgatggaagaatggataaaggaattgtggtacatatatacaatggaatattgttcaaccataaaaaagaagaaaatcctgccatttgcaacatggatgaacttggaaggcatcatgctaggtgaaataaaccagacacagaaagacaaatactgcatgatctcacttatgtgtagaatcttaaaaagccaaactcttagaaacagagagtagaatagtggttgccaggccctggggatggggaacatggggaggtgttgatcaaagagtataaagtttcatttataaaatgaatgagttctggggatctaatgtacagcatgggtggagatagatgtgttaattaatgtgattgtggtaatcattacataatgtatatgcatatcaagtcatcacattataaactttgaatagattcgatctttatttgacggtcaaatattttaatttttttagtgaatttcccagcccttgatcccaatttcacggcagcagagctttttttctaactcttggtgcccctaagagggttgatagcctagattgtttcctccaaaaagcaccacacttatatttgttttgaacattgtgagtattcaaactctgtattaattcaaatggacttatttgctgttttaggtctgaatcgtttgcttaccaatggctcctatgaagctgcgtttcccctgcatgaggtattgtgctgtctttaatctttatctttctttcaatcgtttgttactaaagtcagcttctagagatagtcaataattgaatttgttgacatttgctcagaatgaatttaatttgttcaatgggtaattagggagggtctacttcaattgttatatctcttcctcagcatagacttatttctatatatcttttcatgtaattgcgagaatacttaaatcaatagtcatgcagcatgaattcataggaatggcttagagactttaagtcttaaaattaaaaaggcattgacaatttgcatgaggcaccaaatccacaagaagaatgttcttgaaatatatagtctttgcaacaaataaatgtatagctattgcttaaaagagtgggaggaagccatcttgaaaagtctctggtaaccaacgggtgacaaataaaaattaataatgttgtactcatcattgttcacctaagatgtataaatactgtgactctatttcctacatagtctccatcatataaattactttcgcaagtgtaactgattaccccagctctactttccacagaattatttaatccagaattcccctacacctgggtttttaggaacataatccctcatgattattgagaaattattgtcattttcatggtgtggcacccctactgtggtcactatatggcacagagaatacaaagataaatgtcatagcctctgtcctctgggacctcacaaagtagccaatgtgcagcaactgttagctgatgttcagtacagcctgttggaaacaatggtaataatttgtcaatagactttggaagacggttccaactctccgtaaatggcaagtctttccaaaacatacttttttttggcttacagtggtacttctcttaattttaaacactaagagggtgcaaaagatgaggtagatttttcagaactttatttattaagaaaaccagaagctgccatctgaaactctgtttagactgccaggaaatgtgtttggaatgctccatttactatgacagaagcaaacattttgacacaaaggtttgctagagccatacgcaggtgtttctgaactctaaagacatactgttccccaaaacatcatgtggcttcatcatgtcattgttagttggcattgcccagaaaagggttttgtgagaactgcatcctccctgctctcagccccagctcatggtatgggctgtgtctgatatggtaagtggcagaagcgtctgtgcaggggagtgggtgggtgggcatgggagtgtctgaggagatgcagctacaaagccccacagagtgactcatgcctttcacaatgactttcctatctcagtaaagccctgtattctatgagaagttccaaattggtaatagcagcagcaatcattgcatcattgcttttctgactttttactctcagtttaacttgattatattatttaacctcagaggcaaaaaggcagaaggtcagatattgctgctcttgtttcacgttaaagatttagatagaggtttagagaaaggtgaaacctccttaagtcacacaatgagttggtggttgatctgagactcacctgagtttctttctcctagccctgtgttctttccattaagaaaggacttcttatcaggtgtggtggctcaggcctgtaaccccagcactttgggaggccaaggtggaagtattgcttgagttcaggagttcgagaccagcctgggcaacatattgagacattgtctctagcaaaaataaataaataaataaataagaaagggcttctccacttaatatgaataattagcttgcctccagaaagtaccgtttctctttgtgaaactatcattgccacaaactaacctcagaaaaacatgcacttctctggccctttgtctcctcacttcttcaatgaggaggttgaattaaatttgaattacaagaattctgaagtgacttccagcttttacattctagaattttcttgtcgataacattgtgacaaggttacaactatggctgtttaccaactatcctatcttgaaagaagtgggaagagaggccaggcacagtggctcacacctgtaatcccagcacattgggaggccgagggggacagatcgcttgagtctaggaattcgagactagcctgggcaatatggcaaaaccccatctctacaaaaaatacaaaagttagccgtgcatggtggcacatgcctatggtcccagctacttgggaggctgaggtgggaggattgcttgagcctgggagtcggaggttgcagtgagctgagattgcgccactgcactccagcctgggcaacagagtgaaacccagtctcaaaaaataaacaaataaataaataaaaagaagtagggaagagaactaataagccttgggcatggcccctgggccagacactttattcattcaaaccacataagaaaccaaatgggacaaatattagttccactatggattaggaaaccaaagctcagagcatttagggaacttgcccaggatcttctagctgaaaagtagcagaattgaatttgaactcagttcaaaccttcctgattatagcaagcacgtgcattttactagatatcagcagtagcaagacaatgtccagaataactcatcaaactgcctgccctttaatagagaggattcatttctttctcataccactcctatcacaacacctgctgtaagacacttacattaccatcagcatttccttgtgacttttgtgagtactacctcactggcagtggtgtttttatcccagggaagttatagaagtaaaaactccattcgaacccatggagcagaaaaccaccgacatctactctatgagtgctgggcctcctggggcgtgtggtataaataccaacctttggatcttgtaaggtgagtttttaatcagctgcaaatataaagcttgcacagaatgattagggcagactgtcagctgggacaagctcccaatgaagcaaaaagagcctgaagtgtacagctctcactcatatctggcttcttcacaagaggaaactcatctgaggacatcagctgttcttggtaaacctaccatcgctctgatgaggatggaatttcccccaaaaagagtcttagagaggggcccaggaatgggcatgtgagatcagccaggcctgtcacaagacttcgtaagaagcgagtcacccatgtgagtcttattgacaaaccatcttgtacaaaggtaacactgcttacatatattactgacaaagtaaaatatttactactgttagcaaataggacaaatggagtactgtcattccaatacatttcaggcttagttttcattcagaactaataacctttaaagattgttttaatctgcagatcaaaaagtatatcagcttttaacctatgataattgtgaagtggaaatgtatgtttttttattattattatactttaagttctgggttacatgtgcagaacatgcagttttgttacataggtatacatgtgccatggtggtttgctgcacccatcaacccgtcacctactttaggtatttctcctaatgttatccctcccctagccccccaccccccataggccctggtgtgtgatgttcccctccctgtgtccatgtgttctcattgttcaactcccacttatgagtgagaacatgtggtgtttggttttctgatcttatgatagtttgccgagaatgatggtttccagcttcatccatgtccctgcaaaggacatgaactcatcctttttttggctgcatagtatcccatggtgtatgtgtgtgtaaatatatgtgtgtgtttttttttaactatctatatcttcccaaccttctgccttggcagcattattctctgacatctctatttatttagaggctggttattaagattgggtaataacaacccacatttcctggattccttattaaagagaaagtcatgtctcatttcctagactagctagatgtgttgtttcacttaaataccagggccataaaataaaatgagcccagaggggaggacaaacaaaagacaatgcactttatatttgagcccttatcaccaagtgttccaagggcattgatgaattgtgatccattccttgtgttggtaacagataatccagataatcttagtgaatggaaaatattttctgagataagatcattttcctttggtcagactcagtgtatgataaacagtggggggaaaaacaaaagtaaattctcttcccagcctcggtgccatgttacaggattacattgattagaaatcacagataattgctgtaggcagcacatttcccattcatgacagtattttgattaagattttgcggttttggttagtcaatgcatattaattaactgtctattgtgtatctagtactgtgctaagtactattggcaaagccaaacagacgccaaatggtctctggctctgaaaaactcagttttcctcagcaacacaggccctgcatacttgaaacatcgagaaaagaaaatacaaggccatgcataattaggtaaaatgtgtgacagaggccataagttttacagtaattcagaaaaatggaaagaacggatgtggcagcacccctgtggaagtctctggagagctgagccctgaagaacagtggcatttatgttgggcaaataaagggggatgaaaagcacaaccaagccttgagtagaatgaaagttgtggagcatctagggaatgtcatctcttagacagttcctatcctataggttttacttccaccatatctctcgaatcgggccccacctcagcatctccactgccttcacttgttacctggactatgacagctgtgtgcctggttggtctccctttgcccactccggccccttccagtccattctgtcttctcagaataagcttgtatacaaccatgttattttatggaagggctaattctagttctgctatagagtagtagtagaagaaatgtaagcccagatcctagatttgatgggatgttcttttatcttggcttaccttgcttgcagtttacctcgtaaggccgctacaaagtaaaatgactatacgaagtttcataatgcttaactttacacactgcactgtaatttgcaaggccgttgtgtctttaacaggcggtactttggagagaagattgggttatattttgcctggttgggctg

SEQ ID NO: 15414 - DNA, 80640 bp, Homo sapiens
aacaataccttcctggtcctaaatataactatatccatacacatatgtacgtgtataagagttttgttgtgcacaaaaggggattcttagtagcactattggggatgctgataaatgttcaactagatgataaccacataaagagaacaaattgtatcctctatatatgaactaccttgcaattagaggaagccttttcttatttatggttcaaaaggaatattccccctacccaaaacaaagcctgtaaaactcattatataatcacagctatttttacagaacttgaaaaaatttgaattggaatatcatatatgagaaattaactcagcaccgattcttattattcacaggtaacccacctttttgacaatggagccactgtcttctttgctgttttcatggcagtctggggtaagtgttctataaccataaaacttgagttttcctcatatgccctatgatatattcctttagaagtttcactttggatgtgaaagaaagaagcttgagtaaatggaattagctttcctattagtagaaagttggtaaataatttattgggtttattttaaacgatattgtagaagagagacatgtctgatttctcttaaaccttcaacaatgtcattagcactctgttattagagtagaatttactttctgttggacacagaaataaagcttatggtacaactttagtttaggtcaggggagaactgaaacaccatctcagtatatataggactttctattgtaagtggctaatgtgtgagtacccacctttagctttcttctagctctgtacaaaattacccctaaaaacaaggtctattcacaggactgatttgagctttttgatataatttcaagctaacagccccatcacacaaggtgtgatggaaacagtcaaatatttggaagtaacaggacttgattgaaatctcaactccctttacacactaggctgtgtgatttttggcaagttatttaacctacctctttgtaaaatgggttaatatataatagtcaaataattataaagcttcaatttaatgatatagaaaaacatctcacaaattcatggaaagcagttaatggcagttacctttggaaaggaagattcatggaagagtaagtgaacaacgaggagagacaaactttatgctatatatttttagtctggtttgaattttttacaattatacttttctcctataactttaattgccaaaatctgaattttgatgtaacaaaattctactacctttagacttaggctcatcttgttcattatgtctgctatgaatattggaatcttccccatctttcaggccccagctgaaatgtcatctgctccagccaaaagatgtctttctcctttgaatttccatggcattttgttcttagggcacttaaaattattttcacagataacttgtcttgcctagtagatttatggtccttgaggaccattatgattatcagagatctcatattttttttttttttgagatagatggaatcagtaagtttctgttggatggatgggtgggtcaatggatagataggtggatggatggatggatggatggatggaaggaaagaaggaaaaagagaagaagaaagaaaaagaaattaccaaaagtatttatttatgatacagtgaatgtatttaagaggtcttttttgataagtggaaacataaaaccttgttcacttgagggagcttgttcttgatatattgtgtcttttgtacctagagactgtcaaaggaaaattgtcccacccatcacagctctgttgaagggacatgttttgaaccccatgactccagtccctctcagccagtaagcatttgaaccaagatcagtcaaaccacaggttggtgagtggcctgggaaaaggcctgaggttctgcccagacaaggactggtagggccacccagattcttattctccagaatgtggactagaaaatgtaaagggaaatagggagttagcagcaggaatggacactgaaaaatacagagggcaggagggagggagaaaaagaaagattaaaattgaccattgggtagaagtagggaccaggaggaattaggaggctgaagttatgagaatcagaacctagaaatagatagaagcaaagaactagtggaaaaattagagggcgaaaaagccaactgggagaaaatgtaagacaaccagagggaagcaaagagagaatatagccaagtcatgttactagtggagtgtcaggatgaagacccagactctcttgtggctgaggcctctctcaagcttcgggcttccatatcctgtctctgaacaggccatgtattttttcctgtaggattcctgcctcccttggtggaccttgtgaaaagctttcactgttcatgctacccttaatgcttctctgtcccttgcaaacaaactaaccctaacagaattttgattacaggcctgagctctcagataaagaatgcgtatatagttttactagaatctattagtatcatacaccgtgattcggataagccatataatgcttaagctttgccatggtcacaaatgaggggactctggaaatatattcatttcctaaaccagtattataaatactaaatgtattctgtaaaccttaatgtatatagtattctgtaaacgtaaatactaaatgtatattgtaaacctaaatgtattcatttcctaaacttttcaggtcatagcacacataaaaatgaaaatatttacacagcagctgctgtacatggaggagcctcctcatggccatggatagggctgtcccaaacaccccagcctcagaagccacaagggttgaaaggggcattattgttattcctggcataggcatttggaagttctgccttgggctgctaatttactgtgcaatgagttaatgcttctatataagagtggtatcctggtggtatcctggaagaattaaaacacaaaacttccttacccacttcaatatttcaccaatttcaaatatactttgaattaaataatggtttcttctcacagtttacctcctgagactacatagaagtaaatttttgtatgatgacatttgttcataaggcagaggttattactctcccccactacctccattataaaatggattgcataccctctttgcaagttgtgttttatgttatagatgacaaataggttttgttttatccccttgccaacctcagctgattggtgctggctgcctggagcatggagttgagaagtttctgaggttgaaagtgggtggattggagatttaacagcccttgtggtttggagtatactttgtaagactctgatggatgttttataataaactttgggcacagaggaacattttagggccattccaggcaagacatgcctggaataattcaccctctgaattgctttgtcttagatgacaacttattgcttaaatcccacattattcccagaaatgtgctagtttgagaaaaagaatgagttgccccaagtgtttctttgtagatagagataatgccttttgcagaaatctgaaagagtcaacaatattaacagttatattaatagcattcatttccgagggattactatgtactaaatgcagtcctaagcattgcccatgtatcatctcatttaatctctccagcaagcttttaaaaaggtactgttcttatcctcatatgacagataaggaaactgcagcagtagctagaaagtggcaaagccaagagttaaactgggcagtgtgagctcctctgctctactgctagaatcaggtattgtttgttaccatttccttctgttttagagacctgaaccttaaaataaaggactgctatgcctgtcctgagcctcatttatcctgctttgagacagtaatgttctataaaaatgtgtcagttctaatggagctcagtttaatggtctcaggatcatctcttatgatcgacaagttacagcattaaagaaaacaaatgcactctattttcaggaaattgctagatatggagctgatgagaacagatgtaagtggtttacaagacttctgaagggctgggcttgacgtgttcattttgttacctttgctttgtgtgttcaccggaaaaaaataataaggctccatctgtaaccagtttgtagcaactgggagggccttggcattgggttaggaatcctgacagaactctactacctttgttcaggtcacgtctgtgtgagtgcagggctccctcgggatccctgaggtatgctgtgagcctgggtctcggctggaattacagtgtggctcattcctcaatgctcatttttgttcagaaaggtccaagggtcagaatgattatggactaaataactcctctcccgagggaaaaaatgagtcatcagggaactagatgttggcagagacctgtcggggaaacagattatttccctctgttctgtttctggtttggtttgttttttttctctctctcccccttgtttttcattttttacttctaggattgccaaaagttaagttatccccagtaaacacaccaagcaagatccacaaagctctttaatcaaaatgacaagatggtaattatttagtgtgatcctgttagtaattggtgaatgaagtatgtctcatttaaaaaaataaattttgcaagaatcagccttttgtttctagatatttatgctaactttatattttatagtcttatctacatgttccacaaaaaaatggtaattgtatgttgaaaaaggtacacatttactaaaggcctaccatgtttgtatgcacattcacataggatacctcatcaatttctcatcacccattagaaagaaattactaacctcattttatagatgaggatactgaggctcagagaggttatgcaacttgcccaggattccagtagctgataaggtgtggagcctaaactttaaaccagatctggtctgtttcactccagagtcattccaaagtgtgtccaccatgttgtgcatcttctgtgaagtgtgtcaattaagatctcattaactcatacacaaaaatgagttagatgtgatctctgctttcaaaaatctcagtatattaaagaagcgttgataattataatacagggcaagtccaatttacaataggccaatgagggtttatgtagtcaacttcctgaggcaaaaggaaaagcagaaaaggttcacccaagaagagatattggaaagaagtcttagctttgccaggcagagtagtggggttggaaggagacatagataacattcttaggtgacaagagtatttgtaaagctctgaaaaggaagaattggctgttcagagtgatagggaggttgagtgtgtattagtttcctaggactgctgtaacatagtactacaaactgggtagcttaaaacaatagtttattgcataacagttctggaggctcaaagtccaaaatcaaggtgtcagtgggattctgagggctgtgagggaaggatctgttccatgccagtctcctggattctggtgatggctgatggtccttggccttccttggtttgtagatgcatcactcctatctctgcctctgtcttcacctggcatttgccccgtgtctctgtgtcttcacatggctatcttcttctcaagacggtggtcatattggattaagggcccagcctactccagttatgaccccatcttaactaattacatgtgcactgaccctacttccaaataaggtcacattgtgaggtactgggaccttttttgaggggacacagttcaacccatagcagagtacctgttgaaggctgagagctacttatcacagaccacttgagctacaacagaacatggcttcacgctgtaagcaacagaaagccaactggagttataatccgggaagggacatcatcaattgtatttgggaaataactctggcaacagtgcagggagaggtgaaagtggaggccaactggtggcaggcaggccccttagaaggcattctagtactcagtcaaaatattacgcagaacttggcttcagaaaagatccaatttccagaataaaaaccacacgtgtaaaatgttttcctagctttagttatttataatatgcaaaatttgtgaacaacgtaaatgtccaacaatagaagaacggtttggtaaattataagcagctattataaattgctctttcaaagcatgttgataatacaaagcttgtatttaaatttttttaaagtagggtataaagtatacaagtaaaacacgattttgagtatattaaatgtaaatgaaaacagaaagaaatgatgccataatattaatggtggtttgctttatgtggtgggattgtgggaagatttttttcaactttaagtataatttatgtgcaataaaatccagcaactttaagtgaacaattcaacaaattaggtcaaatatatatagtcatggaagcatcaccataatgatgatatataagagaactttttttcttttttttgagacggagtctcgctctgtcccccaggctggagtgcagtggcacaatctcggctcattgcaagctccgcctcccggcttcacgccattctcctgcgtcagcctctcgagtagctgggattacaggcgcccgccaccacgcccagctaatttttttgtatttttagtagagacggggtttcactgtgttagccagaatggtctggatcttctgaccttgtgatccgcccgccttggcctcccaaagtgtgggagccaccgtgcccggcctaagagaacatttttatcctctcaaaagtttcctcatgcctctgcagtcagtcccttggcaacctgaaacctgctttttaccactgtagtttcagctgttctagaatttcatgcagattaaattattcaatatatagcattttgtgtctggctactttcacttcagttaatgctgttgagattcatttatgctgttgcctgtgtcagtagctggtttctttttagtacagagtagtattccagagcctggctatgtcataatttgttcgtctacttaccagttaatgaatatttgggttcagtatggtttttaactactataaataaacctagaaactattggctcttctagttttttgtttttgtaaattttcataaaagcctttgtagccattcatcttggatgaataattaaaagtggcattgctggatcatgtgataagtgaatgcctaacttagtaagaaattgtttcccaaagtggccatatcgttttgtagtcaatatcagcatgatatgagaattccaggtgttccacattctcacaagcacttggaattgtcagtctttataattttagtcattttagtgggtatatggtattatcccattgcagttttaatttgcatttccctaatgagtagcgatgttgaacatcttttcatgagcttatttgcaatctgcacatcttacttggtgaagtgtttgctcagatcatttgtccatttgttattgggttgtctgtcttatttttaagttaaaagagtacttttatatattctaggtagaaatgcttcatcttacaggtgtttgcaaatttttttccctgtctgagtcttgcatttttattttttaatggtgccttttgaaaaccaagagttttttctttttatatagtctaatttaaattttcttctgcactcattttttgttttatttatgaaatctttgccaaactcaaagtttctaagattttcgtctatattgtcttctaaaaagcttatcgttttagctcatatgtttaggtttatgacttatttcaagttggtttttgtatatggcataacgtaaggggcagatttatttctttccatgtagatatccagttttcctagtaccatttgtcaaaaacgccgttcttttcctttttgaattttcttggtacattttggttgaaatcaatgggccatatatgtatgggtctgttttcagaatttttattatgtttgatgtgtatgtgtacacatggcaataatccactgtcttgattattatggcataataactgttaaaatcatatttttcttttcaaaaattgttttgctgttttaggttctttgcatttccaaaaaaattgtagaatcagcacttaaatttcttcaaaaaaagtgttgatattttgattgggattaagttgaatcaatgtcagtttggaaagattgagtgtcatttagctttttgtttatttacatattctgtaatttctctaagcaatgtcttattattttcaatgtacaaggcttccagatattttgttaaatttatgcctatatattggattttttgagttttttacaaatagtatttttctgtaatttcaattgccagttattcattgctactacatagaaatacaattaacttttgtatattgaccatatatcttgtgacttactaaactcagttattagtgcttctagcttttttatagattccttaatattttcaacatagatgattaagaaatttataaaataaataagttttctttctttctaatctatatgagttttatttctttttcttgccttatactggttaggacctccagaataatgctggatacaagttatgtactagacatccttgccttatgcccagtcttaggggaatgtgtttagtctttcaacattaagtatgatagaaaccacaggttttcatatatgtctgttatcaagttgaaggacattccttctattattaggaactgagggttttaaaaatcatgaatgggtatagaattttgccaaaagcttttcctgtattaactaagacaatcctgtttctttctttcttttatttttttatacttcaagttctgggatacatgtgtggaacgtgcaggtttcttacataggtatacatgtgccatcgtggtttgctgcacccttcaaatcgtcatctacattaggtatttctcctaatgctttccctccccgatccccctatcccccaacaggccccagtgtgtgatggtccctgccctgtgtccatgtgttctcattgttcaactcccacttaggagtgagaacatgcagtgtttggttttctcttcctatgttagtttgctgagaatgatggtttccagcttcatccatgtccctgaaaaggacatgaactcattcttttttatggctgcatagtattccatgttgtgtatgtgccacattttctttattcagtctatcattgatgggcatttgggttggttcgaagtctttgctattgtgaatagtgccacaataaatatacgtgtgcatgtgtctttatagtagaatgatttataatcctttgggtgtatactcagtaatgggattgctgggtcaaatggtatttctggttctagatccttgaggagtcaccacattggtttccacaatgattgaactaatttacactcccaccaaaagtgtaattagtgtaaaagcgttcctatttctccacatcctctccagcatctgttgtttcctgactttttagtgattgccattctaactggcatgagatggtatctcattgtggttttgatttgcatttctctaatgaccagtgatgatgagctttttttcatatgtttgttgcctgtgtaaatgtcttcttttgagaagtttctgttcatatcctttgcccactttttatggggttgtttgtattttcctgtaaagttgtttaagttgcttgtagattctggatattagctctttgtcagatggatagattgcaaaaattttctcccattctataggttgcctgttcactctgatgatagtttccattgctgtgcagaagctctttagtttaattagatcccatttgtctattttggcttttgttgtaattggttttggtgttgtagtcatgaagtctttgcccatgcctatgtcctgaatggtattgcctaggttttcctctaggatttttatggttttaggttttacatttaattttttaaccgatcttgaattaatttttgaataaagtgtaaggaaggggtccaatttcaattttctgcatatggctagccagttttcccaacaccatttattaaatagggaatcctttccccattgctgtttttgtcaggtttatcaaagattagatggttgtagaaatgtggcgttatttctgaggcctctgttctgttccattggtctatatgtctgttttggtaccagtaccatgctgttttggttactgtagccttgtagtatagtttgaagtcaggtagcgtgatgcctccagctttgttctttttgcttaggattgtcttggctatatgggctcttttttggttccatatgaaatttaaagtagtgttttctaattctgtgaagaaagtcagtggtagcttgatgtggatagcattgaatctataaattacttggggaagtatggccattttcacaatattgattcttcctatccataagcatggaatatttttccatttgtttgtgtcctctctcatttccttgagcagtggtttgtaattctccttgaagaggcccttcacatcccttgtaagttgtattcctaggtattttattctctttgtagcaattgtgaatgggagttcattcatgatttggctctctgtttatctgttcttggtgtataagaatgcttgtgatttttgcacattgattttgtatcctgagattttgctaaagttgcttaccagcttaaggagatttggggctgagacgatggggttttataaatatacagtcatgtcatctgcaaatagagacaattcgacttcctcttttcctatttgaataccctttatttctttctcttgcctgattgccctgaccagaactttcaatactgtgttgaataggagtggtgagagagggcattcttattttgtgctggtttttgaagggaatgcttccagcttttgccccttcatatgatattggctgtgggtttgtcataaatagctcttattatattgagatacattccatcaatacctagtttactgagagtttttagcatgaagcggtgttgaattttatcgaaggccttttctgtatctattgagataatcatgtggcttttgtcattggttctgtttttgtgatggattatgtttattaatttgcatatgttgaaccagccttgcatcccagggatgaagccaacttgattgtggtggataagctttttgatgtgctgctggattcagttttccagtatttcattgaggattttcgcatagatgttcatcagtgatattggcctgaaattttctttttttgttgtgtctctgctaggttttggtatcaggatgatctggcctcataaaatgagttagggagaagtccctcattttctattgtttggaatagtttcagaaggaatggtaccatctcctctttttacctgtggtagaattcagctgtgaatccttctggtcctggcctttgtttggttggtaggctattaattactgcctcaatttcagaacttgttattgggctattcaggggttcgacatcttccttcttctttttcttcttcctggtttagccttgggagggtgtatgtgtccaggaatttatccatttcttctagattttctagtttctttgtgtagaggtgtttatagtattctctgatggtagattgtatttctgtgggatcagtggttatatcccctttatcattttttattgtgcctatttgattcttctctcttgtcttctttattagtctggctagtggtctatgtattttttaatcttttttaaaaaacaattcttggattatttgatattttgaagggtttttcatgtctgtctccttcagttctgctctgatcttagtcagccttcttgtcttctgctagcttttgaatgtgttttctcttgcttctctagttcttttaattgtgatgttaggatgtcaattatagatctttcccgctttctcctgtgggcatttagtgctataaatttccctgcaaacactgcttccgcagtttcccagagattctggtacgttgtgcctttgttcccattagtttcaaataacttatttatttctgccttaatttcgttatttacccagtagtcattcaggagcaggttgttcagtttccatgtagttgtgcagctctgagtgagtttcttaatcctgagttctaatttgattgcactgtggtctgaaagactgtttgttatgatttccgttcttttgcatttgctgaggagtgttttacttccaattatgtggtcaattttagaataagtgcaatgtagtgctgagaagaatgtatattctgttgatttgcagtggggagttctgtagatgtctattaggttcgcttggtccagagcagagttcaagttctgaatatctttgttaattttgtgtctcattgatctgtccaatattgacagtggggtattaaatctcccattattattgtgtgggagtctaagtctttttgtaggtctctaagaacttgctttatgaatctgggtgctcctgtattgggtgcatatatatttaggacagttagctcttcttgttgcattgatccctttaccattatgtaatgcgcttctctgtcttttttgacctttgttggtttaggtctgttttatcagagactatgattgcaatccttgctttttttttctttccatttgcttggtaaatattctccatccctttattttgagcgcatgtatgtctttgcatggagatggatctcctgaatacagcacacagatgggtggtcttgactctttatccagtttgccaacctgtgtcttttaattgaggcatttagcccatttacatttaaggataatattgttatgtgtgaatttgatcctatcgttaggatgctagctggttgttttgcctgttagttgaggtagtttcttcatagcgtcaatagtcttgacaatttggtatgtttttgcagtggctggtcccagtttttcctttccatatttagtgcttccttcaggagctcttgtaaggccagcctggtggtgacaaaatctctcagcatttgcttgtctgtaaaggattttatttctcctacgcttacgaagcttagtttggctggatatgaaattcagcgttgaaaattcttttttttaagaatgttgaatattggcccccactctcttctggcttgtagggtttctgcagagagatctgctgttagtctgatgggcttccctttgtgggtaacccaaccctttctctctggctgcccttaacactttttttttttcattttaaccttggtgaatctgacagttatgtgtcttggggttctcttctcaggagtatctttgtagtgttctctgtatttcctgaatttgaatgttggcctgtctttgtaggctggggaagttctcctggataatatcctgaagagtgttttccaacttggttccattctccccatcactttcaggtacaccaatcaaatgtaggtttggttttttcacatagtcccatatttcttgaaggctttgtttgttccttttcattcttttttctctaatcttgtcttcacactttatttcattaagttgatcttcagtctctgatatcctttcttctgcttgatcgactcgactattgatacttgtatatgcttcacaaagttctcatgctgtgtttttcagctccatcaggtcatttatgtcctctaaactggttattctagttagcaattcctctaaccttttttcaaggttcttagcttccttgcattgggttagaacatgctcctttagcttggaggagtttgttattacccaccttctgaagcctacttctgtcaattcgtcaaactcattctccatccagttttgttcccttgctggcaaggagttatgatcctttggaggagaagaggcattctggtttttggaattttcagcctttttgtgctgttttttcctcatcttcgtggatttatctacctttggtctttgatgttggtgatcttcacctggggtttttgagtggacatcctttttgttgatgttgatgctgttcctttctgtttgttcgttttccttctagcagccagacccctctgctgcaggtctgctggagtttgctggaggtctactccagaccctgtttgcctgggtatcagcagtggaggctgcagaacagcaaagattgctgcctattttttcctctggaagcttgagcccagaggggcaccccccaaatgccagctggagctctcctgtatgaggtgtctgtcgacccctgctgggaggtgtctcccagtcaggaggcatgggcatcagggacccacttgaggaggtagtctgtcccttagcagagctcgagcactgtgctgggagatctgctgctctcttcagagctggcaggcaggaacatttacgtctgctgaagctgccccgacagccactgcttcccccaggtgctctgtcccagagaggtgggagttttatctataagcccctgactggggctgctgcctttctttcagggatgccctgcccagggaggaggaatctagagaggcagtctggctatagtggctttgccaagctgcagtgggctccacccagttctaacttcctggcggctttgtttacactgtgaggggaaaattacctactcaagcctcagcaatggcggacacccctccccccaccaagcttgagcatcccaggtcaacttcagactgctatgctggcagcaagaatttcaagcctgtggctcttagcttgctgggctccgtaggggtgggatccgctgagctagactgcttggctccctggcttcagccccctttccaggggagtgaacagctctgtcttgctggcattccaggcaccactggggtatgaaaaataattcctacaactagcttggtgtctgcccaaaaggctgcccagctttgtgcttgaaacccagggccctggtggcacaggcacctgagggaatctcctggtctgcaggttatgaagactatgggaaaagatactaatctgggccagagtgcaccattcctcacagcacagtccctcagggcttctcttggctaggggagggagttccccgaccccttgtgcttcctgggtgagacagtgccctagcctgctttggcttgccctccgtgggctgtacccactgtctaaccagtcccaatgagatgagctgggtacttcatttggaaatgcagaaatcacccaccttttgcactgatcccacagactgaagctgttcctattcagccatcttctgttctcaatcctgtttcttaaaagctggacaatatattaattaaattgattcattatgaaataataggatgatcttgcattccaaggatcccacttcatcataatatattaccttttatgagtgttgcaatatttgatttgctaaaatactttcaggatttttccatctatcttcatgagggttattggcctgtaactttttacttctagtgtctttttgttattgaggtgatgttggcctcataaagtgagttaggaaacgtactttcttctagaaagtagaaatggtgttatttccatcttgaatgtttggtaaattgtaccagtgatgccacctgggcctggagttttctttgcaggaaggcttttaatgcaatcttagtcatttaatggatggaaggttgtccaggttatctttttttttttttttttttttttttttttttttgcctttgaaagagtcaatttgtgaatttattggcataaatttgtttataatattctcttatcttctttctaattcctataggatgtgttatgatatcatattggtcattcctgaaattggtaattaatgtcttctcttttcctgttcattctgtctaaaagtttatcagttctattgatcttttaaagaaccagcttttggttttaatgatgtttttctattgtttttatgtttcatttttcattgatttttgctgttatctttcattttgttcctcatgcttgctttgcatttaattgctcctttttctaatttcttaaggtaaatgcctaattatttatgtgaggtctttctcattttcaaatatgagtttaatgctataaatttcctctaagcactgcttagctatatcccccaaattgtgtttttatttttaatcagtccaaaatattttctaatttcctttgtgagttcttctgtgatctgtgagttactatgtagaagcgtattgtttaattaccaaatgcttgggagattttctaaatttccacttgctgttagtttctaacttcattcaaaggacatagtttgtgtggtttcagttcttttaaatttactgagaaatgttttatgacccacagtatgatatcttggaaaatgttccaagtacatttgaaaagactagtagttccccacatggacacgcggaggggaacatcacacaccagagactgttgatgggtgggaggctagggaagggatagcattaggagaaatgcctaatgtacatgatgggttattgggtgcaacaaaccaccatggcacatgtatacctgtgtaacaaacctgcacattctgcacatgtatcccagaacttaaagtattataataataataataataataataataataataaaagattagtagttcccctttttccacagttttgctttccacagtttcagtgacccactatcaacaacggtccaaaaatattaaatggaaaattccagaaataaacaattcataagttttaaattgtgcacaaatctgagtagcatgatgaaatctcacattgtcctgctccctcccacatgagatgtgaatcattccttgtttggcatatctacaccgttcacactacctgcccattagtcatttcgtagccgtcttggttatcagatactgccactgtatcacagtacttgtattcaagtaacccttattttacttaattatgtcatcgaagtgcaagagtattgatgctggcaatttgggtatgccaaagagaagctgtaaagtgctttgtttaagtgaaaaggtgaaagttctcaacttaataagtaaagaagaaaagaaaaaatcttacactgaagttgctaagatatacaactgtaagatatattcttacagttggtaagaatcttctatgcatgaaattgtgaagaaggaaacagaaatttgtgcaatatatatataaggttcagtagtatctgtggcatcttctgagggtcttggaatgtattacctgtggataaaaggggactagtgtatattctgctgttgttaattatagtgttatctaaatttcattgattattaagagagaagacccaaataaataaaatcagatatgaaaaaggagacattacaactgataccacagaaattcaaataattattagaggatactatgagcaactatatgccaataaattggaaaatctagaagaaatgcacaaattcttagactcatacaacttaccaagattgaaccatgaggaattccaaaatctgaacagaccaataatgagtaacaagatagaagccatactgaaaagtctctcagtaaagaaaagcccaggacccaattgcttcactgctgaattctaccaaacatttaaagaagatctaatagcaatcctacttgaactgttctaaaaaatggaagaggagggaatatttccaaactcattctatgagtccagtattaccctgataccaaaaccagacaaagacacatcaaaaaaagaaaactacaggccaatatctttgattaatattgaatcaaaaatcctcaacaaaatattggcaatcaaaattcaacaatacatgaaaaagatcattcattataaccaggtgggatttattccagagatgcaaggatggttcaacatatgcaagtcaaccagtgtgatacatcatatcaacagaatgaaggatgaaaaccatatgatcatttcaattgatgacaaagaaagaatttgataaagttcaacatttattcatgataaaaaccctcaaaaaactgggtgtagaaggagaatacttcaacataataaaagccacatatgacagaccaacagctagtatcatactgagtggggaaaagtgaaaacacttcctctaaaatctggagcataataaggatgtccgctttcaccactgttattcaacatagtactggaagtcctagctaaagcaatcaaatatgagaaagaaataaatggcacccaaattggaaaggaagacatcaaattatccttgtttacagatgatatgattttatatttggaaaaaacctaaagactccaccaaaaatctattagagctgatacattcagtgaagttgcaggatacaaagtcaacatacaaaaatcagtagcatttctatatgccagcagtgaacaatctgaaaaagaagtcaagaaagtaatcccatttacaatagctacaaatacaatcaaagaactaggaattaaccaaagaagcaaaagatctccacaatgaaaactatagaacactgacgaaagaaatggaagaggctttttctagagatgccctgctgggagagtatccatggctttgcgtccccatcatggccctgcggtcggcggcctcctcctggagcacagcaaggtcaggtggcacctgcttgagtcctgcgttgccatggccacagttcctgagttgctgcagcagcaggaggaggaccacaggaagctgagatctgtatctgtggacctgaatgttgatccctcacttcagattgacatacctgatgcgctcagtgagagagataaggtcaaatttacagtgcacacaaagaccacactgcccacatttcagaatccagagttttctgttacaaggcaacatgaggactttgtgtgactacatgacactcttcatgtaccctagaacttaaagtataacaaaaaaaaaaaaaaaaaaaagaaagaacagaccatgctgggcttattgtgagtgttttagaaaatcaaataagctagttctttctgccttgctattcatttagtttaaagagacttatatccactttttataatggattgtgaaaattttgatttcatctacctactagagtatttgctaactattgggtaagtggaaaatatgtgaaggaatagtgttacagctttgaggtaatgcatacaggcttacattatttatgttgtaaagtggtataaacagtgtaatgactttagtcttatttacctttaggtttggtttttctctggtatgttctttccaatgtcagtagaattgatttctaggaaacattagtattggtaatagtatgtgataagatttctcaaaagtgctgaaggaggccatgcctgtaatcctaacactttgggaagctgaggtggatggattactgagctcaagatttcaagacctgcctaggcaacatcatgagaccttgtctctactaaaaatataagaaattagctgagcatggtggcacatacctgtagtcccagctactggggaggctgaggcatgagaatcacttgaacctgggaggtagaagttgcagtgagccgaggttgcaccacttcactccagcctgggtgacagagtgagactctgtctcccaaaaacaaaaaagtgctcaaggaggcagttttcagcccttgattgttaattcttggctgcaggaacagaggcttagctgattttaaaggagatttccatgcattttgtcctgccatgcagactgaagaatctgtccaaatgacaatttcttaataattgaacaaaattagtactgaagcttatatttagatatgttctgttcattcaaaatcaaagtccttgattatcctttgggattaggaaaaaaatcctttggaatactggagacttcataatcttgatggctaatcattggtgtttagcatttgttgtactagttttaggccaacattgaagcagtatagacactgttgtgctctgaacgattgtctgtaatggataaactgggcaaatgattgccatcaaagtgaatacaggaagatacctccttttaaatggccagaagaaataaggaaggttaagaaaaaacaggagttgacttttaaatagccccataggagtggagtggttgtctcctgtggaccagcaagagtagaacgaggcaccagctagaaaacatcgcttctgggacaagagactcatgagttcctgcctctgctgcagattccgcctgctcctacgaaggctgacttcaatggtccttgagagaagatgcagaaactgggagaaggtaaagggtctttgaccaaagaagaatttgccaagatgaaataagaactggaagctgagtatctcgctgtttttaagaagactgtgtcctcccatgaagcctttctttagtggctttcttctcaccctgttctcagtaaagatcgcaactttcatattttcctggaatatgatcaggatctaagtgttaggtggaaaaatactaaagagatgtttggtggcttcttcaaaagtgtggtgaaagtgctgatgcagtcctttttactggagttaaggaggtagatgacttctttgagcaagagaatgacttccttattaactattagagtaggatcaaagattcttgtgtgaaagctgacaaaatgaccagatctcataaaaatgttgccgatgactatattcacactgcagcctgcttacatagcctggctttagaagagcccacagtcatcaaaaagtatctattgaaggttgctgagctatttgaaaaacttaggaaagtagagggttgaatctcatcagatgaagatttaaagctaacagagctcctccgatactacatgctcaacatcgaagctgctaaggatctcttacacagatgcaccaaagccctcattgactatgaaaaatcaaacaaagctctggataaggcccagtttaaagagcaaagatgtcaagttggctaaggtacactaggaggagtgctgccagaaatttgaatagctttccaaatctgcaaaggaagaactgataaatttcaaacggaagaaagtggcagcatttagaaagaatctaattgaaatgtctgaactggaaataaaacatgcgaggaacagtgtctcccttttgcagagctgtattgacttgttcaagaataactgatatgccttcactctgaagaaaagaaatgaatgtgaaagaaagccaaacatcacttgcacttaaatcattaccagcggaagatttattgtcttcaactttagtttaaaattatgtgaataaatattttgatttctacaaatcttaacatttaaccatgttggtttaaaaatattgttgcttgctatttggacataactaatttttccttgtgcatttaatacctctgggcagaatctaaatactgagttctcctgtagtatgtctttagttactaagagaggatgtaggagacatatgccttctggaaacaagtagaagcaatcatctggcccatgtcctacaaacccatgaatgtcagggaggtgccagttacagcaggtgattcagcaacttgaggcaggtaacagaccttccattcctcactgaaggtggggtttgtgtttttgttttgccccctgttactcccctggtagtcatctggtgtttgtactataacaacagcaagaaaatctcatttgtctttatgtactcttggcacctcctttttttaaatcgagatataaatatttgaggggagaaaagtatctacgggtatatatggaaactgataatgtggtctactttataagatggccagatctacattaggaaaagtatgagctccttccatagtgtctgtgggaggtgatggggggagaggggacagtgtatgtctttggcgtttgtttttttataaagtatataataaaataatcatgctactaaaaaaaagaaattgaagaggacacaaaaaatggaaaaatagtccatgttcatagattggaagaagcaatattgttaagatgcccacactacccaaagcaatctacagattcaatgcaatccctataaaaataccaattatgtgcttcacagaaatagaaaaaataatcctaaaatttatgtggaatcacaaaagactcagaatagccaaagttatactgagcaaaaacaacaaaactggaggaatcacattacctgacctcaaattatactgtagatctatagtaaccaaaaaggccaagtactagcataaaaaaacagacatatagaccaatgggatagaatagagagccccaaaacaaatccacacacttacagtgaactcatttttgacaaagttgccaagaatatacattggggaaaagtcttttcaataaatggtgctaggaaagctggatatccatatgcagaataaagaaactagacccttatctttccgcatatacaaaaattcaaatcaaaatggattaaagacttgaatataaaacctcgaactatgaaactactaaaaaaaagcattggggaactctccaagacatgagactgggcagagatttcttgattaataccctacaagaacagtcaatcaaagcaaaaatggacaaatgggatcacgtcaagttaaaaatcttctacacagcaaaggaaacaacatgaagagacaacccacagaacccacagaaatgggagaaaatatttgtaaactatccgtctgataagggattaataaccagaatatataagcagctcaaactactttgtaggaaaaagacctaataatactgtttaaaaatagccaaaaatttgaatagacatttctcaaaagaagacctacaagtggccaacaggcatatgaaaaggtgctaatatcattgctcatcataggaatacaactcaaaactacaatgagatatcatctctccacagttaaaatggtttttatccaaaagtctggcaacaacaaattctggcagggatgtggagaagagggaacatttctacactgttggtggggatataaattagtacaaccactatgaagaaaagtttcgaggttcctcacagacaaaaatagtgctactgtatgatccagcaatctcattatcaggtatatattcaaaagaaaggaaatcaatatattgaagagatatctgcactcctatgcttgctctagcactgttcacaatagccaagatttggaggcaacctaagtgtccatcagcagatgtataaataaagaaaacgtggcacttatacacaatgaagtactagtcagccattaaaaaaaaaaaaaagagaatgacatcctgtcatttacaacaacatggagggaactggaagtcattatgttaagcgacataagccaggcacagaaagacaaacttcacatgttgttctcacttatttgtgagatccaaaagtgaaaacaattgaactcatggaggtagagaatagaaagatggttaccagaggctgggaaagatagtgtggttgggggtggagggctgaagaggaggggggatggttaatgagtacaaaaagaaatagaatgaataagacgtagtacttgacagcacaacatggggactatagtcaataataatttaattgtactttttaaaataactaaaataatataactggattgtttgtaacacaaaggataaatgcttgaggggatagatactcgattttccatgatgtgattataatgcattgcatgcctgtagcagaatatctcatgtaccccataaatatatacacctactaagtacccacaaaaattaaaaataaaaaaattaaattaaaaaaggtacagcattttaacccttccttggaacctaagctatgcatctgaaaggggagtttttaactgtataagtctgtctaaatgccttagtaacgtgatgaattatagtaactcagtgttttttcctccctatttgcagaatgttaaccattgctatgttttccagaaaaaccctatattagttaggatgagtaaagttagctgctataatacacaaacatcacaacctggtgtttgatagagcccagtcagatgttcctggttggcagatggttttccttatgatctttcatatgggtggatgagttccttccatcttgtggctgcatccccttctggatcttcagcattctctctcttcattcagctaaagtataaagagagcacagggaagatatacctacttcttaactctttgtccaaaaatgacatatatcacttcttactttctattagcctaaacttggtttgtggacacatctgagataaaggctgcaaaaatataatcaaactatgcctaggaggataagaaatcattttggtaaatgcacagcagcctgccacaaatttatttgaaattgataataattgttctatttaagaaaataccataaaaaccctagaagaaaacctaggcaacatcattcaggtcataggcatgggcaaagacttcatgactaaaacaccaaaagcaatggcaacaaaagccaaaattgacaaatgggatctaattaaacaaaagagcttctgcacagcaaaagaaagtaacatcagagtgaacaggcaacctacagaatgggagaaaatttttgcaatctacccatctgacaaagggctaatatccagaatctacaaagaatttaaacaaacttacaagggaaaaaaaaacatcaaaaagtgggcaaaggatatgaatagacactctcaaaagaagacatttatgcagccaacagacacatgaagaaatgctcatcatcactggccatcagaggaatgcaaatcaaaaccacaatgagatatcatcttgcaccagttagaatggtgatcattaaaaagtcaggaaacaacagatgctggagaggatgtggagaaataggaacgcttttacactgttcatgggagtgtaaaccatttcaaccattgtagaagacagtgtggcaattcctcaaggatctagaactggaaataccatttgacccagcaatcccattactgggtatgtacccaaaggattataaatcatgctactgtaaagacacatgcacacatgtttattgcggcactattcacaatagcaaagacttggaaccaacccaaatgatagactggattaagaaaatgtggcacatatacaccatggcatactatgcagccataaaaaaggatgagttcatgtcctttacaaggacatggatgaagctggaaaccatcattctcagcaaactgtcacaaggacagaaaaccaaacaccgcatgttctcactcgtaagtgggtattgaacagtgagaacacttggacacagagcagggaacatcacaccccaaggcatgtcgtggggtggggggcagggagagggatagcgttaggagaaatacctaatgtaaatgacgagttaatgggtgcagcaaaccaacatggcacatgtatacatatgtaacaaatctgcacgttgtgcacatataccctagaacttaaagtataataataataataataataataataataaaagaaaataatagggtgtggcctgaagaacattcagccctgtcccttttgtgtctgtgatgggccttatgagacacccttctcaacggtctgtgattctgaaccaagagtgtcctggtatctgaacactaacctgcctgaacactacccctgatcctacctttacttagagagtggaatcctcagattttcctaatatgtcgactaacgttgtgagaagattgctatttgggattggcattattaacacctcagatgaactttatttgtgggtatgtttttatttttatttttatttgtgggtagattttatttgtggataggtaggtacatggtggaggtgaaggtagaaaatggagcagaaaaagcatgcaaaactctgtcttgtaaatacaattaatcgagtgtcagatgttgtggcttgagagtgtccttttctaagatctgtgagggaaatggtagacaggttgtttcatcttcatgccttcaatgcaatgtcttagtgaccaggtgacttcatctccattaaggtaaaatgcctatgttcattaagataaggttagatcgctgtagcacaaaggcagtggctttgaaaaacacagaaattaatttctatcacatgtataagtatgaagtgagcattccaggctggcagacagctccactccacatggtcactcagggactcatgttcctacaaaagagctgtttcccataaccccagagcctgtcatcactttcacggtctcactgggtcacctgggttctacccgtccagaaggggaaagtggatacggaaaaagcaccccgcaatgttttaagaagtcaacaggcaagtactacacatcatatcacctgtgctcatatttcactgctgagaactatcctttggtcacatctaatgcaagggtatctggaaaatacaatatatgtaggcaaccatattctcagcaacaatcattttattgtggaggaaagcaagaaagaatcttagaggacagtcagtagtctctgccacagggtccatacaaccaaataatgagagtgatagttagaacagaatcacacttttattgcaagacaaaagagaagcataataagcttcaaacgttgatactattattaagttatttaataggccctggtgtgtaaagcattcagaaagtgtagctgcatattcttcaaattcatatcttaatttcttataagcatatgaaaatatttagaaaattaagaatagttttccacatttgctttcattctcaggacagcatttcatttatgcatttatggagcctctctgcgtgccagttgctgtgctagactctgaaggtataaagacaactaagatacagctctgctctcaagaagtccacaaactagtcatagatatgatctgggtttgggtttttattggttttgtttttacagtgctgaatggtgtgattagcgctgacctagagttgtgtgcacaactcagcatgggtgcacagggatgattcagggggcgtagttacagaacacacggggctaaacctgaaagtgagggtaggagttgaccagatggacccaaatagggaaaaacattactcgctaaggaaatggtgtgggcaaactgagaaagtataaaacagctcatgtgtgaaagtgttagtgagttagcctggagtctgaagtgcaagtcagggcagagcgagttgggcttatgagctttgcatcgtgagctgctaacagattttattctataggtgatgtggctccactgattcccaagacacctggttggatctggatttagagaaatcattagcaatgtaaaatgatagattggaatctaaggagttcaaaatgccagcagtaaggctaaacatgctgatgctttagctgagaaaattcttgtggaaagagttccatgtgccaaaagaaaaaaaaaaaaaacacttgacaaaactcttaggaatttcgtcttttgagaacaaagtcataaaagaaatacactttttaatcaaacttatcatagtgccaggtagtataagagaaatatatatatatacacacacacacatacacatatatctttatataaaacataaagatacatatatctttatataaaacaaatatatatatctttatatatatatatataacaaaaatatgtatagcataaaccacctttgaaggagacaagaaagtgtgagctcatgacataagacagtgtataactaggcacactgaaagtgcaggggctcccaaggctgtgagtattcagaggagggagtttaaaccatggcataatgagggattggaactttgccttgaaaagagacaacctgtcttggtttgactacgtttcataggtacaaatagaggcagattcttcttcctcaaatgaatgggcatttcacccaaacataccgacaagggaatggcagttgcacaagcagctaatttcttcttctcttcctattgagtactataatggaagaaaggagaggattattagccaaaaaagggaatattatagtgtgaatatttatgttcccccaaattcatatgttgaaatcctattctttaaggtgaaggtattagtaaggggggcctctggaaagtgattagggcatgagagcaaagccatcatggttggattattgtacttataaaagagaccccagagagctaactacctctcccaccatgtaagggcacagctggcaggtgccatctaagaaccagaaagcaaccctcaccagacaccaaatctgctggtgccttgatcttatatttcccagtctccagaccagtaagaaataaatttctattgtttagaagctacccagtttatggtattttgttacagcagcctgaacagactaacacagggaattaatggttagaatctctgtttcctccaggcaggattcagcaggaatactgaagaagggtgatggaataattgtgacagccactggctcatcttagaagtcagttccctcagatgagaaccatagagggttggtagggcgtagtgagagcagcagctgccagtaagacagactggatgtgaatcctatggcctgaggctgtcccagaatggtcccccatcaagtgtctttatgctcatggaggtacctttgtgatttttatggaaaatagccacatattcaggggctgggccacttgtctcttcaagaacagggagaccctagagaccaaggagggaaagtctttataaagtggcatttgcttgaggggctagaggacctgataaaggaaatatcccagggactctgtgcaaagacagtttggtgaggcagagggcaagcgtgcagcaaagagttaacacagcaggcctgctttagaaaggcctgcttgcaagggtggcccttggctggtgtctgggaacttggctttcaagacagtttccaccaccctgactgctaagggtaactcgtgatgcataaactacatgtgccaacaatacaatttatgctttctccctgaaactctggaattttagtacatgctaagcagctggtgcctatgtgaccagcccccaataaaaaccctgggcactgagtttctaacgagcttgcctgtcaaacagcatttcacatgtgttgtcacagctcattggggaggaattaagtacatcctgtgtgacttcactgggagacgacttggaagcttgtcctgtttcctccctactttgctccatgcaccttttccctttgcagattttgctttatagtgtttcactgtaataaatcttagccatcagtacaactgtattctgtgtcctgtgaatcttcctagtaaatcaaacctggggatggtcttggggattcctgagacagcaagactcactggaaggactccagtagaaaacagctgctcagcattgacacagataagcacatatatttgttttaatttctatcttccagaataagacatttgattattttaggtgtatcttccttaacaactgtaactactcagaatctttcagattttaggaaggcactgaatataccatatattattaaatgccccaggaggcctggggaatacatactaatgtactcaaatacattagtatggctgcttttaatacatgaaaagtctcactaagaagaataaatagaggttatatgtagcctcacatcagtccaggtcagggctcaccaccagatgagtttctgccaaacttaggggaaaaacacttaaaatttttagagcattttgaattttcgcattgcagataagggattgtggacctgtattaccctccttcttttgcttatccggaaattaaggcttagaaaagttaattgatttgccaacagtagcacagcttgtatctgatctggatttcaaatttaggactgtctaggctacatgcccgagaactcttatctatcactctagactgtctttctagctacttattttaagaatatgtcttcagtgtctgcatactactaaggaggaagtaatgtgtgaacaagggagaatagaaaagaagaaagtaattatatttttttgacatggccatttacataatttactttccttcatgaaatggattcctaatatatatttattgttaccttctgtaagtctaactgcatgacaaggcccaaaagagaaatatccacccattctctctcctagggtatgtctgttatatccttatagtcattctcagagtgtgagtgagagagtgtgtgtgtgtctgtatgcatgtgtgtgtgtgtgtgtgtgcccctgtatttgcattttgccttccaaggcagcaggagtgtgtcttattttctctctgtttctcttttattgcataatgctcaataattcatttaagttgatatgctttcattaaattgagtagaaaattaccttggctgaatgaagataactcccagatttctctgcatggggaggccagccacctcgcacttactggagaaagttcttaatagacttacccacttttaccctcattgtggcaacaaagaaatggtttggagaaaagagaaacaacaggactccttccagtaaaacaggaaaatatattttacataggtatttgctgtgaggaggatttgaagggacaggaaatcactatcaaatacatgtgaactgccaagtttcattttgacttttctgctcctacctgcctctcactttaaaaaataagtgcttgcttacccatgtttaggcaatagaaaaaataaaataaaaaaaaataaatgctgtatcaattagatagatgtcggtaacccagttttctgaatcctgacatcccagaatgtaagaatttgtcattctaataagtctgttctgcctcaacttgtaaatcagcttaattcaattctaagtgaaatctctcgtttttcattatgtctgacacaagcttagtaattctcagaaaatagtccttgtgaaatgaagctcagctggaaattctgatattcgatgatgcttacactaacaactgtcattcttggcaatggcttcattattcagtgacacagttaagagccttgttttacttttattcaaaaatgtctttgtctttctctgcttgttccagcaacagttttcctggagttttggaaaagacggcgagcagtaattgcttatgactgggatttgatagactgggaagaagaggaggtttgtatcatttacctcagaatgttgtaaaaagcaaatcacccagaaccacacgacccccccccaaaattgtcactctctgttctgtgacggaagtcaggtgtactcataaagcattttcaattgccttttcagaaaatttcaagcagtataaaaatggactgacaatttttgtaaatttttgattccttagtggaatcaaatcccttgattaagtggagaattccacttgtaggtagaggcaccagaagaattggtggtgtagctttttttttccattttcttaaaaatcatccttttttctctaacttcagcagaaaaagagcattcatttgacatctccaggtacatggaagcaatccttccaagagaattacccaaaggcagtgtgtctgtgagcagcacccaggaccgtgcccaggtgtgcacaggctctgaagtatgacatcaagtgttccgtgctggggacaatccactctgaagcggccaccttgggagacgtggttaaatggagggccagctctagacaaaactgccaaggagggccagactcagcccaccactgtcccttagcgtcttctaggccagtccgttgttctcctcctgacctgtcttgttctaatagtctcttcttgcccctattcctgtcggaagtctgaagtacccacactaggcgtggtcaccacggtcccctcttggaccctgcttcccttgacagttggtccaggcctcagccccactctcctccctctcgttcattatctcttacccctcctgagtctcatttcctcagagccttgctgtgccagtaaatcagataaaccactcatatgtgtaatagttttttgatcatggctattaatatgtgttttccttgaagggaacacatgtatatattttcatgtataaaaaagaatctttcagaaatatgaacgatgtgaattttagccctgtggtaggcttggtgggggaagtaattctgagaggtatttttgttgttgttgtttgtttccttcacactatgcctcctcaatggctgcctgttccccttctcccatgaacatgtttgggtagttttttggtttggtttggtttggttttgaatgtacttcaggtgtacaacaggaggttttgatacatgacactgagattttcagcaatccttgttctcctgataaggctttctttcatgtttttataaatattctccaggccaggtgcggttgctcacacctgtaatcccagcactttgggaggccaaggaaggggtaccacttcaggccaggaggaggatttgaggatagcttatagatggccatcttctccctgtgtcttcaggccaggagttcgagaccagcctggccaatatggtgaaaccccatcactactaaaaacacaaaaattagctgggtgtggtggcatgcagctgtgatcccagctacttgggaggctgaggcacaagaattgcttgaacccagaaggtggaggttgcagtgagccaagattgcaccactgcactccagcctgagtgacagagtgagaccctgtctcaaataaataatgtgtatatatattttttctaggttctagatatatatatatatatattatatatatatatatatacatacacatatacatatatataaatagattttcttcaagtggccaattttcaaacatatatatatatgtgtatatatatctagaacctagaaaaaaaatatacatatatatatgtatgtgagtgtgtgtatgtgtgtgtgtgtgtgtatacatatatattctaggtttgaagaagcttcccaggctgactatgacatctattggtagcagccggactgcattcagaaattcctcttgtgtggtgccattctgctgtttctggttatatgtgttcatgggaacagttcccagtgggatggaaaatattctttcctgggaatcaccttgggcaatttacttcacctttggactttaaaaatctctaatgaaaagaagtgggactaaattttccccttctatctgtaaagtgtggccctatttgagtaactttgactaaaccagtctacaatcattgttggcgtttgtggtgggcccctgatgtgggcacccttctggggaacgtatgtatcccttataagtgtggagccttctgtcttcccagcccctgataaaaagcgtggagtgctgaattgtcctctcactctgcatacctttgtacaggagcctacatacgtagccattcccagcttgggattccttgtggaaatgcctcacttctagcccatgatttctaccttattgtgcagaaaaacccagactcgctgcagaccttctggggcaacctcgcacattagtttgtcagggctgccataacaaagtaccacagactgggtggcttcaacaatagaaacttacatgctcacagttctggaggctagaagtccaagccaaggtgtcagcagggttggttctttctgagaaccatcagggaaggatctgttctaggcatcttttcttggcttatagatggccatcttctccctgtgtcttcacatcgtcttccccctgggtgtctctgtgtccaaatttcctcttcttataaagacaccagtcatattggagtagggtccaccctaatgacctcatttgaacttaattaccactataaaaaaaacctgtttccacatatggtcacattcagtactgcgggttaggacttcagcagatgaatttgggggaagcaagacacaatttggcctataacacccagcgatatggtttggctgtgtccccacccaaatctcatctttagttgtagctcccataatccccatgtgttgggggttggacctggtgggaggtaattgaatcatgggggtgggtttttcctgtgctgttctcatgatagtgaataagtctcttgagatctgatggttttataaaggggacatcccctgcacatggtctctcttgcctgccaccatgtaagatgtgtctttgctcctccttcaccttccaccatgactgtgaggcctccccagccatgtggaactgtccattaaccctctttttctttataacttacccattcttgggtatttcttcatagcagtatgaaaatggacagatacatccaggaacacagacctgtctccatgattggccttagttctcggatgactagctcaagggctcttgatgacacttatggcccaataaattgaaagtttcccaaagaagcagaagattctaggtctgctatgtttatctcctcaagtataactgcctaaaataaatgaaagacagagcctgctcctaatgtatctcctgctgatcttacccatgacctacccctgagggaagtccagccttgggctaattcagtggcaggagccaggctgagccatgtgaaggccatccttcatgctacatgggcaggctgctgccaaactgggctctctctccatgacctctcttctgtcagctcgttccttgctttctgccagtaccttcatccgaatcttgaccatttctgcctggattaactcaatctccatttcagcagagtttctgctcatttgccatcctctcccaacactctcaaacataatgcatgcttaattaacgggaaccacatcaggttcccttgctgattgccttttcctaatctcataattggtttttagtcagaagcttttcacattcaggaggctcagctaaatgaaataaaatctcagtttgatttagaattggaggaaccttgattttaactggttttgaaaggtgcttaccttgttttcaattaagaattaagaatatacctaaagtctattggttaaagatgaatgactcctataggaacttattaaaaagtagattcaccatgtttttagtgaactaaacctaaaaatgcaaaaaaaaattgctggagaaaactaagaattatattgtcattataacttacaaaatggattttgaacattttcctgtagagaagccttctttgtcctggtgtttcttatcactctctggtaataaaagtaaaagcttattagttgttccaaaccattaggacaggacagcttgtcccttttaaaataccattctcagggtggttttttcttcaaggttagttttataagataacagataaatgtaactgttagtccaaatttctttgcttttgatgatagtaaatcttgatcttcactctttagattttcttcaagtggccaattttcaaacatttaagcctgggcacccaaacccacttcattggttgactaattagtgtggcagctgttgactctgttttatggtggggtaaaatgatatttctttttttattgtgtgagcacctctttagtgcattaaaatgtgtctgcttgtcctttaggaagaaatacgaccccagtttgaagccaagtattccaagaaagagcggatgaatccaatttctggaaagccagaaccttatcaagcatttacagataaatgcagcagacttatcgtttctgcatctggaatattttttatggtttgaaacttttaaaaaaatatttgtttcataaaatacaaacctatagcataataacagtaatcatattgggcatttgcattgttctacaaaatatttttgcactttgttatttattcctcacagtaacttcgtctggtggtcagggatggtattgctatccccatattacagatagaacaactgagactccaacaggttatggggcttgcccgaggtcagccagtaggtagctaagagctgagaccctctaatctgatattctttcctcttgccatattctactgtgtgatgctgaaaggagtcaaaaatgtgagacaggatgtacagtagtgtttttcaaacttttcaccatgcccatacagtaagaaatatattctctgtcataaccccgaatatgccaagcaagtagatgtataaaacagtgtaagtaaaacagtgctcacctttataatatgcataagctctgattttgttttattatagtatatttttaatgacagattagcctcctaaaattaatttcctgactcactaatgatcatgtcagtttgaaaaacagacctcagtttttagcttttcctaaaaagcagtcttagtaattaactttaacactgttaattactgaacaaaacatatgcagatgtttctgaaatgtcattttagaacagtaaaggatgattaggatcctcctttccttttttcaaatgatgagtatataaatatatgcctagaccattagagtaggaaggacaagactatagcaaattcagacaggctactccctttttccagtgaagaaactggggagatgaagggctgggcagcttacccagactccttggctcagaccaagattcaaatccatgcctgtctacagatactgcttttaagcaactgtgtcatgctttgccttctatgtacatattcatatttattgtattgtttcttacaaagacccatagacatagattaagcttttcctgttctatggatggggaacttggaacacaggaggctggagctatggaaaggacaagcttgcccaaggtcacactgctgggtgatagctgagctagggctctaatctctcttctgactttgaatccagccagctgtccatcctacctcattgccatccttgtctgaatttcagcatagattttacctgtctcctgatcaacagcactacaattaagatctggacaggtttttgtttattttattgttattttggccagtctgagctaggacttgtacttgagcttttagaacatatctcccttaaaagtaagcagaaaataaattatgtgcaaaacaggaatacttttgtgaagaaaggaatctctaaatcagcagaggccttcctgaggcctggcttcaaggtctagcctttgataattaagtgggttaaggtctctaagacatgttaatattaggtaatcatctaatgaaagtcacaaaactttttggagtctcagatttgcattaaagtcagccctatgtgtctgtgggttctgcatttatgaattcaaccagccacagatggaaattttttttaaaaaaaggttagttgtagctgtactgaacatgtacagctacatgtcattatttcctaaacaatacagtataactatttacataacatttacattgtatcaggtattataagtaatctagagatgatttaaagtatataggaggttgtgtacaggttatatgcaaatactacactattttatagaatggacttgagcatctgtggattttggtatcatggtgttggggggtggttctgggccaatccgtcatgaggatactgagggacaactgcatttcatagagaaagaagatatgctgtattgttctcaaatgccatgaaatcttcagggaaacatgcttcagtctgtgtgaatatcagattaacaagatatgtacctatcacgtagttggttcactcaacagcaaataactgagcacttactatgcatctgtaattatgctaaggtgctgtagaaaccatgtgagcaaaaaagactccttccctgtccttatggagcttactttctagtaggggagcctgagaatagtcaaacagattgttagaaattataagtagtgtcctgaaaaagatgtaaccatatggtatggctaccacatgacaacacgaaaaacaaatagtctgggagtcatgaagaacttttattatgaagtggtgtttgagctgagaagtgaggaaggatgagtaggtgttaactaggctgtgtgtgtgtgtgtgtgtgtgtgtgtgtgtgtgtgtgtgtgtgttcggcaagagattgggtgggtaggtattacaggcaaaggaaatagtcttggcaattaagggtgcttagcccgtttgatgtaatgagagaagctgtggggaccccagagggaaggaagaatggtgcccaaaggggctagagagagggtcttgcaggctgcgtaagggttttgcttttatcctagaataataggaaactaataaacaattttaaaccgaagagtgacatgataggatttccatatgaatatttgtccatctgctcaatgtatattctgcattaaaaagtgttgtcccatagcttacacagattctcaactttcaagcgtgtagttcttttattttaattaaaaaaaatagaaaaaggcaagagaaagtattaaccacaatgaaaagtatgcatttgattgtgatctcttgagcagtactgccatggtgttacttccttttcccatcagaggatgttccaggaatgtgaatcctcttcctgtaacattccaccaagaggttcaccgggtgtcttgtcttcctgccagatctgcgtggtgattgctgccgtgttcgggatcgtcatttaccgggtggtgactgtcagcactttcgctgcctttaagtgggcgttaatcaggaataactctcaggttgcaaccacagggactgctgtgtgcatcaacttctgtatcattatgttgctgaatgtggtaagtgagctgcagtggctagccaaacggatcaaaatgtgtgggctgcaagtgacagttttcttctgttgctaaggggatctggcctcagagaggtgggccattcacatagcactgatgtcctggcagcgaagtgcctggcatgaagatgcacttgggtctgagtgcttaaaagtcttgattcaaatctagactccgggcttttctgcagtataagattgggcaaagcacataacctctctgaacattagttcccttatttatccaataagattatattgtgaaccccttaagtaaatttagagaaagaatttagaacactcagaacctgtgacacagcattgcaatgttggttcctgtttctttttgattatcaatgataggaagatagacagtatccaaagcattcctggctaggtacaggggctcatgcctataataccagcattttgggatgctgaggccagaggatcgcttgagcccaggagttcaagaccagcctaggtaacatagtgggaccttgtctctacaaaaaaaaaaaaaattaattagctggtcatggtggtgtgcccctgtagtcccagctgctttgtggggctgaggtgggaaggtcacttggttcaggaaagtgaaggcttcagtgagcagtgacagggccactgcactcagcctgggtgacagagggagaccctgtctcaaaaaaacacaaaaacaaacaaaaaccaaagcattccttgatataaccctgcaaggaaaccgccaagctggtacatattgcttttgttgatttccaggctttttcagatagcatatttcagcccagatttctttcctgaatccccaaactcacacgttaaactgcctgcttgaccatctccacctaacactttcaaacccaactcctcatcttccctccagaatcagctcctcccacagccttcctaattgtacttgcccagactaaaagtcgtggcattctactggactcctctatttctctggctgtctaaatgtatccagaatttgatcactttctgcacatcccgaagtcccaccctggtccaagtctgcagtgtctcttgccgagattattgcagcagcttcctaactggtctcccagctttcacattgctcccttcaatctaggctcaacatggaagccagagagagcttcttacatgtaagtcagttcacatggctcctgtgttcacaaggtgtagtggctttcctctctctcacagtaaaagcctgcgaggccacatctacacagtggcctcacgggctttcgctcatctggtctgtgtgacatctctgacctcatcttttcttttactcactgtgattcacctgctccagccgcacttgtccttttgatgctctcaccccaggactttttttatttgctgttctctctgcctggagccttttcctcccacagggtctgcatcgcttagtccctcacctccttccagtctttgttcaaatgtcacttctctagtaaatgcttccctggtcactctgttttaaattgcagcccactcctgctatctgacaatttcccatctgcttgcctgtgttttttctatagcatttatcaccatctaatatgctatatattttacttatttattttgtttatctgccatttcttttggaatgtaggcccataagggcagaagcttttctttattttgtttgtttgtttatttttttttcactgttgttattccctagtgtctggaacagggcctggcacatagtagatgctgtgtaaattgttgttgctattttttgtagaacaaaagtagtgcctgacatggtcggctgctgaggtcaacctatacataaaaatatggccaggcactgtggctcatgcctgtaatcccagcaccccatctctacaaacaaaatttttttttaattagccaggtggcacacctgtagtctcagctacttgggaggctgagatagggggatcacttgagcctaggagttcacgactgcagtgagtcatgattgcaccactgaaccctagcctgggtaacagagcaaggacctgtaaaaaattaaaaaaattttaaaagctgaccttaaaggtttgtagtgtaaataagtaaaacaatgtacatagagtgccaaggacagttgttaggcatggagtagatgttcaattaattatagttcccctatccttatttatactgcgtcttaaatctgggccataatgctgaaatgcttacatctttgaaaaaagattttccaaaggccaactaatttaatactattatccatacaggtttatctatgtagcttatcatttctagttctttaaacaatcctgagttccataaccaataaaacttgagtgattcctaagagaattcaacctacccaataacaaagaacttaatttatgatcactaggttaactagtaatcaatgagctaattaaatgcaggtagctcattattagtattaaaatacataaaacatctttattattttaggaaaaaagtttcaagactcagaagtaataaaaaaaaaagggcagttgctgatcattttgacgtgatgtttgtgcgacagcttagcaagtggagattgaaagtagatggttagcacttcctgtacctcccccttttgaccccccaccaggactcggtctgtgttaactgtggaatacacattgtaggtagagagtgattcctagtgaaattaaccaaacagccataggtgaaatgttttgcatcccattaggatgcaatgaattaatgcctactatattgttatcatctatttcctccaatgtcttaaaatttaatttatacatcttcttaacaaataaatgcctgtgtggcatgggcaaaggcttcatgactaaaacaccaaaagcaatggcaacaaaagccaaaattgacaaatgggatctaattaaactgaagagcttctgcacagcaaaagaaactatcatcagagtgaacaggcaacctacagaatgggagaaaatttttacaatctacccatctgacaaggggctaatatccagaatctacaaagaacttaaataaatttacaagaaaaaaacaaacaaccccatcaaaaagtgagcaaaggatatgaacagacacttctcaaaagaagacatttatgcagccaacagacacatgaaaaaatgctcaccatcactggccatcagagaaatgcaaatcaaaaccacaatgagataccatctcacaccagttagaatggtgatccttaaaaagtcaggaaacaacaggtgctggagaggaggtggagaaataggaaagcttttacactgttgatgggactgtaaactagttcaaccattgtggaagacagtgtggcgattcctcaaggatctagaactagaaataccatttggcccagccatcccattactgggcatatacccaaaggattataaatcatgctgctataaagacacatgcacacatatgtttattgcagcactattcacaatagcaaagacttggaaccaacccaaatctccatcaatggtagactgcattaagaaaatgtggcacatatacaccaaggaatactatgcagccataaaaaaggatgagttcatgtcctttatagggacatggatgaagctggaaaccatcattctgagcaaactatcgcaaggacagaaaaccaaacaccgcatgttctcactcataggtgggaattgaacaataagaacacatggacacagggtggggaacatcacacaccagggcctgccgggggtgtgggtgaggcgggagggatagcattaggagatatacctaatgtaaatgacgagttaacgggtgcagcacaccaacatggcacatgtatatatatgtagcaaacctgcacattgtgcacatgtaccctagaacttaaattaaaaaaaaagaaagaaagaaatgcctatgtacaggaagtgaatctgtaaatacacacttgcccatatgtttcgagcaggtgccagtgttgtcagagtaaaacacttcatttaactggaaatcattgatccagcaatatctatttcaagacacagcctagataagaggaagtaaacaaattcaaaatgaagacgggagcatagggagtggcaaaagtacgtagttgctgatgttacaaagcacctgctatatgctgggagctaggctgctaggcattttacatcttttgtctcccagagtgttttagactagccaacatggatgaggtagagttcacactcgaaagctaacacatattattcttagggatgcccttgtggtttttcatttattttagatataacatgaacatctttggtactctgattttcagccaacatcaaactagaataacataaggttgctaacgcaagaatactgatgagaacagggaatgacaagccatagcaaagagagggaaagaaaagaaaaaatgtacataagaactctaaaagcagcatcaaccaggacctctttgtgcaggggccagttatcttaccctcctcagctatctgtgatgatgtctcatccccgcacacacatttacactcctgtcccctgaggttttgtgggtaccattatgagggcaaccaaatgtgtaatatagttggaatggtttcatcagaacatcttaaaaaaattttaagtcgtttctatcagcataagggatgacagactaaaggttgtaatatagctttgaccagttcagaagtaaactctccagtggcttctgaaattactcaatgtgagatattatcgtgacccaatatagattttttacagctgtctattgttttcaactacttaacatattgaccatacttttcttccaaaggtaatcattatttagacattaattattaataatttttatcaactaaatataaaaaccttgagagctagattaaagactctgattttttaataattattataaatcacatatcccatttctgactttttgctagatttgtccagtgctaactaaaataactaaaatatttttatatagtatttactttaaaatttatattatttttacaaaagccctctaggtcctaatgaaatattatgcctcttaatggctggttaaggggcacttagtagttcacattttattccgtgtcttgaaaaataaatatttcaaagatagagtgaatagaagtgaataggatggaatttcttgttcccgatcatattgtctcaattctgttctgcttcactagtgaccgaaaaacatcccaatatggtggttgcaagccaaataggccaacaaaggctatatcccaggaatagactaaaaagttattatcatcctttttatccagccatgccaatctgaatcagatatttaattatactataaacacatctcatcttccaaaaaaaaaaaagtaaaagtacaccagataatatagcttgcatcagagcaagtccacatttattgatcagcctggcaagataaaagtagaagtacacacagcttccttttggacatatctgtaagatcagaaagctttctgccggttacagatattcacaatgagaatttgcagcatccagtttggaaacttagattttccactgctcttagcagaacaaacttcccgtggtttatctctcaaccgtctaatgagaaatcagacatttttccagaaaccactcatgtggagatctctgagcggctgtgagtccctctgtgtgtgtgcccttccctcctgcatcctgtccaatgtctcacagtccatatccttatatgtatatccttcagcatatatatgaagtagtcacagatgccatggatccctactgtgtccctgtatgctttaccttatttttcacaaggttaatattactcatatgttgactcttatgttgttcctttttttaaaattacaatgttttcagtgttcacacccatgtaacaaaggcatatcctcagctccgagggccttttagacaagtgtgcaaagtgaggtactgtgacctacacatcattgtgaaagacataaaagataaaccagttaatcaagaattgtatttttgagaaaggttgtctcatcagtcaaattaattttccctgataattacataattaaataattgtaatgttataatgccttcgtaatacattgtaatattaaaatatatttgattagaacatctgttcttatctgttgtttactaggattttgtttttatgatcaaatgggtatgactaacctatgtcacaaggtttcttatggaaaatgacaccaatctccattaccactggactccaagagtctgagatttctagacataagatttgttcctatgccatattaatatatcctaatatagcaaaccataattgttgctgaaagtttggagtcatacatacagattatgttgtttatttctgtaattagcagaaatctcagataagagaattcaaaaattaagcaggacaggaaggtcagtaagttcaatacccatcctgcccacatataaagaaaaggatggtctgaagaagagataaggaacttgccaaagtcctgtagcttgctggatggtcaagctgtaattccagcctgggcaattttaaccagtgtgtttttactactttcatctaaatgtgttcttaatcttcatattgttccagtctattaaactacttttccttttcattttcacttaccgtcttttgttttagaaacagcacttgatgtttcaattatacccactctggggaatttcctagagctggatttaccctagactatactctctgctccttggtacacacacgcacacacaaacacacatacacacatgcatacatgtaccccaccctcagaaccatctattgaccagatggctgggtgagttaaggatgcgtgagttaaggaggcatcgggtccaccaatggaaaagtggagtaccataagctctgggaatttccagtaatgtttaatcacttcagtgcttttgaatgctgtaatctagagtttacagcagtccataaagaataggattgcaggatcttaccatcagaagcgggcttagagattttacgttcaagatgcagaggttcagcaatattatgactacccagcactgcctagaaagctggtaatgaatagcagctagccttgttgccataaaattattcgccccaaaataagaagtgagattttataaatagttagataggaccttgtacatttctttcttgccctgaaaattacgctaatctccattaccaatggactccaagagtctgagatttctatacacaatgttttcattggttgagcaatggatgcttaatgaaattattttgactcgtgatttgactccctatttcctttgtgattatagattttataatacgtgcagttcatttattaaatgcatgaaatttattttacagctctatgaaaaagttgccctgcttctgacgaatttaggtgagtggaatcctttctatttcatagaactgtactgtgggctagagagtatggttcaaagattcctttctctaatactgctggaaagaaatagtccctttattttaaaattcatacaacaagttttttctttgccttcaacagaataatttaaatatgtctagtaatttttctatataaatctttaaaatctgtcacaaacattatctgtcatgagctaatgtaatttaaggtagattttctcttcatgcacaaaaaatagcattacaaaagtacatttgtataaagtatccagtataatttaggaaagtgttcatttgctattgcctataatttttgtttaattaaaaatgtatcaagtttttatggtatataaactcacagcaaagttagtttctttgaagactggaaggccaggcatggtggctcacatctgtaatcccagcactttgggaagctttggcaggaggattccttgagtccaggagttcaagaccagcctggataaaataacaagaccctgtctctacaaaaaaattaaaaaattagccaggcatggtggcatgtacctgtagtctcagctactccagaggctgaggcaggaggattgcctgagcccaggaggtcaaggctgcagtgagtcatgatcatgccactgcactccagaacaatctggtaaccagtaataacttgtacatttatcacattttcaaaataaagaaattgtcccaattttattaacaaggtattggtcattgtgctccatgcagtttgagaaaattacatgctcccgtccacaacttgctttaatgcattccataagaagcttgtccagaggagaaaaaactcacaaaagtgttcctatttttattcatcattctgacaacagatagcatttactgaaactttctatgagctggatacagagctaggcactttaccttatctcttttaatgtcattgaaatcttccatcaccaccagttcttgcccaaaaagatagaagaggtttatgtccatggaagaggtaactgcccattggtagacaatgtaccctgtggtagcttgatccaggctagcagaaatgccattggaggtacagtcctggtccatccacggtggggacacctgggaacctagctggtgaccaggagacctttccatgtaaccaggagttcagtagcagaagtgaaaccctttaagaaaaccctttaagaatcctgtgtctttttggccctccgcaacagtatggccttgtcctaaaactgacattttaaaccattttaaatcagatttactttcattctcccttcccttctcagacatgctccctaaaagcattttgagttataatttgtggaaatgaattgattaaatgaagtattaaatgagaaatcagacactcagggaatgtggaagcagacaaaatgctactgtattaaatacatttcattagacattgcttgctcatagaatgtagctcctgtgaaaggataaattcattcgacatgagatctctagctggagatttgatcttaagggcaaatggatccatgttttggttcacaccattatgtccagagaacatttgctttatggaagttgaaatatatggagatgagattggcccctgactgaggtcaggaaattataagacacagatggtgatatgaattaaaacctctaaagatgatgccacctccttgatatttgtccatgagaatggaaaatgggggataagggtaaaagcaaatgagtcaaatgctcttagccttctatgataggcatttgactccctcttaagcagtaggttggtataatatgagaactagaagttgagaccaaggaactctttggagctgggaggaactaagcctgcatagattaagaggaaaagaaaaggctactgcagagagccacgactgggaatgaggcctcgacagcctggctgtctatgctgctggctctccaggtatcctgtaagagtggaacagtctaggtattcaattctatcagattcttccatagccacttctcatgagacccttgttgggtctggtctgtgagcttgaggatcctatgagtggtctgttccaccacacgccatccgtgggtaaactggagtctcctgcagcctcctcaggactcctgcgtccccaccctgtgtgtgtggggagggaaagagagggagttgagaggggatgagattcagcctttcaaactctgctcaccttttgtccacagaacagcctcgcacagagtctgagtgggagaacagcttcaccctgaaaatgtttctttttcagtttgtcaatctgaacagctccacattttacatcgcattcttcctcggaaggtaagaacctgacccctgcacacctccccaagctgaggacagaacacttagaaggcactgactcgtggggacagagaagccctcccttagggtgatttatacaaagtgtaaaaagggaagagcatcctcctcccttctcttcccaaatctcaaaaccacctggcatcccagggaaatcatctccactcaaaactgtctgtgcaccttttgttgctaagataagcagaggaaaatagtttgtgcatgtgagtgatgcattgaaaacttctggcctctgtctgcacctgaatcaggcccctggctttcccacctatgacggcaggtggtacaacggggagggggctgtagcatgtcctggattcctgacttcacttaaaagggaaggacatcctgacaggaaagggggcaaaaatgggatacagaggatgctgggtaacttttaaatccagcagttatgaggatttgggaaagattccctgggtagtggtaatgtcgcatgaattcccttacatctggaggcatttcagaggagatgggaacctgggaaggaccaggtatagggttttggtgagatcaacacagcagtctctccttcatttctagctattccagcagcacaaaattctaggcaaatagttcaataatttttttaacagcatgactattactcagaaaaatcaaatgtgtttaaatccaggagtaaaacttctgcttacacaggtcagagcaattgatatgcagcagaaaatgttgaaagtccacagcaagcagcaagaactggcttctgctttaggcagcctgacagaaaggccagaagagacatgtgccctggagaattccagaagctatggttatgacagatctggagggtttcctaattcccccagacctactacttatagtagcagtcattcacattggagaatgtgctaaactaaatgtaatattcgctgaaagcttggacctagagcactaatggcttgtttttctctgtgtgttgaagatttacaggacacccaggtgcctacttgaggctgataaacaggtggagactagaagaggtctgtattctcccatcattccttgtttccgacagacttgcattaaacagccttagggcaactttgtgtagattataaaccagacaccctttcttcctctccattgattctggaatttctgtgtttgcttaccttgcagtgccaccctagtggatgccttattgatctgtgtatgcaaatgggtattataatggtgctaaagcagacctggaataatttcatggaacttggctacccgtaagtaccttagtatcaataattgagaggcagcattgctcattattggcttttctaggtgtggcaagtaagataagcaatgcagactcagcagttaagccagtgcgtgcacctggaactaagtgctcacatttagacatccaaaggcagccatgaaaatcataaacattggctcttctgggagatttagcacaattcacatgaacaaacgtgaatattctttaaggagactctttaggcccctaaatattggatacttgcttgtgagccactttaaatacctctgacctttcgggctccagcattgcaagtccttagctatgtatgacacattaactacatctccactctcccatcctcatggtaaggctggtgataagatgttgacaacaatgagcaaaaccttgcatcaacttggtaaggatgaccttgaattctgctgtgtttgctcagttatggtcagttaagttttaatggggacataaatcaacaatgcttctattctgctttaattccacacctattggtttccatgtcagctcaatgtctctgtagagacaaagaaaactcaaggtttcagggaggaccactcagccagaacgattagtgggaacttggttcacttcagaaaatcttttcttagctctctgtcagaaccaaagccagtaattttctgttcttagatttatttttagaaatcttgttccaagtatttgatgttttctataaaacttttaaaaaataaaacattaaacaaaaattatcagtgttgtattctactttaagatataaatcacaattaaaatgtcatagacatcaagagaattatattttatcttctgataataaggacatagagcaaaattgtaaagtaggcagtttgtctttgatgttcattcctttatttgcttcatttcccatgtgttttgttttttggcccttctactcctggatatccttcaactttttccttgtcctgtacagaacacagacctgcctccaatctgtcatttcctcaatgctttctcatattacaaaatgcactcctgaacactgctaagggttcctgtgctaaccttaccaatgccgggtgcattttactgggagtcagagtccctgtggagagctcatgccaaaagcaaacaagtccagttgtagaactgcaggtgtttgtgtgccaagagaggaagcattttgtgggtttgcagatctttaggcccctgatgtcagagtatacagctcagcacccatgtagcaagactgctcaagggtcctaaatcaagccacttaagccagatattcctcaagatatcttggtgttgcctttgtactggggtatccatttatagatattctcagtcctctattcaaccctcataggcaatgcccaacatgagacagtttcatgaatgattaaaacaagttcatcaatcattctgtttacttgcaaatataaatacttgaagtatagactccattgttattttcttcctaacctgaggctttatttctttgatagcctgtcctgaattttttcaaactattgtttctgtattcaaactctcctttttcttattacctaagtcatatgatcagttacattttttgtaagaaattgatctttttgcccaggttaattcagaattggtggactagaagaaaagtacgacaagaacatggacctgaaaggaaaataagtttcccacaatgggaaaaggactataaccttcagccgatgaatgcctatggactcttcgatgaatacttagaaatgagtatggaaatattctactttatcttattaattataaattttagatctccaggtatattcaactaaacatatacccgttatcatcaaggtcctcagtgcgtagggattcctaaggcaaacagagaggaaggcatgtcctgcttaaactgtgctacacttacatttaaggaatcagatttctctggaatcaaaccgaagctatttctcttagcacgtatctaagaccatgggctttggaagtaaattatctgggttcaaatcccagccctatcatttattaacggtgaaactttgggcaattacttaatctctctttgtctcagtttcctcatctctaaagtgggaataataataagaggaaccatttcataaagtctttgtgtggattaaatgagttaatgcatgaacatgacttagagcaatgcctagctcactatgtacttggtacatgttacttatatcattattattctcttattctttttgtcttctggagggaaaggcaaataaaatatcttagataaattaagtatgaatatattttctttcattattaaattgaatatgtatatatttcctttcattttaagctctaacataggagtggaaatgagggaagggctgggcaagaaccatttcttctaaaggtagcagttctttctggtcaaattagaaatttaaaggaatagtagaattgatgcttaatgtttcttaaattgcttatgttctaagtatctacttatgtctttagagtttcaattatagaatggaagaatgatataacctagggaagaaatcaatttggacattaaaaataaaacttaataaagagaattcattaagagaactaaccactttgagatccttaatggattcttctcccataaagaagacaatgaacaataatgttggtatattgagtgcttaaaaagaaccttttatgtggctagaatttggtagtgctccaaatcctgaagtatctttgcaacacaaaacaaatctcagaagtatcacaagcagactgatgagttctaactgctcacttctgttcttttgtttttgctattttcttaataacttccccactttgttatgtactttaaaatgtattcactgaagtataatagtggaaaagtgtatataagtgtagagaccaatgagtttttgcaaatttacacacaaatgtaaccaaatatatgtagatgagaggttggcaaactattgcctgcaggtcagattcagcccactgcctgtttttgtaaataaagttttattggaacacagcaactcccatttatttacatattatttgtggctgctttggcactgcaacagtagagttgggtagttgtgtcagaaagtggctggtctgcaaagccttctttatttctagaaaatgttgctacccagtgagctagatcaagaaatagaatattatcaatatcaaagaagacttctttgtcccctcttccatttataacaccctctctaaccactttcctgacttctaacaccatagattaactttacctttgttattctccatttaaatgtaattgtagagtacataccctttgtagttggcttgtttcattcaacatcatctttctaacattctcccattttgctacaggtagtagaacttcattttattgctgtatagtattcctagaatgtagaccaggagccaaattatgaaacaggagtttgtctttgacacccaccctcatctttccttagtcatgtgggtttttctgtttgtttgttttgttttgtttgcatttccactcccagatgagccccaactttgtcccctgctgccctgacacagcacacagacccctataccaccatcaatccctcaaccctccacatatcatgaaatgtactcctgagcactctaaataataatatgctaggtaactgcattttaacaaaagcaaagcctctgccaagcttgagtcaggaaaaaaaaaaaggcaaattcacttgtagaagtgaagacatcagtgagccaaaagatgagctattttgtgagtttgcagatcttctaggctcctgaataataatgtactgttattgaccaggcgtggtggctcacacctgtaatcctagcactttgggaggccaaggcaggtggatcacctgaggtcacgagttcaagaccagcctggccaatgtggtgaaacgccgtctgtactgaaagatacaaaaattagctgggcgcagtggcaggcgtgtgtaatcccagctacttgggaagctgaggcaggagaattgcctgaacctgggaggcagaggttgcagtgagccaagattgcaccattgcactccagcctgggagagagagcaaaactccgtctcaaaaaaaaaagaatgtactattatttatccatccattctactgctgatagacacttgtgttgtttccaaatttaggctcttataaataatacctttacggcatttttgtacatgtattttgattaacatacgtagatgtttttattaagaatttacataagagtggagttaggaggccatagatatgcatttgtttgtctttaataaacacttgaaaacagtcttcaaaactgggctgtgccagtttatactctggctaatagtagaacagttccagttattccacaaacttactaaaacttgcgttcgtattttagccatttgggttggtatgcagcagtatctcatcatgattttaacttgaaattttatgataactaataatgctgagcaccttttcatatgcttatagttatttggataaacttgtgaatttatattcaagcccatgttttttttgtgggtatctgtcttttccttagggatttgttatttatatattctggatatcaattatttgtcagatatatatgttgaaaattaaatatcacttctcagtggttggcttgacttctcattctaatggtgtgtttaaatgaaaagaaatttcagcttcattcttcttcaaaattgttgccatataagttttagaaccagatttctaatttctataaaaatcttactgaaatattagttgggattaaattgaactcctacatcaatttgaagatatttgatgtttccccagtccatgaaaatggtatacctttgcatttatttatgtctttttacatttttctcagcaatactttttgtagattttagtatataggttttgtaaaatttagattagagttgtttctaggcaccttaggaatctttgtgcaactgcaaatgatgtttttattgttttattttctaatgttttgttactaataatatacagaaatattgttgttttgtatgtttgcttatgcaaacttgctagcatctaatgtcaattagagttgcttatatattttttgagattttctaccatatatacataattgtatcatccacatataatgataactttacattttcctttttagtcattttatatatatatatatatatatatatatatatatatatatatatatatctttttgttcttgcctaaatgcactaagaccttttatataatgctggataaaattgatgatactggacatcattgtttctgacctgagggtgaaagtgttcaatatgttaccattaagtgtggtgctagctgtattgttttgtacatactttttattatttccttaaagaagttttcatatatccctaggttgctgagagttattatcatgactagtattacattatatcatgtcatttttctgaatctattgaaatgattatgtgattttttaaaaaattttactaatgtggtggatttcattgattattttttgttgttaaaaagttgttaaactaacctagcaaacttggaaaaaatgcccacttgggtcaccatgcatttttttaattactaagttcaatttgctgatattttgcttatgatatttatatatacattcatggaagatattatagtgtagtttttctttcttgtaacgtttcatttagatttgggtatcatttttatgatagccctttaaaatgattgggtaattatttttctcttaagcagtttacataagattactattatttctttcttacatacttggaagaatttacaatgaagtagcaggacttgaaattttcttcacaggaagaactttaattatagatttattttacttaatagatataggactatttcatttttttgtttcttctagcatctgttttcataagctgtgttttagtcatgtattttttcaagaaacttgttcatttcatctaaattttcaaacttagcagcgtaaaattgtttatatatctccttattaactttttatgtatctagggtgtatagtgatgccctttctttcacttataatttcatagtttgtgcttttctcccttttttaaaacagtaccttagaggtttattaatcttttcaaaagaaaaactaactttggtctttgttgatttttctctactacacatttgccttttggttcattcatttctgctcttatctttatttccctcctttacttcctttgggcttaatttcactttttttctcagcatctcaagatgctgattttcagattttctttttttctaatataggcattcagagctataatgttctctataaatactgctttggctgtatcccacaagtttttatatattgattttattagcaaaacattttccatttcccttgtaatttattttcgactatgcattttgaaggaatgcattagtatcaaaacatctaaagagttttgatatattgctctgtcattgattctaatttaattacactgttatcagagtatattctctacgttatttcaggcttttgataatatatatatgtgtgtgtgtgtgtgtgtgtgtatgtatgtgtgtatatatatatatatatatatatatatatatatatatatatataaataaaaagatttaccttatgctcctttataccatctatgttgatatatgtttcaagtatgttctgcatttagttgtttggtataatggtctacatttttatgtcaattaggcaagattggttaattgtgtttttcaaatcttctaagtccttgttaaatattgtgcctcttatctactagttacatacttgaaatccccaagtatgattgtggatttgtcttattctatttttagttcagtcaacttttgctttatgtattttgaaactgggttattatgtacatacaagttggattattctgacttactgttgaattggtgtttttatcattatgtaaagtaattattgaataatgcaacactttgaggatatgatgggcaggaggctgaagagctaaccttaaaacctttcaaagggcagaagtgagcctcttattgcctctcagagctaaggagatagggacccagcagtttctcaatcacagcaaaggaacaagaacaaatcaaaggtggagtaagctttacaaacactctatgccagcactagcccagcttaatctgtgaccagctttaagtgatttctcttatctgcctaacatcaccaggaggaattctttctttatggtagaaaagaacatcactgaaagcggagtatcacaaatttgttcctaaagaactagatagtaaataattttggctttttgagccaatggcaaaatcaaggctattttgtagacacttttacagccatttaaaatatagccatttaaaatgtaaaaactattcttagctcacagatggttaaaaaagaaaatcagatggttggtcaaatttggccacaggccatagtttgctgacccttgatctagagcctctacatgtgtggcatacaataaaaagattactaggtatgcaaaaaggcaagaaaatgtgactaataatcaagaggaaaaaggagacccaaagatgattcagaaattgggtttagcacacagagactttcaaatagctatgatttacgtataaaaatagaagaaaatactgacaaaaatgattgaaaaattaagacttttgaaagagaattaaaatctataaaataactctagaattgcaaaatataaatctggaattaagaactcatttgatatgtttaatagcagattgaggctgggtacggtggcccacgcctgtcatcccagcactttgggaggccaaggttggtggatcacctgaggtcaggagttcgagaccaacatggcgaaatcctgtctgtactaaaaatacaaaaattagcttggtggtgcgtgcctgtaatcctagctgctctggaggctgatgcagagaatcagttgaactgaggaagtggaggttgcagtgagctgagatcatgccactgcactccagcctgggcgacaagagcgaaactctgtctcaaaaaaaagaaaaagaaaaatgagcagattgacttagcgtaagacagtaaattagtgaacttgaagacaagtcaataaaaagaaaatccaaacaagcccagagaaaagaacagaaaaacagagcagaaaacataagaaacatgcaaaacagccaaaaaggctgaaatatttgtaagagaagtcctagaaagaattaaagaatgagaaaaagtgatatttgaagatgtaatgtctgagaaagggtaaattaaaaggaggtaaacttatatattagaatataaaacagttaaaagttgaactaggtctatatagatcaagataatatctcaaaattatcatgtgatatgaacagggcaaaaaaattgtaaataatgatattatgtaaagtttaggcacaaaaattatttacatgatatatgcactatgtataatttattgatatatggatattcatgtgtgtgtgtgtgtatatatatatatatatatataaatgaactggaaggatgcatgcaaaactcatgtcagcaattgtctctatgaagggagaggaaaccactcaagagcaaaaatagaggagaattcagttttatctatatagtatttattttatttataaaaagatattaagcaggtatgacaaaatgttaccaagagttaatactaactcttccatgggtatatggaagtttgttatatcattctttatgctttccaatatttaaaagttttttcccaaagaatttttaaaaattaatctacctctatgctacaagtctcttcccttgaaaaaaaaaagcagcagttaatgggcattaatcacttcaagaccaatatcatgtgggtcacctttgtgctatgtaaaaatgattggttggtttggttttaggccataatatttaactagataatgaaactcattaggtgtcagataaacaaaaactaccaatgaattaaacacattttctttttaaacttgcagttattttcattataaatataacctgaaagaactaaactctagttgctttttctgtccataacatccattactgttagtgattgtaagaattatctctgtcagttttatttctacctgataggttttctttgtgttctggccttcgttgtaattacatgtcagtcattgaaccagcattatttggtacctgacaagtccttcccatacacaaaacccctgtagtgagtatgtaggaaaaagaaacataaagaagttgctgtttctactttcatgaagctcactgcaaaaggggaaaaaggcaaaacgccgtaaaatcaagacaaagtaagttttatggtggtgagcagagttgtggcagctacagaggaggtagtagttaattacaattatgaaagactcaagagggtatatttgagtactcttgaaggtagaatgactacttcatcaaagtagtcatagcaacactgcatatatgctgtatccccataaaatcagaagactagtgtggccagagtagaggattgtttgggaaacctgttttctgtgtggggtgtatttggacatgaggcttggaagtttgcttggagtcaatttattgagatccttgaatggcatggtgaagtttcggatttattctgcagccagtgagaacctactgaaacattttgtgtagggagatgagtgatggggttgaaccaacattttaggcacactgacagcagaatgatagggaagggagctgaaagtttggaggcaaaaaagtcagttagaaaatcagagtctgaactcaagtggggacagtggagaggagggagaaatgagagacatttttgaagagtaattgtcaggactaggaggctaatggttctgaaggctaagctagcagagacctggtttttatgcaagttgattcagaagggaggaaacgagaagggacataaaaggataaatacgttcaaggatgaggttcagagattggtttggggagtgctgtttctgtagcattacagacaactggaaattccctgaaaagagtcagggttagcgatagagaattgagaacccttatcagagagataataatgaagtcataggagtagatggacttaccaaggaaagagagaaggcaggagaaaaataaaaccaaggttgaaacagaagggaacgcccacatctatttgtgggtaaagagccacctagcacaagcactaagtgtgaatgtgaccaaagacaggggacacctggaggtggcagtgtaaccaagatgaggtagatggactctgcagaactctggagctacaacgctgggattagagtcctttcttacttaacttgttttgggcaagttacctgacctctttgtgcgtcggtttccttacctgtaaaatgaggataatagtagtacccaccacctaaggttgtcatgaaaattaaatgagttagtgtatatgaagtaattagaacaatgcctgtttttacatagaaaatgctatatatgtgtagtcattgttttgttgttgttactttctaaaataaagtttgtaaatatattttttactatttttacagtcatatatgtatatatacatagtcattcaaacagccaaatactttttgtccatgatgcccagtaaattttatttttttattttccattatgatgactggttgttttgcatcagaaaccacctccttttgaaaaaatttttattttgcaagttgcaaaaagagtagtttctataccttacttttgctaatgttaacatcttacatatttattaaaacaagaaaagttaagaatacaatgctattgtctaatccacagaccttatttgaattttgcattttcccagtaataacttttttcttgttcacaatacttccaagatccagcattgcatttagatatgttgtctccttagtttcttttaatcaatgacaattcctcagtctgtctttgtttttcatgatcttgacatatttgcagagtatttgtcagtagttttggaaaagctccttcaattcaggtttgtctcgtgcgtttgcacaattgggttggggttattcatttttggcaagaataccacttaagtgatgttataccctcctcagtgcatcatatcggggtgtgtaacatcattatgtcttgttactggtgatatttactttgatcacttggttaaaattatgttttcggctgggcacggtgactcacacttgtaatcccagcattttgggaggccaaggcaggcggatcacaaggtcaggagtttgataccagcctggtcaacacagtgaaactctgtctctactaaaaatacaaacattagctggttgtgatggcgggcgcctgtaatcccagctactcaggaggctgaggcaggagaatcacttgaacccaggaggcggaggttgcagtgagccgagatcgtgctgctacactccagcctgggggacagagctagactctgtctcaaaaaaaaacaaaaaacaaaacaaacaaaaaagatgttttccaggttcctctgctaaaaagtttctgttttgtaattagtaaaagttatgtgaggagatactctgagaatctacaaatatcctagtttcttcaatacacttccccctactaattttagcattctttgatatttcttgcctacaaaaattattactgtgatgtttgactaatggtgattttttaattttcatagttcctcctatgttgattaattagaattctaccataaggaagagccaccccttatctcccatttatttatttaatcacttatttacgtaagtatatatttacatcagtctggacttagatacttagtctttgggtcataatcccatgctttcattattaatattctttcatacaaattgttccagatttggccgttaggggtgccttcaagtttgttctgtgtcctattggcatgtccccatcatttgttgagcatttccttcctttctggcatcacaagatgtcccaggcttctcttgtattgtccctaccgtagctctggaatcaaaccatcctccaaggaacactgattcctttggttagagaatgatatttaggaaacaagatctggatcctaggtgtgctcatagctcccaggattccgttgcttccaggcccaggaagtgcctctttttccagtctcctggccatctttctggaagagatatcccctgtgcgtctgtattgggaaaaatgggacttaagacaataacatattcagattatgatccctttgaaaatagtaatggaaaaccaatactctctgctctttttccttttttcttttctagttcttcagtttggattcacaactatctttgtggcagcttttcccctagcaccacttctggccttactgaataacataattgaaattcgacttgatgcttacaaatttgtcacacagtggaggagacctttagcttcaagggccaaagacataggtaagttggatttgggtatgtttttaaaaaacatattaaacatctggtggataaaattttaaaagccacaaactttagatttttaattatgttttccatttaatataattcacctaatttttgcaaagaataattatattagttttaaataatattagacaagaagtaaagctacctatttggaagtttataatttccagtgctagagaatttgtgcttaaatagagtctcaatttgattatttctatcttaagattctagaatctaaaatttagatttattatcacttatatcctttttaaaatagatcttccatttgcttaaccttgatttgttctttcctaaatgtttgcctgatttacatgaagtataatccagtttttctaacggcagagatgaactttggtctttgactagagatgctaagttgaatcagatgcagctcgcatgagagctgcctgagatcaaagactgtcttttattcatttctgcattcagtgcttagcacagagcaggcagtcacccagccaatatgtgtggaagagaattgcatgtggatgttattgttaatgacgtcttttaacctccacatgaaacaagcacacattctgtgagcacctaccctgggtcagtgtgttattggcagggcccacaaagatgaacagaagggaccaaatccatacccttaaggagctcccagtctggtggggcttgacattatgtgtgctgatcctatcagatggtattttggtgccttatcattaaccagaattctctgcctcatgtctgatcctgactattaagtcacaagcatatagacactcccatagaaactccctcaatgccaagttgtttgcacaaatctttcctcctggttgcaactgtcagtatttggaaagatgaagaaaggacccatgaaaaggacttttaaaaattaattccattttttcataattatcacctctgttttgtgtatggaactaacacaacacttctatttgaataggaatttggtatggaattcttgaaggcattggaattctctctgttatcacaaatgcatttgtcatagcgataacatctgactttatccctcgcttggtgtatgcttataagtatggaccttgtgcaggccaaggagaagctgggcaaaagtaagtttgctataaaaccactatacagtttctatttcctagccattttttgaggttggacactcagacagaagactgcactggagaatatggaatacatgcccagaaggagaggcctgtgataggggaggtggaattatgatttattataaataataataataacactgtcagccaaagaaaacatgtcctcatctaccaaagagttggaggacatacaagtcagacaggttttagatggaatccaatgtaagagtggcaattaatcattttccccacccctgacctctgcccactatgaatttagaaatgtgtgatatgctaatgtgtataccaaaacagtagcatatgatgtatatatagttatatcattttatgagtttgcaaaaggacagttacaatctgatttacattgtgtcattatgtgtaaactctgcagatcttacataggaaatacggaactaggtactgagtacccagtaggtcctcaataagtattcgtggaataagtaagtgaatgactttttcatgggtattgacctgaccaatgcctatattaccccaagcaagctgagtggactaaactccttgggaggatcaattctatggcattgcctcaatggtttgcaaagccagggcacgctatatatggtcagataaagataagtcaaaattataacatcccctagtttcattcctgtaccttggagaaagggcaagaagtcttaacatgctttaaaaatccctgtttggttaaagccaaaatagttaaactcttattatgggattttgatgtctataggtcagagtgaggtgtgtttggggatcacagggtcttcttaataacccagaaatcaccctacatgggctgctgtctacttatacaagcagccctggtttactagcctgagccagattgattcatcctctacagccattgtagctgatcgaccccaaggagttaagtgccaccaaagcaaatcaactgaactcatgcaaacctggcctgggtccaattcattatgaatcctacataaatgggctaaggtgtggatgattgaggaatgtcataaagctcacaatccagttatttgaaaaggcttctgtaaagttcttgactactataagcatgtggccatgacacactaattatctagcaacttttagtgagcataccatcccattttaagagaaatgtaaagacatgttattttgcccaggcatttctttctaattgcaactatcgttgacattctctgcttggcttagcctgaaaaagcttactttcactcaaaccactttcacatgtgtttttagttgattctcaaaacagccctgggagtgggatgtgcattataatcttcactttgaggagcaggaagagattaaaagaggttaagtccagaatcacaaggcatagtaactctgggagcccatgtgaaggtggagcctcgactcactctccatcccgcacctcacagcccttgaggctgtcccttaacagtaaaccccctggattttccgtcgtaatggtgtttcagttctttcccaaattcaaatatggtgaaatctatcttgttttagggggaaccaaaaacaaaatgggaacctttatgcacaattgatagtgaatcaaagatttagaattttaacaacctggtagatttaagacaatgtccacagtgattaaagtgtatctcatagcctccttgtatcaattttactgggctctttggagcttttcttttctttctttcttttttaacctttctctttgacttaggagccttctgccactttcaatttatggatctgccttttgttttctaatccattagtcatttttcatgttttcaagtagttaaatttatgtatgtttcttcatgaatcttattttctgcctcactggccactctattacttttcagattttttttatttttccaatttagaaatgctttagaaattattgaactcataagagtagcagaattgtcaaggtatagaaagtcataagcctttagggtagtacagtgattgctggctcatccctttcttatgtattaaaggattgaaaattataagtggtgagtggctttcacggtagaattctcacatttaaatgagtgtgtggtcttctcagaagttacatggaagagatatgcatcctaatccaaatggcactaccctgtagaagacattttctagatctttcttggaagtgcctacagaggccatctaccattcctttaagaaaactgactttatattcacaggaaacccttcgtctgttacttttttcttggtacttctcaattctccctgatcatcagtgtagcctcatctccctctgtctcattgagagctggtggtgggtcacagtgagggtatatagcattcctgccagtaaacccagtgatagacatgggctctctactacctgtgaccttcctgctataacaatgggtcagtgagttgacacttgcatgccactagctgaattttatacagcaaaatgtgataaatctcacttgcctgaattgatgacaactttcactatttgatattgacaatagctaacagtctacaaaaggtgaaaggaattagtgaaacgtctagctgtccgtgcatcttttcccccattatggaaatgatatggaaggaagatgtacacagctgataactgtgtgttcctgtactaggtacacatttaatgctttgcactcaggagtaaccaccctctaaagacacattttcaacttggatttatgactgtcattcatgcattaggtccatgaaacaggtgttttatttaaatttaaattttcttaatggagtttttgagcagaacaaccaatggacagtagcgttagtcttgataaagcctcggggctggtctgtgagataagagtgcaggaggggttatgaatattccatttcagtgctgggcctttttttttcaccagttcccagaacacctttcccttcccacagctcagatctctagaaagactctgctaaaacttactccctctctgtgacagctaatcatcctcaaggcactaatttattttcatgtccaggtctagacagttcctaggtaagggagacatcattccaaattaccctttcagtaggggagtcctgctgccagttggattaaggcatgttacacactccctgaccatttgttttcacccacgagtgacttgacaaatgggtccttcagcttggttcattttttttaaggccatgataaagccagtgatttgtcttgagcacgataacatgcagaacccatgtgttctcagaactgtgttcatgtcatcattttggtttagtgttcagcagcttggaataatcatgccagacttgttaatgaagagaatctgaagatcatgatttattcattcaatcagtaattacttattgaccccctgctagatgcaagaaataaataaaatgaataatcaccactcatgtttatcttacttataggctaagatcttatcacatgctatacattcattgtttaatataatcccctcaaggaccctatgaggtgggaacttctgtcactttaagaagttacgtaaatcgggtgtggtgacacatgcctgtagtcccagctattcaggagtctgaggtgggaggatcgtttgagcctgggaggtcaaagctgcagtgagccatgatcataccactgcactccagcaatgagcaacagagcaaggccctgtctcagaaaaaaaaagaagaagtaagaagttatataacgtgccaatattacatgactagaaaccagcagaactaagatttgaccccaaaacccaagcttttgtatgtaaaacactatttaaagaaaaatgtatacaggatgtatctaagtgctaatttcacccaaagtttcaaacattgttatttcagtaagtgcatgtgttaaccacaatgttcaatatgtaaaactgtttagagacttggagaaaagatgtttctaagagtgctacttgctatgatacttttaaaatgggctttttcttgaatggaattattgacagaatgattaaatcttgattttatctacccattcaatctagaatgatcaatagaatctcatactttagtttcctccaatcagatcgattcaatatttatgggattcctacactgcacaagactgtcctaagtcataggatacacaaatacctaagatacctgctctgctcccaaaaaattgcagtccaaaggagagggcatacatatatgctgccaactctagtacaagcgatctggtaatggtgaactaagtaagtatggtggcactacagagagagggaaaggagtgagatgttgtgactggagtgattaggttgtcttcctagtaggagtggtgtttcagttggccgctgaaggataaatactatttccacttgtaaaggaagaggtagggaattctaacagaaaagataacaagcagaggcatgaaaacatcagaagctttcagggaatatagtctaacaggactgtagcatgggatatgagttggggggatcatatgcacaccaatcatatttggaacattttgagaatatctataaatatatatgaaaccattaatgaggaactgtgtttatgtgtatcatcaacaaaagaagctgtggcttacatacaatttatgcccatcatgtaatgctgctttttacctatttcactgaaacattaattggggtagagatgttctatatgatgattctgcagaaaaaggatgagaaccaaaacaagcaacttgttcctgattcaacatgcccagggctttccagcgtatcccaacctgagtcctggttgacaaggaagggccagttaaaggcatttacaattgcagtgacgtctgggaagcagggtcttcagggaactggatacagagaaggtgatgagtgttctaatggtagaatgtgcctcctcttataggtgcatggttggctatgtgaatgccagcttgtctgtatttcgaatttctgactttgagaaccgatctgagcctgaatctgatggcagtgagttctcggggactcctcttaagtactgcaggtgagtgtggcacccagcgtggctctgcctgagctgggctggctccaccgtggggaggttttactctgaaggccccttctggctgagtgtgtttaaagcagtgactgtcaatctcaacagtgcattaaaagcacatgaagaattttcaagccttctcttgcccgggatacaacccaaaccaattaaaacagaatgtcagggagtggaactcagaaaccaggtgcagtcagaattgagaactgctagcttaaagggaaaaactaaaaatatagtagtgaaggttataccgctgctccagggactcagggacagacaatccccaggcgggttgagcgacagctgttgagggcacttgtctttgttctgcttctctctcttgcccagagtatatcacatcacatttctaaatgttaaacaactcagaagcctgtggaaagaggcccagttcatttcaggttccaccacagtagcctctgcaacatgtgctcattctctctttctttctctccctctaaaaggaaatgaattaaactgtgcctcttgatgtgtatctatacaaacgtacatgaaggagaatttgttgagcacctactctgtgccagaaactgttactccatttaatcgtcacatcagccttctaagttaggcaatattatctcatctgacaaatgataaaaccattcactaaaagctcaatgagattacttgtgcacagttcttgaagagtccagatggcacctttttctcttaatactttgacgttataagaattttgtgggctcacacctgtaatcccagcacttgaggaggccaagttgggaggatcacttaagtccaggcagtcaaggctgcagtgagctatgatagcaccactgcattcaaactatggagcaagaccttgtctcaaaaacaaaacaaagaattttggagattccctatcatgacattctatgttctccctgtaatcaaagccacaaggaagaacagccatggagtcctagatgctttgacatagggacttttgtaatgatccacttcagtccctcatcttacagaaggtgaaggtgagagaagccaggggctccccatttctgtgcagtgacagcataccctccacccctttaaacactcatgccaagttcccaggtctcattggctgtcacatctcatcagatggcttatttcctttcccacatggagtaacaagtaagatggggagaaagactggctggaatataatctagtgccgctctctgttggggtctagtggagaagcaagcaattaagcaacaattgatactttcttcagtagatttcccacttgcttgtccagaccatttcgtacatgaaattatttagcaagcattgttagacatatacaggatcctaagtatgaaatgcttcaaaataaaatgccaactattatttggagttaaaaactttgtaatcatttgaaaataagataaaaatacagagtctttctcctcttctgcttcctggctcataattcttcctgcctgtctcacatagtatcataaaagtatattccagaaattattaatgtgaatggaggtattaatgctggcaccattaagttaaattatgattgttttgtttagcatttttcttaaaagtcccccaaagaaaacattttaaaatttctaattaaaatcatgtaaaataatattttcaggtttgttttcagtcatatagcaggtgaggcacccagatcagcttgcgggctgaaaatatctaaacatgtagagaaaaatttaaaaacaccttctcaaatacattaatgacctgggaagaatatttggtattctaaggcagaaagaagtggtacacagagcattgcagccaacttttacccaaagggaatttgctgaagtgagtggactggagctttctttttatttatttatttatctttttatactttaagttctagagtacatgtgcacagcatgcaggtttgttacatatgtatacatgtgccatgttggtgtgctgcacccattaactcatcatttacattaggtatatctcctaatgctatccctcccccctccccccaccccacgacaggccccggtgtgtgatgttccccttcctgtgtccaagtgttctcattgttcagttcccacctatgaatgagaacatgcggtgtttggttttttgtccttgagatagtttgctgagaatgatggtttccagcttcatccatgtccctacaaaggacatgaactcatccttttttatggctgcatagtattccatggtgtatctgtgccacattttcttaatccagtctatcattgatggagctttctttttcaaagctttccatggttagggaaagtgaaagaaaatatagaggccaggtgcagtggctcaccctgtaatcccagcactttgggaggctgaggtgagtagatagcttaaggtcaagagtttgagaccagcctgggcaacatggtaaaaccctgtctctaccaaaaatacaaaaaaattagccaggcatttttgtgcacacctgtagtcccagctacttgggaggtaggagtatcacttgagtctgggaggcagagattgcagtgagccaagatcgcaccactgcactccagcctgggtgacagagcgagattctgtctcaacataaaagaaaagaaaatataggaatgaccagcctgtaagtgtatacttatatgctatataaaacaaccataatatagtcacactagagtctattatacagcaataaaaataaaccacatgcaataatgtgaatgaatcttagtgacataatagtaaaaaaagcaagccccagcaaactacatatagtatagtaccctttctataaagttcaaaaacaaactaaatagtacaatattcagacaaatgcatatacatataagttaaaaataaaaatgaaattcagggtaagggaagcaattgatgtaagttcctggtaatgttttagttcttgggcttcatagtggatttatgagagcttgttgtattattaaagtattactttaatggagtcacatggattaaagttctctgaatagtgcctggtccccaacaggtattcggcaaacatttgtggcattttatgccgactcaaaagtgatagctggaggatacattaggaaggactcttctagtggcaagtggcagaaatccagggtaaactgacttaaacaacaaaaaattgttcagttagctgggagagtcaaggggtgatatgagcttcagtaatggccggatcccaggcctcaagcagtgtcagcaggatgctgcctctctgctgtctctgctttgttttcttgacttccttctcaagcaggctctctctctccatacaaggccaccaggagtcccaggcttttgccttctgtgggcttagtgatcattcactaagtgatagttctggcagacatcttgatgatgtcactgatcaggtctggctcatcttttgagctgagatcaggcaggtggagggggaagtcctagtcaacccacacagatgattccccagagaagagatattattttatcagaagaaaaatgctggacaagcaaaacaacagatatctagtatagagaaacttcaaatttccctcctattgaatgaggactatataatgagaatggaagagatttgagaatcagaaaaatcatagtttgaatgcaacatttttctgtgtctttatagataccgggactaccgtgacccgcctcattcactggtgccctatggctacacactgcagttttggcatgtcctagctgctcgattagcttttatcattgtctttgaggtaagtttcctcagccaaattctttatttcctttgacataatgaagtcagtaggagtaatgaataaaaataagtgatggggattttgaatgtgattatctatatttccagaagtagtagtgtcatattatgtaacctctttttgatcttttttcttaattgaagtatttgatttttccaagacatatttgaaagtccatagttggtttttaatggacaaatctgaactcgttgctcctaaatgtaattttctggggccatagttcttaaactttagcaaaaatgcagtttttccatcctcactcccagatattctgacataccatgtctgtggcttgtttttcatgagctcgttgtaatgattctgactataggcattctgggaccataatttggaaacatttggaaaacatcagcccagtaagattcattctttttttctttttctttttcaacttttattttagatacagtgggtacatgtgcaagtttgttacaaagttacattgcatgatgttgaggtttggggtgcgactgaacccaccacccaggtagcgagcatagtattcaataggtagttattcagcccttgtcccctccccctctcccctctatagtagtccccagtgtctgttgttctcatctttatgtccatgtgtacccagtgtttagcttccactctaagtacgtacaataagaacttgcagtgtttagttttcagtttctacattatttcacttaagataatggcctccagctacatccatgttgctgcaaaggacatggtttcattcttttttatggccacatagtattccatggtgtatacataccacattttctctatctggtccaccattgatgggcacccaggttgattccatgtctttgctattgtgaatagtcctgtgattgacatatgagtacatgtgtctttttggtagaatgctttattttcttttgagtatatacccagaaatgggattgctgggttgaatggtagttaagccctttgttctttgagaaatctccagactacacagtagttggactaatttacctttccaccaacagtgtgcaggtgtccccttttctctgaagcctcgccagcatctgttaatttgtttactttttttttttttttttttttttttttaagactgattctctctctgtcgcccaggctggagtgcaatggcacaatctcggctcactgcaacctctgcctcccaggttcaagtaattctctgcctcagcctcctgagtaggtgggattacaggcacccgctaccacacctggctaatttttgtatttttagtggagacggggtttcactgtcttggccaggctggtcttaacctgacctcatgatccatccgccttggcctcccaaagtgctgggattacaggcgtgagccactgcacttggcctgactttctaataaaagccgtactgactggtgtgagatggtgtctcattgtggttttgatttgcatttctctaatttccttagagattctgagcattttttcatattattgttgtctgcttctatatcttcttttgagaagtatctgtttgtgtcctttgaccactttttaatggggttatttgttttttacatgttgatttgtttaagttccttacagattctgggtattagacctttattgggtgcatagtttgcaaatattttctcccattctgtacggtgtctgtttacttctttgacagtttctcttgctgtgcagaagctctttaattagatttgacttagcaatttttgtttttgttgcaattgcttttcaggacttcaccataaattctttgcccaggccagtattgagaagggtatttcctaggttttcttctagcatttttatagttgaggtcttacatgtaagtctttaattcatcttgagttaaattttgtttatgatgataggtagaagtccagtttcattcttctgcatatggatagccagttatctcagcaccatttattgaacaaggaatccttcccccactgcttgtttttgtcaagttggagattcactctttctaaatgtctccaattattgccatcatcattaccacacatattgaaatatactgattcatatagttaatttatgattttcaaatagttatcaggatttcccaacatgatcataagcattttccaataggactgggtattacaagtggtatttctggttgtgtatcatcacggaattatttatattcaagcatccaagtaagtatttattagctaagactcaaaatggaattataaagtaaaatctgtctagcaattgtctatattatatgtcaataaaaatatattatctattttctttcagggtttaagaaaattgctgtaaaaatagtttgcatttctatgactctagtcataagtggaaatttcatctcttgtcacatatattaaagccagattaataaaagccaaggttgcctctcggcttggatctaaagtttcctagacctcttcaagactattctatcactgctttttccttcagtccagggaaccaaaagaagaaaatattaagctgctcttccctggaaattatcttaccaatggcacactctctctttaaagaagatatttttaacccatcactgtcttaaaatttttcagacaaaacttcttgttgtttgtttgggatttttttattttaagttccagggtacatgtgcaggacatacaggtttgttacacaggtaaatgtgtgccacggtcatctgctgcacagatcaacccgtcacccaggtattaagctcagcatcccttagctattctttctgatgctctcccttcccccacccccacccccaacaggcccctttgtgtgttgtttcccaccatgtgtccatgtgttctcatcattcagctcccacttataagtgagaacatgtggtatttggttttctgttcctttgtcagtttgctgaggataacagcttccagttctgtccatgtccctgcaaaggacattatctcatccctttttatggttgcatagtatttcatggtgtatatgtaccacatttttttatccagcctatcattgatgggcatttgggttgattctatgcctttgctattgtgaatagtgctgcaatgaacatatgcatgcatgtatgtttataatagaatgatttatattcctttctaataagcgccatactgactggtatgagataatatttcattgtggttttgatttgcatttctctaatctccttagagattctgagcatcttttcatattatttttggctgcttgtatatcttcttttgagaggtatctgtttgtgtcctttgccatacaagttatagaattgctgggtaaaatggtatttctgcttgtaaatcactgaggaattgccacactgtcttccacaatggttgaactaatttatactcccaccaacagtgtaaaagtgttcctttttctctgaaaccttgccagcatctgttgtttctggacttttaaataatcaacattctgactggtgtaagatggtatctcattgtgatttttatttgcagttctttaattatcaataatgttgagctttttttcatatgtttgttggctgcatgaatgtcttcttttgaagaatgtctgtttatgtcttttgcccactttttaatggggttgcttggtattttttttgtagatgtgtttaagttccttgtagactctggatatcagacctttgttagatggatagattacaaaaatgttctcccattctataggttactgtttgctctgatgatagtttttttgtgctgtgcagaagtactttcatttaattagatcccatttgtcaattttttcttttgttgcaattgcttttggtgttttcatcatgaaatttttgcccatgcctacatcctgaatggcattgcctagattttcttctaggatttttatagtttggggctttacatttaagtctttaatccatcttgagttaatttttatataaggtgtaaggaaggggttcagtttcgattttctgcatatggctagccagttctcccaaaaccatttattaagtagggaatcctttcccccattgcttgtttttgtcaggtttttcaaagatcagatggttgtagatgtgtggtcttatatctgagatctctaatctgttccattggtctatgtgtctgtttttgtactagtaccatgctgttttggttactgtagccttttagtataatttgaagttgggtagtgtgatgcttccagctttgttctttttgcttagtcttgtcttggctatttggactcttttttggttccacatgaattttaaaagagtttcttctaattctgtgaagagtgtcaatggtagtttaatgggaatagcattgaatctataaattactttgggcagatggccgttttcacaatattgattctttctatccatgagcatggaacatttttccatctgcttgtgtcctttctgatttccttgagcagtggtctgtagttcttgaagaagtcattcacttttcttgttagctgtattcctaggtattttattcttttgcagcagttgtgaatgggagttcatccatgatttggctttctgcttgcctgttgttagtggttaggaatactaatgatttttgcacattgattttgtatcctgagactctgctgaagttgcttatcagcttaagaagcttttgggccaagatgatgggattttctagacacgggatcaggtcatctgcaaaaaaaagataatttgacttcctctcttcctatttgaataccctttatttatttctcttgcctgactgcctgggccagaacttccaatactgcgttgaaaaggagtggtaagagagggcatccttgtcttgtgccggtttttaaggggaatgcttattgagaatttttaacatgaagggatgttggattgttatcaaagaccttttctgcagctattgagataatcatgtggtttttgtctttagttctgcttatgtgatgaattacttatgcttatgtgatgtttactgatttgcatatgttgaaccaactttttatcccagggatgaagccaacttgatcatggtagataagctttttgatgtgctgctggatttggtttgccagtattgtattgaggctttttgcatcaatgttcatcggggatattggcctgaagtttttttgttgtctctctgccaggttttggtatcaggatgacactggcctcataaatgagttaaggaggagtccctcctttttaattttttggaatagtttccatagaaatggtatcagctcttcattgtacctctggtagaattctgctgtaaatctgtcagacaaaactttttaaaaggctgccttatttggcttttcaaatagaattttccattttcttttaatattttgttattaactatttgaaaatatgagaactatgcagaaaagcttcttaattttgtgccatccatgcatcaccaaatttatcaagttttaaataaaacgaagaatacttagcagtatcatttgaacatgatttagtctctatttaatactttagaattgtaatagcccttaaattgtcatctagtacttccttggtcaccattatatagatgagcagaagtgacagtgactctagaattccagctattagtatttcaagtaaagaatttgtgactgtttaccaaaaagaaaaaagcttcttcctgaaatgatcatttccctaggcccactgataattcttataaccaagatttgtaaagcacttgacagtctacaaggcatttttaaacattttctcataattctcacaatactcactttatagatgaggggaatgaggctcagataaattaaataattcatcctcaggtagacagacagcccttaagcagtgaaagctaccagcttcaacctgggttttctgactccacagaatacattcttctggctctcctttgaattaattatctgaccattcttttcccaccttccttccagactcctctttctattccttaggtggtgccatcagaccagttcaggcctcacctgtcctatcatcttgcattacacacgcctcccctggtcactttgcactctccacataccccagagggtccacatccttcttcagccaactctctaacctcattcaggatgcacagtagacctgacgctgttacattctcctctgttttagcacctcgtgttttgtataaagcacctcatttcatatctgatcccagacctcccaaaagacctaagggatcgaatgagaagagagaagtacttgattcaggagatgatgtatgaagcagaactggaacgtctccagaaggaacgaaaggagaggaagaagaatggaaaagcacaccacaacgagtggccgtgaccatgtaggtgagaggtgtgctcagcgtctgaggccattccgaggttgaatgggtgctttaaactccctgaagcaaagcttaccattgttgcagtaacagggatcaaaataaactccttagaagcttcccaatccaaaagaagcttgttttttactttaatcgttgcaaattttgcttgatcttcccctcccacataccttctgcaacacttctctgccttcttgccagactctggcctatcagtcaaggtcttcatgaattggcctaggagttccctgaaacaaagcgtcctctctcttttcctccagccgggctgttttctttaatatccccagggaaacatgccccttctttctaggtgggtgggaggcagacattagcaaagagaattcttcctgaaagcctcagcggccagagaccaaggtgcaacagggctgtcctgggctgcaggaccagtaactgatgaagaatttcttctggccccaccactactggctgctttcttcccaaaaaggccatttctaatttttgcttgaaagcatagtatctgcctgcctgtttctatttccccaatagttggcaggatgtgatgttgctttagactgcccttctgactcagtctgttcacccataaagcaagcataaaaatgtttataccatccctgactccatttggggttacaaattctttgaatgcctttggtgcatggtaagtacaaactattgcacctcatgttttaaagcaattgtgtatgcataagatctttatgccttcttttctctttccagaaaatagtccctttccaggccaaggacctgaattctgtttacttcttctggctgtgcaaaagcacactcaagtgaatgactaaaaatgcaaccacagtgcatgttgcagataccggcggccgcaggaggggcagcatccagtagaggactggcgttggagtcacactgctgtgaaatcacgttgcagtccagcgcacaattgctatctatccatagaccattcttgaccaagcaagcatgcacattatgggcagttacattctcaagtttttaaaatcaaggggaacttgtatactgggcctgtttttcagcctgtttgctaccttttttgcattctatcccatgtgaattttacagacactgggctaaaaagggtattcagacacatggacacacattcctagaatgtcatcatatggtcctaattccatgtcaccaacaacacagacaagaccctgtttacaactttttctttccttttttttaattttagacctttctgagaagattattatatatgacatatctatagctatgtgtatggccatagatgtatttctgtgtgtacatatgtatagtcatgtattcctgcatatgtacatacaaatacagagatatataaagtacatagaaattccttacttgtaaatagccaaaaagtactgacatgagtgaattttcacatttaaatagtcatcaatatgaagccatgattaatgcttgtataatgtgatgcaataaaatttaaaataaatttctgcacatgg

SEQ ID NO: 15415 - DNA, 107086 bp, Homo sapiens
actgatgttctctccggcagttccttccactctaaagagactccttttcatccctcttctcgcctttcctagcccagcctagtgcccaccctcccccgaccatgcctcccctgcacctggggagggggaggaccagtcctgggcgtgatgctctgagacggtggtgaaatccaccaggctgctttcactccggctcgctctccggagagtcctgttccagacttctcagggtttttacagcacaaacaactgcatacggcccgaggggaggctgaaaaggacttgtgtgtggtggttttattgcctgtcatcactttgctggcctcctcccgactggagcctggaggttcacagtggatttctttctgccgaagacaccaaggcactgaggaaggatcccttctccttctgttgactctttctatttttatggtaagtgcttacgttgaatgagctgctctgttgctgcagtgaactgaaccgttcgttccccctcttcccagctaagcttagtgaccttccttctgcatttcctctgttttcatggatcttgtctgggatgatccagcttcaaaaatgccaggggtcatttgcctggagtgtttgtctttttatcttttttccataaacgtgagctcttctgctgtgatacgaatataagtgctctgtctttgtccttgaagcagcagccggggaaatgtgttcacgatggtaaactgcagcagcgtgcagggaatctgtggaggatgactgacaaatttgggcaggatgaatcctcagtgtgccaggggcactcactcaggatcagaagggccgggggtgacctgcccacatagcaaactcttccatctttgtggataaagatgagcacacacgtgtgagttatgttgagtctgctgtgggcagctgtgttttctgcacctgcccgtgtgggtctgggatgaccctatatcttgtggggtttacaacttgggcaggaacattctcagcaggaggaatcctgagctggcagacggagtagactgcatgacctcattgcttctttcccttctgagtctcagggtacccagttctgcaaaccatattttacaggctcttcagagagtggtagggcagtgatgacaggaacatttttgagttgacaacatagttttgtcctcctgctaggagataaaatactttgaggttattagaatggttagacttttctaggagaacataagcaggtttctgacgaagactatggatgtggcagattgtttattccagggacattactcttacaatagtgctctaatttttcacctggtctcctgaggtttgctgcaaagagcatcacaacttcaagtctattactggcagcttcttgacgcccaaaggaaaccaagaacattttattagtttcactcctgtgcgttgcaggagtctctcttaacagggattttttttttttttttttggtagcaggtgtgtcgaactattttggtcaaagcatcattccaaagaatagcttcgcagttgtaattctatttagttattttcaagtcttggaccggaggtgggttatcttatttgtgtaggtttttccattctggtccatttcactctagagagggttcttgccaaatgtaattcagtctctgattcataaggtactgaactaatacaatgtgattttttgtgataagtgaggggagagaatgtggggtgaaatttccagtctctcctcctgctctttgggagtttggaatgtaaagttccctaactgcttgctcattttcactacttttatgtcccctgttcatgtggatttttcttgaaatagtggtgatgacatcagacatatgcctttaccttcttctctgggtccaaagtagatgcgtttgttgttgttctgtttttgtttgttttttatttcagtgaagggttccttgcatttgtaaaagcatacgtttaaataaaaaacaagaatttgtagatgtttacatgttagccctgttcaagagtaaaaccagcacagaggttaacagcaaaaaaaaaaaaaattcaaaacaatttttaaaatattatcagcattgcttggcttagctgttctaatatccactcttccctacactcgattgtggttcgcggcaatactgtattgtaatttgactgtcagactgctctgcttcctctttaattctttaatgtttagctgtttactttcatccttaatggtgtgttcttactttgcttaatctttttttctctttttctaattgaaaggatgttatatagtgcctggtaactcaactgaggatactcattaagatggaaagtgttagaatcagcttgggtgtcatggaaatagactcagtatttctcactgcaggcaatttcagaatcatttagaacatatttcattttaattagtagcaactttagccttgagaaaaaacattatttaggtttcctttattttgctaaacagattgtgtacctatgcaatcagaattgtatatatatgtgcaattgtttatatatatgtgtgtgtatatatatatatatacacacatatacaagcgtgtacacaaatgtactgttgtttgtactgtgtcaattgtatatacttaaaaaattgttgtagcatgcccatttggagaacagaaggaaaattcctcagatattgctttaactggcttttttttttttttggtaaggatttccccacttcctagaccccacttccagataatgcctttaagaatttctttgaattgggagagtgcatttttcagcatttccttgtctcacagcatggtgtcatgttaattcctttgcagggtctctgaaagcagcatagaaaactactgcaggaaaaattgataaaagctgtgctgagcggagcctgtagcctcttggtgtgatgaagtcactgcaacattttgtgtgtatttattttgctgctatgccttgcaactgattttgcttgcagacttagcaaattgaagttatttaaaatgggtctggaaacacctagattggtgtagatgcagttgatgcagttattctttttttttttacactctttaattacaactatcatcaaaactgtgctttcactgtttcttttggtggtggtttaatttgaaacttgcagcttaaattataaaccaagtctcccttttaaagtcctcttgccttctgctttctctcttcttcacttttgccattttatatatgtgaacatgcctacatgtacacagacaaactcagacagtgaaaaatgtacaacaattaatgaagagatgattacagcttttcttttagtaaccaaactccaaatgttgaaaccataatcatgtaactgagggaagaaattgtttctgttagtataaatataacctcatacttctgcaggcattcttatcattgaaactgttttccatagttgattaccaggaccagaaatagaattgattttgcattttaattaatgacattctggatctgtctaggttggactgccctcaaaccttgatatgtttactgtctaaaaggtctttgtgttaagagggggagtttatgggtgttataaagtaaaatcatttgattatgtgatacagcttttctttggtaactgaatgaaccatatcattagaatgttggctgaatttttatgttgcttttcccaatattatttagccaatataatcccttttaccatctctttgagccccttttacagagtacaaagagttatgtgcgactcccacatgaggcttcttagagggaagactgttcttcagcagagattcagaactacttctagcaccagctctggtaatctacttggaaaggaacttgcaattcaattggcaactcaggcagattgtataaaataggagaaatgcttcatgagctgtgttgaatactgtatttttgatctgtgcctccctactaaattcatttaggactgtctttactagatcagttttgcagggaaaaaaacatgtcctcagtagcataataatctatccagactgtcataaatgtttatattgcaagttatacttcttaggagttggagggagatggcagaattttggaggagaaccaaatcacagccccaaaataatgcaagacgaaaggggaacattcttcctatgtttagcatttaattctccagtcaggctgtttgctcttaagtctgaagagcgaagaaatgtaaaaacacataatgacaggttttgtgggctttttctctaatagaaatctttaacccttaattaggcatctgctgactgaccttttggtgtgtgtgagccagcagccattcttatagaaagcagacataatgtaatacagtaggaattcagttacttacatctttcctgttggtcccccacaggggacctcctctgagtgtcagagagggagtgagtgtctggagaccatcagagaccacagccagtcacagagagatatcttcaagccccttggattccagttcagcccccaccactaactggctgtgtgactcaaattctgtatctgctacatgaagcttggaccagataatcccagaggactgtaacccagccattaaaaattgtgaagtattaattcacttctatttgctactagatgaacgattatttctaagacaattgacccatattagacattcctggagggagtaggctgtaacttcctttgaccctgcaaagcccccagaactgtgacagtgacgtgagcatcagtgttactcagaaaagtgtgatcatggtacccttcatgaacagggcgaatatgtatatgatgactatctgcttatcctggcacattttggaaagtctcttgtgattatcaaaaaggaccttggccaggggcggtggcccatgcctgtaaatcccagcactttggtaggccgaggtgggcagatcatgaggtcaagagatcgagaccatcctggccaacatggtgaaactccatcttacgaaaaatacaaaaattagctgggcatggtggggcgcgcctgtaatcccagctactcaggaggctgaggtaagagaatcacttgaacccaggaggcggaggttgcagtgagccgagattgcgccattgcactccagcctggcaacagagcaagactccgtctcaaaaaaaaccaaaaggaaccttaaagagcaatttacctaatcctctcattccacagaagttaaggaagtgatatgacttccccaaggctggagactcacatagcacctgggccggatgactttagtgtaaggtgcattcatttactcagaaccctgctccattcccagtgtggggccccttccatgatacacagctgacactgtgccattcattgttcacaaatctgctttgtggcatctgtctcactggtgtccattatttctgggttcatttcatgcagattacgtggctgtaccagtcagagtgagtcatatcaagcaaatgtttatggtaatttgtttatgcttgtgtggaaatgcatttttatgttgaaattctgcttttcctataaacatttaaagaattttacaaaaactatgcatagtttttcccctttgcttaaactatttaaatgatcattgatttctatgtagagggggtgatgtttgtgaattaattccttcaccattcactcatttacctgttacttactgagcacctattgtgtccaccctactgccaagcagcagagatctagtggtgagacagccagacacatccactcctcttgaggagttcagagtctacttatacttcatggagttggttgtcttttcattgtcagccagtgttctatttactgattcacaatttctcaaagaatctggttgaaaaatagtttgcttgggcagatttttttccctgtggttattccattgagaaattcttttcgtagaagggcacctttgctgtcgtggtgacatatatcttccaattttcgaagatattatttttagcttctgattttgtgacctgactgaacagaagagacaaattagctaaacttatttgcactattgttgtgattcatgaaatgacaattcgtgtctttgataaaacttacctgtttcctagaatcttaaactgacagcctggatagcacagtgtccatggaacaaatcacagattaaataccacactcctttgccttgcatatcaggcccataacagtgtacagcccttgcttccttgttctatgtctggttccgaagttccatggaatgctctaggagtaccaaaaccatttgcaatactcagaaatttacagtgctctcacttgcctcagtgcctttgcacatgctatttcctcttctctcttcagactaaactttcaaagcaaatttgatgtcatctcccttggaagtgttttgacacttgccatccttattgacttcttttgcccagagctgagctaggtatactatctctgttgttctgtatccctcaggaccttacagactgtttgtctacttgtctctctctctctctctctctctctctctctcaaacagactttttgtttcttgagggcagggactatatgttctgtacctcaaatcttggtttagtgactgctgtagagcagataaccaataatccttgaacaaacagatgggaatcaccatctaaaacctatggtgctgtcattggcagcttctgctctatgtggagagtttaatttttcaaaccaatgtgactatgaattatactgagaaggataaagagattggcagacatcctgatgtagttcattagaaattctattcaaaaccccaggaaatgtttctgctttcaaatgagtttcagcaaagtaaacaatgaaaatttattaagtgccttctataagcaaagcattgcattaagtaccaaggaatgaaagatttttttttttttttaaaagcacaattcctatcctccagaaagccacaaactagtgagggtttgtcccatgtgtcaatgactggtaatgaggctgactgctataaacagagactgtagtcagctgtatacttgcagataaggcagggggtagaaagggcattctagacagaggggctggcttgagaaggaacttaaagttatgatggtcgtgccagcaatcaggtgactttgatggagcaggggctggggggtggggtggagggaaggtggaaaatgcaaggaaagatgaggaacgttgtgtggggagatgggaatggtatcaggaactctaaatgctgtttattatttttgaaagttggaggatagttaatagggtctggaaaatgccaaatagaaatttgtttggaatctcttctcaggtttaattaaatcaaaagtctgtattctgcagggaaggagagcagttgcgcagtacataactgcataacacgtttttttctcacccatcccttttgcccttgagggtacactttgccattcaaagtcatcacaaggaagtgaagccgggaagtctaacttaaatcaatcagtttagacctgaagggagtttagcattgagatcactgaggtgcctgttaacaaactgtccagggtgtggaaaaccccctgggtctttggtgctgtatttctactgtaaaaatttagttatttttttatttgacaattaactttgtgctatttacaaggaatacagttgttttatgaaccagtgagatatgcatgtgtaagtttgtttcatgtaggtgaaaaagtggcttggaaaattctgtctgtgatagattcaattcatcatcaaaatatgatttctgcttgccttgtccctcctttctttttcctaaaagaatgagtgaacatattcttagggaatggtaagttggtaggttttctgcatctcataattagatctgaccagatgactctccaccttgaaattagtctaaaaagattgaagaatttggaggaagatctctagatatcttgaccagagcatgaaagcaaataaatattgcttgtggagtgagagatgatgtggtagaaaagaagctgcattcattcattcatttattcattcatttgctcactccacaagtacttaatcgagcacgtactatgtttcagcttcctgccttcatggagctaacattctggtcagagtgggagggggagacagaaaaacacattagcaaatacgaagcaagtcagatggtgatcagtgctatggagggaaaaaaaatgaagaatgctttggctgctattatcttcacatttggttctctttaaagttatttaacttatgcattatggttaggttattttcttctctccactcattgtttttagctgcctatttttatattcactttctgacaattctatgataaaccaccatcttgagggtttttttcctcctagataaaagcagcttttgaaataattggagtactgtgaacaaaagttataatgaagcatttacttctggaattgatttaaagaaaagtactacggacatcaaagcccattagtatttttctcaagactaaagttgtcagaatttagaggaacatgggatggaaatggatctgtccctcacttaactctgagaggagcagtttggggtgttctgagaggatgggagcttggagtatagggaactccaaccccgggagcagagaaatggtgggatcacccatgagcagagctcattcagagaagagacgggagtgaattagaaagtgaacatgcaaaaattgagcaaggaatttctctttgggaggaagggaggtagggaggataaaaccagtgagataaatgtcagtgaataaacaacatttacaagaacaaattctgcccaatatagaacatctgagtgagctggttagtggaaatggtgcctcgagataaaaaacaatatttagggatttcccaatattcccatcctatattttgtgggatctttaattcagcatcaatgttccattttactgcaagcaagcctttagtcaatactttctaccttgcttctaaaataattaggatttaaaggaaaatgtctcctagcggtggagtgcctgggctctggggcagacattgtacccatccttactctgccacttactcacctttggaccttgggcaagtgagctggtctccttgtgcatcattgtcctcaattataaaaatgagattaactaattacccctacctcagagttgttatgagtgataaatgaaatagtccatggagagcccttagcacagtgcctgcaagatgattgcattatctaacaattgttaacctgttattaccatgacttgtctctctggtgttagtggtttagagaagttctcacatgtatatatgtattttcccccttagcagagctttttttttttcttcttcaacttttaagttctgcggtaatgtgcaggatgtgcaggtttgttacataggtaaacgtgtgccagggtggtttgctgcccagatcaacccaccacctgggtattaagcccagcatccattagctattcttcctgatactttccctgcccacactgacaggccccagtgtgtgttgttccccacagtgtgtccatgttttctcatcattgagctcccacttataagtgagaacacatggtgtttggttttctgttcctgtgttagtttgctgaggataatggcttccagctccattcatgtccttgagaaggacatgatcttgttcctttttatggctgcatagcattccatggtatatatatacgacatttcctttagccagtctatctttgatgggcatttaggttggttccatgtctttgctattgtgaacagtgctgcagtgaacaaatgcatgcatgtatctttataataaaatgatttatatttctttgggtatatacccggtaatgggattggtgggtcaaatggtatttctggttctaggtctctgaggaattgctacagtgtcttctgcaatggctgaagtaatttacactcccaccaacaatgtaaaagcagtccattttctccacaactttgacagcatctgtcgtttcttgactttttagtaatcacccttctgactggcgtgagatggtatttcattgtggttttgatttgcatttatctaatgatcagcgatgctgagtttttttcatgtttattggccgcatgtatgtcttcttttgagaagtatctgttcatgtcctttgcccactttttaatggagtggtttgtttctttttcttgtaaatttgtttaagttccttgtagactctggagatcagacctttgtcagatggatagattgaaaaaattttctcccattctgtaggttgtctgtttgctctgatgatagtttattttgctcctcagaagttatttagtttaattagatcccatttgtccgtttttgctttcattacaattgctgttggcattttcatgtgaagtctttgcccatgcctgtgtcctgaatggtattgcctaggttttcttctagggtttttatagttgggttttgcatttaagtctttaacctatcttgagttaatttttgtataagatgtaaagaaggagtccattttctattttatgcatatggctagccagttctcccagcaccatttattaaataggacattctttccccattgctagtgtttgtcaggttttttcaaagatcaggtggttgtaggggtgtggtcttatttctgagttctctattctgttccattggtctgtgtgtctgtttttgtaccagtaccatgctgttttggttactgtagccttgtagtatagtttgaagtccggtagtgtgatgtctccagctttattctttttgcttaggattgtcttggctatttgggttcttttttggttccatatgaatttaaaaaatagttttttctaattttgtgaagaatgtcaatggtagtttaatggtaatagtattgaatccgtaaattactttgggcagtattgccattttcatgatactggttcttcctatccatgagcatgagcattgattatacctatccatttgtttgtgtcctctcttatttccttgagcagtggcttgtagttctccttgaagtggtccttcacttcccttgctagctctattcctaggtattttattctctttgtagcaatcactttcttcttcctgtttgtgattaatgattttagggtaaatctttttggagggatctcactttttttttattcagtctcttagatagttattataatttggaatttacttagattttaagtctgtatcatagaacctaaacagtggaattggaggaccatgtggccacaaggtccctgggaggaggacccactagtcacagtaagtgatgttgtggcaggaaaagagaagagtagagtggatgagaaaaggagcaacctaacagcaaatatgatcaatgttctttttctctgttgccattcgggaggatttagggatgaaggctccttaggtggtgtgtagtgtagacaggctacagcttgcagtttcctggagggaatagccaggagagtgtgatttgtataaacaggggcaggtggctaaggaagtatagttaggtgccagtaagtttgtaggaaagaattctaaaagtggaatgcctggttcacagggtatgtgagtttaaaaattctgatggctcttactgaatcaccattaacagaagtgcgccagtttatactcccatcagcaatgaatgagaatgcctgtttcctcacacctatgcccactagcaagcattttgatctttgctaatctgctgggtgaaaagtagcatcttatagtttaatttgagcatcttttcatgtgtttactttgtattttcttcttctatgagctaactctttgttcatgccctttgcaggcccactttcaactattgagttttgattttgatttttaggaggttttttttttgtttcgttttttttttttttttttttttttttttttttttttgtgagacagagtctcgctctgtcacccaggctggagtgccgtggcgtgatctcggctcactgcaacctccgcctcctgggttcaagcaattctcctgcctcagcctcctgagtagctgagattacaggtgcccaccaccatgcccagctaatttttgtatttttagtagagacggggtttcaccatgttggtcaggctggtctcgaactgctgacctcttatctgcctgccttggcctcccaaagtgctgggattacaggtgtaagccactgcgctgtccaggagctctttatatactagaaaaattcacatttccttatgattttttttaccaagtgtttctgcttattttgttatttgtctttgatattgtttatggtatttgaggcataataaatttttatataaagttgtcacatgtttcttttgtactttctgggttttgtgtaataatcagaaaagcctaacccactctgaaaagtcatgcttctacaatttccttttgtatttttatgtaaataaaatcatacttatttgattcataattattttggattagtaatgaaatagaaattccattttattttcccccaacaactacctagttctctccaaacatttcaggcacgatgtgtcttttccttgctggctaggtggtgattcttgagaaagatgatttttacttgggccaaggcaggggtgacatggaagggtatcatcatctatgaaatccccttatgtagttagaactatttttggagagtctgctccattttcttgacttccagtttgttgcagttccacactgtgttaatcactctagttttatgaattttaatatatgatatggctagcctcacccctattacccttttgttccaggattttttttgatcttcctacatgtttatttttctgaataaactttagaaattgtctcattctaaaaaacaatcatgttttggagaaagggttaaattaaatttatagcttaatctagggagagtgttttttaacttttaagctcaggggtacaagtgtgggtttgttgcataggtaaacgtgtgccagggtggtttgtgacacagatcaacctatcacctgggtattaagcccagcatttattagctattcttcctgatgctttccctccgcccctgacaggccccagtgtgtgttgttcctcatagtgtgtccatgagttctcatcattcagctcccacttataagtgagaacacatgatgtttggttttctgttcctgcattagtttgctgaggataatggcttccagctccatccatgtccatccatgtccctgcaaaggacatgatcttgttcctttttatggctgcataatattccacggtatatatgtaccacatcttctttagccagtctgtcattgataagcatttaggttgatttcatatctttactattgtgaatagtgatgcagtgaacattcacatgcatgtatctttatggtagaatgatttatattcctctgggtatatacccagtaataggattgctgggttgaatggtatttctgtctttaggtctttgaggaatcgccacactgacttccataatgtctgaactaattgacactcccatcaacagtgtataagcgttcctttttctccacaacctcaccagtatcctttattttttgacttcttaataatagccattctgactggtgtgagatggtgtctcatttgatttgcatttatctaatgatcaatgatgtcaagctttttttcatattatcgttgccacatgtatatcttttgaaaagtgtctgttcatgccctttgcccactttttaatgggggtgttttacttgtaatttgtttaagtttcttacagaagctagatatagacccttgccagatgtatagtttgcaaaaatttgggagaattttttatgatactgacccaacctgtcgtcacacagggtatatgttcccatttattcagatcttcttttatgaatctccttagttaatgttttaagatattcttcctatatattttggcacgtattttttaaaacattatttgacatggtttataagtatttgtttagtcttcacatatttgcagaggtattgaggagtgaaaaaggaatggaagtgtttctttgacaccgtaaaatagattacctggggaaaaatattgaaactttgcataagtaaatgtaattgattcattttttcttttatctcttctgaccctatatttcgaattgttgatctaactataaaaacgtatttgttttaaatttgcaattgaatttagtaagtgtttttcacacccacaaattcaaagcaccaattgctgagattcttttgcaaagtgttccatatcattgtcttatattaattcattgactattaattaattagcttagtaagcacttaatgaacacttactatagaccaaatgttagaaatatgaagactaataagacatgatccctttcattgaaagatttgctgtttactcagagatggaatgaaatgatgaaaacaaagaattataataatataaggtaatgtgctttacactctgggaggccaaggtgggtggatctggatcacttgagaccaggagttccagacccacctggccaacatggcaaaaccccatctctactaaagatacaagaattagccagatgtggtggcatgcacctgtaatcccagctgctctggaggctgagggaggagaattgcttgaacccaggaggctgagattgcagtcagcagagatcgccccactgcactccaacctgggcgacagagcaagattctgtctcaaaaaaaaaaaaaagggtaatgtgctttcatgaaaatatgtgcaaggcagagttggaacatggagtgggagagcctcaagctgtcctggggcaatcaaagaaggctttactgagcaaccagcatctgaactgagaccattcggatgagttgctgccaggtgggcagatcaggggaggcttctccagacagagaaactagcaagtgcaaaggcactggggcatgaatcagttacaagttattcagtctatggggcttaggagattaggcttagccagtaggcagctgccagatctcaaaggctttatatgacatgcgcaagaggttgtgctatattctgtaggcactggagcaaattgtgagcaagaaaaggtcagattgtagactacataactctggtagccatatggagagcaaagtagaagggtatgggtataaaatcaggaatacaagtatggagattataacagtgggcccagttagagactgttttctcttaaactaggacagtgacattaggaatgacagagagcccctatggaagatttattcattcaacaatcatttattagaatcacctgtatgctaggctctgtgctggatgctaggcatgcagcagtgtgccagacagatatgctccccactcccaaagccatcccattcaaatgggaagagcctgataaggtgatatgtaagttgatatgttaagcagtggtatatgatgaagcagaatgcagcaggatgaaagggaaagggaacatggttaggagtatgctgatcaggatagtcctctgggcaaggtgatgtttgatcaggacatgagctggggagggagggagggtatgagccagggaaatggtgtccaagcacagggaaatggtatccaaaagagaaatggtgtccaagcagagggaacagccagtgcagaggccctgagaaggaactgtgcttggcatggttaaggaataatgaggaggccaaaagggctagagcagagtggtggaggaggtggcttaagtatttagattttatccagaatgagatggggagccagggcattatttttcatacggcagtagcatgatttgactggcagcctttaagaggatctcacctgctgctgtgtggagaatagagggagtcagggtgtaagtaggtcagttacaaggctggtgcagaggtccagaaagggaggtgatgatggaccaggatagtgattctggaggtggtgagaggtggtagaactatggatctgtcttgaacttggtactagaaggatacaggaaagtgtgcataggaagtaaaatgggcaagtgtagattagataactgctaagtgtagattagataactgctaagtgtagacatacaatattttaaagggagatgagggaagtatagccagggagggtcactttagcaagagcagtccatatggtcaataggtcaatatgatgagtacactatcatgaactcttgcaggctaaacttttattatttgtatacttatgagccacactggattgtgtgacatgactaaatagagaattcctgaaattgcctctgggaggatgtattaaatagggtcaatcagaagtacgtaaatggtgtctactcttgagcaataaaatttatagaagccacatctaaatttagctttaagcaatttcggagcctgagaattttcaggaaatagtaatcaaagccctgataatacaagaaattgacatcctttttggactgacatgggagaggaataatttgggcggtcacagaaacggactcatagatcatagatcttgggaatgtggggtcaatgaattaaatatggctgaaaattataaattacctcacatatccaattgcttttagctaaaatcaagagaaagggctttctaaagccgagatactttttttccattagcaaagggttataagatgttctggagacttgagtcaggctagttcccttatctttggaagatattcttgagtgatgcagtgctatcagtttcaaataagtatatttttgtaaatcaggtgatgttatataatgaaactgacatttgtaaaagttttttatggctcccagccaggtgccccttttgtcagaccctgacttttgaaggattttgggctgcttataaggattcagagttcccctgcaaaattgatgttggaaaccatacccacagtctgcgccagtcactgtggactggatacatttccacagtgtgagatgaaatcagaactgaatgagagtggccactgttctcttggccatacctgaccaaaggttctagtttgatgcagattattattctttagttaactgtacagtaaaccatgcacagtcctcattgtaattaggtgggttcattctttcttaattttacctgctgttgtcgtcatgagtcacaaagttgaataactcttcagttattattgtagccagagtgatggataagatagactcccctaaaccatggtagtcgatataaagcttttcttctcttgcccccatagttagcactaactggcccctgttttgtataaccttatacagacttatgtcatagtgctaatgatataccacatgtgtgtacacatatgcacatacctactcacatatacacatgcacacacatatatgtgtacacacacacacacgcgtaattcctcttctctccccccacagactgtagtaggcactttgaatcatgaatcgttcttattttccttttaactattaacacttagctcagcatctggcataaagtaggagctcaaaacatggttgtcgattgaaatctagaactgggttttgcattttcttgttattgctttgttgttgttctgttgattaagtaattctatacctagtttaggtttgaattgctttagagaccctgatgatggtgccttgtgttcttggccacttgattttatgtgacagtcttcagcatattcataactccaagctttacaaaacaggcaatattttatagggaagtagctctgttgcctttctggatgtagaggcagcatgagattataggataaaactccaatatgtttgtatttatgtatatatatattaccttattcatacataataatgtgtatacatacataataatatgaagtaaaagtaggtcagaagtaaagaagaggtgggaacaaaatgaaagcaggaatacaattaaattgcatgtcagaatgacttacatgtaagatacagaggccacctttaaaggctttaagctttcaatcagccagagggaaaagaacaggcttatgggggtaaagataaaccatttgctcaggttgattttaaccatactcttagcaccaacatcagataagaatttctcccaggagtccctatgaagagtacattgtgtttcgttatgaaaatcatcaagctttgcaaggctgattctcataagacaattttgtgttaatagcattgcctcaaggcaaaattttgtaaaagcagtcggcaaggttctgtttaggaatcagttctctgctggtcagtttgactcagggatatgaaaagtgggtggactacttgtctttaagcaatctttcctgtgtattgtttatctcaaataaagctttgaaaattgttttttaacattgaacttgaagtggcactattctccagcaagtaagggcctacagtgtagctactattctgtgtagctagttaaggagagacctggcgtcctagcagtgtcaaatgaaagctggtattagcatccatatgaggaagctgacttgcctagcaaagacatttacctgaatagcaggttgccctccttatttccaggggaagcatgggagaaccaagcagctcagccaggattatgcatagaaaattgtttggacccacgttattgctcagacaaatgggtgatcctctccaagggctttaaataggtccttttggggcagggaacccaaacacttagcaaagtacagaaggtttgaagggaatgaattcccagagtctggattggatgctcagtctcatttctcaccttcccgtttacaatccctctttttccattttagcaaagcaaggcatccttcttatccatctcagatcttactatagtgcattgtgcaggggtgtaaaaacagcctgggcaccaaacagagcagcaattggaaatatttctttgcagagaagtatggtagtgtgaacaataaaagactttccaatataaacatatgctacattgggataaaactctgtggggaagtgggctggatatgagttaaaggagaaaaactagcgatgtaaattttccaactgataaaaaggagcttgagcttggtcagatatcttaaaaatggttgaatgtgggatatgacagttgtgttttaaaacctcaatgtttatgtatgccataaattatattctttgtaatcctataagcttatgatgaagtcaacttaaaacttcactgagttggggcagatcttcagaaggggatacatagctttttgttttgttttgttttgaatctttgggccatgcgtgagcaaacatgtttgaagaccactcatctactgcatgtaatatggctctcaatcagtcctctagctcttgcatcgacctcaagtgttaggtcagcctctagctgtaactcccctccctgttcttaccactactttatatttactttaatataagtctaacagattgcatccatgattcctctaccaaataggaagatctttaattctcgaaaacggtatactatatactctgtagtttccaggaatttttttgtggtgccttatgtaaaggcaaactttaaaaaaattattgagatataatttacatatcatataattcacccatttcaagtatagaattcaataagttatagtaagtttaccaagttgtgaagtcatcatcataaatcagttttagaacatttttgtcaccccaatacgatttatcatgcccatttacgtgaatgttcctatgtttttctaatatttaaggggctacaagttcatatgacaacatgcgtagagagcagtaaggatggaggaaaacaagaggggcagggccagaattttatcatttatggaagcatgagtgctagcatcttctatttttatttttaaaaaaccactctgatgttcttctagtccttatatgtttttattgatacaaatataaccacatgttaaggcaggactctgtctatctcagttttggctaagatcccaatggccaagaatactagattaggttcccccatatcagttacctatttagaacatacaaaacattgtatgggagttagttattgtctgctccataatatgtatgaggttgatgttggggccctggtgaatgtgagggtgggagaagggtactccatcttcacttcaaaccaagtgagaggaatccttattgaacttgacattatctcctgatgggagtttggggacatgaggttcacctgaacctgtggaaggctgtgatgagagctgccgctaagaacaaagtgggagagggggctgcagggagatggccgcaagttggtgggacgaagatgtgtgagattttatcatggatcaggtggatgctctgggatcattttaactttggaatgcactcaagagggatgcctggagggaatgggggagaaacagagagagagagagggcatgagcaagtgcataagtgatggtggggggaatggttatcagttacctaactattctggatacgtaagaatgtagtgcttagagattagacagaaaaatgaaccatttgccatttgaccatctgggagacattattgtatggtctttaaatctgataaacctgaatttaaatctctccctgaccctcagcaagttactgtatttttctgagctttcagagttgtcatggccagtatttgtcgtaatgatataatcattgactttgacaagtcctggaacttgcctttcaaagtatttttgatatttgacactgattgatgagtagataaatatgaatattctgtatagacaacatctatgatctagctagagatctaaaagtcattgttaggtaccataagcgtgtaacatataacattcaatattttgcaaaatccatggtatttcatttactatactgccatttactttcttatttggattacgtaggtgataaatttgtacaagcctgttttcatatactttgaaagtgtgtgaaaataattgtatataaatggtaattctgattttctctagaatacaattcagatttaccagccttcaaataatattattttagatactattgttaataaataatattttttatttagcaaataactttacatatatatgtgtgtgtgtgtgtgtttgtgtgtgtgaatttatgcatatgtatttttccagccaacatgaaagtcttttgaggacaaaattgagtatttgccatcacaaaactataaataacttaaaaatttggcatatttaaatattgcagtaagcaataatacttttatccatttatgcaacttttgtacagaaacagatcttgtagattatcaggtaggatctatggagtgaagtttgataaacttttaaagacaatgaagttaatttttaaaacctcttaaactcaactcttaattattcttaattgtgttctttaatttcttaaattgtgttcccaaagcatttaaaatatataactatcgtagtactgaatgcatggcatagtattatttcattaattcattaatttatttaaaatgactgtagtgaactcgtatggtacaatctctgtccttatggagtctagagttcagtgggatagacgcatgaaacagacacatgagtaatatataattacaaattatgatcactgttatgagttacaggcaaatggcatgagagaataactgtggaagcataatttaattggagggaatgattctctgatgaaagatctgaaagatgagtggtccattatcagttgagaatgggtcaaagaatatttcagatagtgggaacagcatattacaaaggccctgtggtaggaaggagtatgaaatatttaaggaagaggcaaggagtggatatagatgcctcatttaggaggcaatgggaataattcattctggaaatgaggtaaactagacactagattagactagaataagttagtggcagtacagttagaagtgaatggattttaagaaatagtagaaattagagtcaataggacttcaactgtttataaaggagaaaggagaaggtgttgataaataaggctatttgtaaaggtggatggtttggattctagcacattgtactgtgattgttataccataatttatcttctgtgaacattgcaaggaagtttctgcacttattttcaagttttgatgtgtatatttttacaatactgttcacttttctaaacttttcaattgtaagtttcttataattgagaattgttttctctttctttggtatatgtccagagttcttagccctctaaattcagttgttgttgagtaaattttatttttttaaaaaatagagattagaacatctgatttcagatatttaaaaaaacttagatatttatcttgtggggaatgacttaggaacagttttcttgaatgtagagatttgaaataccaatttgcctttgggtcattattttgtaggaatgtgggaagatataaaattcaatgagcaatatgattaggcatttatataattccttaagtatatgctatgtagatctttcaacatatatattaaaagattaaaaaatgcttgattatctggctctggggtatacttgtaaaacttgcctatttgctaaggtcaaaacaggcatgcatgtattttatattctagctttatctatggtatattaataatataactggtttccagcagacacaacctagagtaatccctgcctaggcttagcctagttagagcctagttaggtcttcttgggtttggacatgatttgagatattgaaaagaaaataattgaggagattcaaagcagtattctaatgaagctatatgcaggtttactaaacagccaacttagccatttatctaaaaaaataatatatgtaaaatgtgggttttactgtaatataattaccgagtctccttaccaaaggatgggaaaactttatagccacgagtgacagaaagaaactattgttcagttgttggattccatgtttatgtctgctaaactggtcattgattttcatactgtgaactttcttaacattgccaggtatacagttagaagacctcttatcctaaatgcttaggactaatttcgttggtcagtggaaaaagatggttaaatgagggaatagttaaaacaatatgatacatgcatttcttgaacaatttattttaacctaaaacaaaaattaatttgctaatattttggtgggggctaagggttttacttcaagtaataattcattaatttttttgttttacagtttcttttttgcataatcatgcctggaattcattacctataaggacatagacacttgtgaagacaatcctagtgcagaattcatctaactttaatgaatcatttcattaaagatttcatgatttcccttattattattattacttattattgaatgtatgactcagccttataaagtgtttcctaaacttttagcttattttaaaaatagaaacaccaactttctttttacatttacatttcatttgtttacatggtacttaattaaaattatatagttataataataagtatgaatgacataaaaagttttggaaatgagcacaagtaattcttgttaaacactatagttttaaaaaagtgaagggaaatggaccattgttctaaagattagacaacttaagctatgaggcttggtgagctgtgggtatcagtctttatgtttaataaagggaatggagattgttggctaagttgaggtcaagtaacagagccccctttttgtgctggtttcagcccattacccttcaactttattcactaaatcagatagttacagtgctgcttagaatagctcctgatattaaatagtgtcaataataatactttagcagtcatctctgagcttcatcattataaactagataaataattaaaacaaataataatagaatgtttaatgggagaaataggcactgttgagagaacagtctaagattcagatcatttagctctatgcccagggatgccttactctaggtttgtgacattgaataaattgctaaacctttctggattcagcttccaaatctacaggctggtagttctcaacaaatcgtgattttgcctcccagagaacatttgacaatatctggagatatttttgattgtcataatctggggaatgttcctgatatttagtggctagaggccagcactactgctaagatcctgcaatacacaggacaggtcctaacaagaaagaattatcagttcaaaatttttgtagtgctaaaactgaggatccttgggctagctaatttatgatggtttcttcctcttccctatgtatctatcattctcaaacttaggctgatcatatatatatgtgtatatatatatgtatgtgtgtatatatatatgtgtatatatatatgtatgtgtgtatatatatatttctattttaaataacctgagtaatgacattagatgaattttttttgtctagtaggtgtttaaatgatgcaatagtaattttcaatgtcttatataacataaacagagaagaataaatatagccaaaatttactactctgtactttttctaattcagcattcccaaatgtaagttaaatataactgtagaaaacccacagtagattaaaatatttattctttcagtaaagggacagtttaccaatgctgtcaggtagataggtaccagcaatatagataggaaaggggaaaagctatgtaatgttggagagtttaaatactgtaattcagttgaaaactatatttcagctaatagcaactttgggatttatatatgtatatccctatgatttaaagtaagattcatcagtggtataaaaatgatattttagtgtgctcaattttatgacttgagaccagttcaaaacaagcatcactgctagtataattctaaattattttggaggaaatgtatattttaaaattcttggtggtaattagtgatgataggttcgctgctctatacttttttatgaaataaagtttgacttaaagaacctgagaacaggtttcaaaagtaacagcatagataccaatcacattttttctgagtttttaatttgttgacaaaattttttttaaaaaactgtgatgaaagcatgcgagacttgagatggctgtagaaggagaaactgagtaagttcctcttcttgtcttgtttcctctccctatttctccttctctgttttgcttactccaactccatgcacacttgaatcaccatgaatggtgcccaagttgaagcccaaatcaagttccttagttgttggggccgtgtcttatttgtcttttgatccctggtatctggcatgtagagtctctaagtaaactctctgcccttgacctttctgcatattataggctctgtctttgggttcctccctccctctatttcccttttttctgcttctctctcccttccttccagtttagtttggcatttatagttttcgtggttgtgtggctcttttcatctaacatttctagatgtttagagcagaagggggggccctcccacctgacctcagcctaccacattgttggaatccattcattcttcaacctattaaaatcttactccattttattaccaagtaaactctttcaaacagttaatttatgattctcctggttttattcttaccccattcaccccagcaagaaagtcggtttctcaaaaaaaaaaaaaaaatgcccttctttccctacctgattattatgtagcatgagaattgacagagcacaagcagggaatgattacacaacatttttaaaaactctgtgttgaaatgtatttgtggcattactgtctcaaggaaagccaaatgcatgcctcagaattgagaaaaatgtaagtcggcaagcttatctctaactccccatgataaaataaattgagtgttttagagctgtcagtagtacttgcgcagttctatctctactgctatgtcagttaatatttcctccctcaaaacaaaacgagtgcataggcaaaatgtaagccagcagttgagattctgaactacctccaccagtgggtttcaccccaaagtgtctcctgaaggcctattcatcctgggtttgcaatgctgggttgcaatgttaatcattttttcatgtgctgatgaggaaaatgataaagtgatggatgctgctcttccttctgctttgtcatcctgaccctgattgtgctgggtggactttctcattaacgatgcaaagtccggtgatttgcactgtgctcagctgggcatcatttcttgtatcttatttttgttggtcagcattatagctagttgttggaactgatttcccttgcactctctgtttgactatgccatggccagcacacttttgaatgaaaccgctgatggttgtcgaaactaaagggacattcctatattttggattggctcacgaattcacctgttgatgccctggaggtaattttcactggctttatttatagaaatggcttacacagtgtagttgtgtctagtcagttgccatatggtaccctaatatgccaccaaatggtaatcaaaacttagtagtaaattttcaggaactaataaaacaactgtgatggaggagcttcatttgggatggtagatatcagtggctggagcaatgaggaaggccttgcctttctcttagtgctatttgttagacagaagtttttaaacaggtatgtccagaatagtacttaatttcttaaactataaaagcaatatatggttattattaaaaatcgatttggaatggaagaataaaaataaaatgactcagttcatttttctgctatcccaataccagccttggagaatatgctttcaggtaatcatagagtcagagaaagaatagagatgaagacagagtcacatatgtgaagttaaaaaaatgtaaatttatcacaatatatatgattttccaacttactgttctcaatgagtttgtcttgaagagtgttacgtgtcaggatatataggtccacctcattcttcatagcagcagtgtggtactccagaccacagatgcaaaacgccataatttaggtaagccttccattatcgataaacataaggttattgccaatgttttacagttataaacagcaagttaatgaacatttttgtacatatatcttacagtatgtaggctgacattgccgtagtattaacacttagaaatggaactgatcattccatagttaggcatattttaaattttgatggatattctcaaattgcccctccccaaagacactatatgaaagtgctcatttcctccacatccccatcaatgcccagtcctttgcttgatggaaaaacagttttgggcatctttagtgttctggtccacagctcccatcctgaccacactcaccaaatagaatcttactttactcttggacagaacagaacaaattaaaacaaaataaaaataacaagaaacagctcaagagatgtggatcttttgagcagcttaaccaaaacctaaacaaggcaaataaagtgaccctttgttatcagcaaaggcctgtgcttcctctgtgctgctgagccacagtcagctaggctggatcatgtggagaactactcaacaaagctggatttccttgaccagtcagcaggtagaaggtttttcttcacttctttccccaaagtcccaactcgagtctaactacgattcgaagaaaatcaagagctccagtgtacaagtgacagagaccatttgttttaagacttagcagtcaccctgttcaggtcttcttaagggagacggcagctcctggacctggccacagagtgtgagaaagatggtggaagagagaaagctgtacatacacacgcacatacacacacgcacagggcgagacagaaaggcaggaggcaaattttttccaaagaaatccaaaacaataggtaaagaggatggaaaaaagagaatggtaactgggcattaccttaaccactgggaggagaacaaaagtaagtcttaaatctgatcagccatggcttattacttgataaggtgaggtgaggaggggaagatggtagaagaaacttgatcttccagtaggaatcaataaaaattgtattagatgttccccttatctttggggctcttgtcttactcgtacttcctttgtggtaactttaggattctcatgtttctcttccttgacgttgcaaaatttgatatatttccatttgttttgttatttcttttcagatctcaccgtttgctgtattttgctttgcgtaatattttcttttccttctctttctgcattatttgctttaaaacaacatatacactaaagaaatgtaacctcaaccttttcattcaagtgtgtatttctgaaaaaaaatcagatatttacagataatgaataacaccacaaaagttgttttatgctgcaactgtacttaggttcaatgtcatctttgccaccttctccctgtgttatgtaaatattccatttattgcaggcataaaaataccacctttcactgtactttatgaggaaatggaagccaaatgactttttttttatagtttaaaattcatttacttatatatgtggcaaattctaaggcaagccagctcaaatctgtgccaaattcaggaagaaaaggattatcacaagaaataataagtggattatcacaagaaagaaaaggattggtaaaatatctgttatttcacttacaggtggaaggccacccctttttgtcatttaaatgctaaattttcttctcctttttcatacctttcattttccctcttgctttgtttttgcatacaagcgagttgggacatatattgcttctatctatcacttttacataaaagatagaaatccgggaaattgcaaaaggtttacagtctttccatagactaaaatcacgagccagatgttttaaaacaattttatattaaacaattttaaaactagtatttgtataagccagtaaatctatttttttcataaatgtcctatcatgtttttccccccattgggcacttggattggaactacaaaccacaatcttcaaataattattaaatctgaaaaacctatgtcttgtagtttgtggtgactctgtaggtagccactgcaataaaatctatttggagaaggagctattatctatgcacaatgtgtatttgatgaaatgggtaggcaattacagttcacaaaaacacatactgtattagaatagttcacatatagcaaagataattagatttttcatacagtaaccagtcagccaataggagtaaaaatgctacaaatcttatttataaaaagtgccattaaaagataatcccttctaatgttgcttgagcatttttctggatatgagtgggcagatgagtaatagaaaaataacactgacataaaaattaagcctgggagattcctgagtttgttttgtgcaacttggagttttgaggctctgtcaggagaccgctggagacaagagtactggattagaagcaggaagatctggtgcttgacctgactgtactgtcagtcagtcatgtgactcatcccccaagtctcacacttctcattttcaaagagaagaaccctgtactgcagagtaagagatcaataaatgtttgttgaatgagtaaaagaatgaacaaagattttaaagattcctttccaagattctgaaattccactaggaacttgaacaagcaataaaaagacagcattgcaaattaagaacaaacaaacaaacaaaaaaaaactttagccaaacattctatttagtttaaatttgtagatatacagattttctaaatatcagttttcctcaaatggacttaagatgacttccagactcagggtacagtgtcacattagctggtttagcgagagtgttgtattctacagaaatgtgactctgaataatgccagtttgtcacagatggggatgaaatcagattttctccaaaacacccaaatgtgtgatgcataaagcaacattggcagccagtggggaagatcttatcaatgaagtacacaaagctctgaatgtttacttcgcagaggaaatggcttcacagaccggaaaatttaagttgtcatagaaacccccatgccatatattttgttttaatttgagtattggcagattaagaggactcagtgacaaaggagctatattaaaaatgttgaaattgagtgtgctggttttattttttaacttaattgatatctgttttcaaaaggacttttaatatctagaagggcaaaagtatttcatgcaaattgtgcatagatttctgttgaaaaacaatatggcattggaactttttgttataaaatggtgtgttttctcctgtttatttcttatcataaattatctttttaccgtggtatcatcaaaataacttcactggtatcaattagtaacataggaagctatatatcccaactgtctacatttttattccaactcttttacttaaggaatctgatagtagctgctattggtttaggaaggaaaattaataattagtttgacaatctacttgaagtcaaacatttaggaaaacaaacaaatactgaatcccttaactatctggagagctaatatttattgagggactgctctgggcctcgctgtgctagattctctatgtacatgatttcatttggtccttcaactactctgaaatataaattatttcatttcttgatatgtaaggtgagactaagaaacattacgtgatgctcagtaaaaaggaaaatctggaatttaaactttttcaacatccaaaatggcaccacactgcctcatgtcatataattaactagacacaaatgtctaaggagcagaacagacattttgtgatagataagacataactgattctgtagtaagaagaactaggaagatgtccaggcctcacatatgacggccccttctggaccaagttagaccttgagttagtcttcagtaactagcatcccagcttggtgtgaaaatttggaacacttaattatggacattaacatatttacacataattaacactaataccattttgataaatgattaaaaatattcctgcatatatcttcagcttttacaaagggaattatgtgattttgggttttcaattatgtgcaacctattgactggacattttctgatgtttccatggaggatttaagtgttattatgtataatatgttagctattaatttttaaataacaagtttaaattgcacaaaattactttattatagaagctgttgccaaaatcaactggcttgggaatgcacatcactgaggaatttgaaccaatcaaatcattagccagagaaatgtaattatttataactcagccaagctcttattatgggcaagttagttgcacttttctccgctcttttgtggttgatgtggtattttataatgaacgtagattagtgggaaaggagcaatatttataagcaaaagacagtgtaacagagtgaaaaattgaaatatgaaaaattatgaaagacggaaacattcagaaagcagattttctgaaattgtgtttaaagacagataaataaatatgtttgaagatggaattgagaaaaaaagatggaaaatggtcattgctcacagaaaaagattcactaagcttattcttttgatgtgatataatagtgatttgatggatgcagctaacaaaatgtctacaaaaagcccagtggtatccattaatattgatgcattgagtttcactaaccgtattcatggatgtattatttctagcaccttctgtgtttttctttttgtatttggtccataccagcgtgttgggtgctgtccatggtactggaccagcgttgcttgctagggcctgctgtttgggagattctagggatggtttcctcctcccaaccgcaatggccctgttcctttatcttacactgtgcttgaattgtaaatacaacttgtgaatttattagtaacatttctagttattgtagtttctaagtatgagatctcagtggagatctccaaacttaacctggctaaaactgagcttttatttttctccaaaccagttcctcctgcagtctcttccatctccgtcaatggcaactacatcctttgttactgaggctgaaatcttcttataatccttgactccactctttttttcacatcccacatctgtcaggtctgcctttaaaatatattcagaatccgaccagttttcaccacctcactgtggccatccttgtgtgagcccccatcatctctccctgtaatggacttctaactggccgtcctacttatgtccttctacttccccaggccaacttttaaagcctgttctctatatagtaaccagagtagtcttgtaaaacatgtcaggtcctattactcccttgctgaaaatcctctgatggctttctgctttagtcagatagtaaaagacaaagtccttataatggctcttacatcatctggccttcttgactcttcctcatgtaccctatttcagccacacaggcccttttgatgatccttgaacacacccaattatgtttttgctttaagacctttgtactcgcgattccctgtgccaatacagatcttccatcattatatgcatagctaatgtccttactttcttcaggtttttatttaaaaatatctttttcattgatatttttcctggtctttctatttaaacttgttaaaaagaaagaaatacccccccataacagcttatattttaaattaaatgtatctttgttgtttttttatccctctaagatgttggctcaatgaaagtaggaattttttctgttttgtctactgctatgcctagaataatgcctgcatagtaggagctcaataaatatctgtcagctgactaaatgaatggaattatgttaacagatgaatgattttagcggaaataaatgtcaatatttgatgatataaatatatatattagattataatcatttatcagattattattttagataataaaagcatttttagcattgcttgatttatggttaggattctgtatttggaggtgctaaaatgggtaagaagtccagccattgcagatgcagaggcctttagctgaagctctagagctgttggggtccccaggaaaaagctcacatgagatctcctgatgctacgcttctggccttcattattcacccccatttctaacatatatatgttggggggaagcttaaggttttcagtggtgtggggctacgacgggtgtcccttcacaccatttcaaatggataggggtaagttatatctagagtcttagttccagaaacaaggttgtgatacatactcctgttaaaaaatttttttttgattaatgtgcaccagccactaggggatgctagacactcatattcagagtagggtccactgtctcattgggcttggcaagaagtctggtctacctaccttcagaccatttcattatttgtattctttttagccttttgtgtaaaactaacatttatttaatatttcctccattcctccttttttcagcacattccccaattggagaggggtattttggatgcatctgggttcttgcttttaggaactgtgtttaatcatggaaacctcattcctattttccaagtggcagtgactcatgcggggagagtcaaggccctgggtctctgctagtgctttccccatcctttagcatttcttcactttgctaaaaagcgtaaaagtcttttcagtgattctgtctgtgggtgttggaaaaagattttaagaaaaatgattttcaaaatgactagtatttacacgtatgagtccctatcttttcaagtttttagtttcatgccactttaggaaaataatagcccatgcggtgccaccttattctttatatcttttacacgtgattgattgtaaaggcgatgaggataccagtatccattgccaggaggtaagcaggaatcagataaaagcaaagggtggaaggtggagatagaaatacatatatgaataacattcttcttctctccaacttcatatagcttatcaaatccttaatttagctttgggaggctggtggatcacttgaggtcaggagtttgagaccagcctggccaacatggtaaaaccccatctctactaaaaatacaaaaaatttagctgggcatggtggcatgtgcctgtaattccagctacttgggaagctgaggcatgagaatcacttaaacccaggaggtggaggttgcagtgagtcgagattgtgccactgcactccagcctgggcaacagagtgagactctgtcttaaaaaaaaaaaaaagcttaatttaaactttgatcttaggatgaaataccctcatagtgtgctctgctgttagagattcatgtgggaaaaacatatatcttggtttctttaaataaattagtagagggaaaagctgaatcgacatatgttatcatataaaggagttaaaatcatgttctttggtgtgaatagaccttggtttgaaactaaactctgctgcttattaggtgggtaacttcagagaaattactttttatctctcaatcctcagttttcttatcattaaatgagtttaataacttctatcccataaagttattgtgaagattcctgggaaatatgtatatacatatttaataaccatcagcacaaagaatggcatgcaatagttgctctatagaagttaattcctttccactttcatgtcaatatttttaacctagctgttagatgatctcagatctcagtcctagtggaggaatttgaactggactttttcctcccttaacatagtacaatgtgtatgtaaatcactagtaggaattctgtcattagaatttttaaagtgtaagttaaagttaatattttgctttatgaataagatatttttgttacttctgggtggatgtcaaggaagaaatcagtacaaggtaatcccttaatatttccttgaaatgtatgtttgtagtattatgcctgattgtaatagcatgggcaaaatcagttaaaatatagtgagctgcacacaaaaccttatatgaaattctttctttggcttgataaatgccaagacctaattctttgtgaagtgggtgccatagctttcagtgacgttaatatcattcatgtaaaatcattgttcctccagcatatttttatgggtctcagaggtcacgtgttcacagtttgtgtaagaaccagcattgtggtggagtggtgacagaattgcattgaaatcgtggctcttctactcaataattgtgtgatcttgaacaagtctgttaatctgtgtgagatacagctcttagacatataaagagtaggactatagtcattatgcctattgcatatcattgtattgatgcttaagtgaaagaatatacatgaaagcagtttatgagctctcaagtgttctccaaatgggagatggtttctcattgccacatttctggctgctgctttcacttgtcaaaccacattcctgaagcaacacagtttgctgttaaagggagaatatttaaggggcccgagatgctgtaggaaagccatctttctcttctttcttttctaaatggcagcagtaagaggtctgtgagatgggaaaataggggattaattagaagatgattctacatttgcctgagaagatgaatgatgtttaatgcgctttgagaattaggcagtgctcgggagtccattttatttttctacttgagtgttccagtgtattcgttgagtaagacctagacagattattttaccttatcccaacatgcctttctctttactttgggtaagcccaaagtgtaggttctgtcatcacagaccatcagccctctgttcttacagcagatgaactgccccgggactgcttcttgggtaataatggacatcacatgggccatccagccactctctgttggttcttatgtcatccttcctgctcagacagggatttcataccagatacttctcctgccatcattgtgatccagctgctgagataacgtttcttacattttatttcattactctagcatatttataagaaatggttaatttgacttgagtttatcagtgactgtactgtgagctcacttttagcttaagtatccactttgagcacaaaagtgtggatttttttaagttatttttttcacttttaatgagtataccataagctcttataaatattatatagaaatctgtctcttatggaaagtaagctagacccattcctcagtgactagcgtaaaaatctatttctgcctcactaagagtttaacatatgtgtaccttttataatgccttgtaacttggctaaatatgccattttgaactgatatttaaaactgtataaagatcctgtggttattgataaaagtacttgatagaaaatgctgtgacatttaaaattgtcaggctgtactggatgacttttccttgaggttgttgcagacactccacagtcgacatttagtttagttgctatttctggtggcacgtgtcttgcatgggcctcatgagtatgttgacacttgcgtattgtgcatttaagaagtacctggagaggactcctcccctgtcaaaaagttttctccatcagttttcctatagacatttgctacaattccaggttaatttcttttgattttctgtttttgaacaggttattttatgagtgaagtcactcaatgagtatttcttgtgttcctattatataacaagtcccgtgtagggtctatagtcaatcacttccacctgtggaaaaataattagcttgtttggatggggatagggagaaagaaaacaatttggggagggcactgggctcctcagtgtggtaacacaaggctgatggagaggaaaagagtgtatgaaactttgactgtaggagatgcttaatatgtatttattacataaaatgtattaaaataaacttgtggttctagcttcattaggttgtgataaggtggaagggccagtgtcctgagtgtcagaaaacatgggttttgcatggctagccctgccacccagccacttagctgtgaccctttgaacaagccatttcacttttctgggctgtgacttctttattagtagagtgatagagtgggactagatgatttctaaaattccagactcttctgatttttttcctgaagcatgccacttgcattttaatgaaaatattgattgttaatatttattgagaagtataaatgtagcgggctggtaccgtctttattcccatattacaaatgattccatttgtaagttaacaatccttaaatctgttctggtgtcagagccagggtttgaactgagatccaccagtttcaggtatgcacatgtttatgcaacacagcctccagaatgaaggctgatgaagacagggacgctcattccccaccccccaatcctctgtgtaagctttgaagatcactctggaagagtctacctgtcatgaaagaacgcagatgactttttaagaatatttatgtagtcttatatttcagggtacctgagaggccctttaaggtcctaaattattttttgttctatacaggaatcctttctgtaaaacccttgactaaaactgtctctgctaaaggatgggtattggcaggtgttggggtgagttgacgaaaaagcaaaacaatagtttctgtgaaaatgcatgttaaagagaattagcagtaaatgaacgtgtgtttccttaaataacccaacaccccaatccacctagaaccgatgacttttgctagtttttacccatcacctcaggagtcattctggtttcttggaaacgtgtaaagtatctgcttagggaaatattattttatgttgctgatgttgggaggtagcatctactttagttgaggaatagtcagctaatagttcttttctttgctgtgcttttgcttatgtatttgttcagacctgctgcttaatgatttcagctggccacctgccatgtcaaaatcactttcctctcaagatctgtggaaccaattttatctgaacacaatggaaaggaactcaccattttgagctacatatggtcttaaagataccatcttaaataaagagaaagtgaagaaaacatggtttcaatcattagtttctttcccagagccactttctccacctctaatatattgtttattttctgctaacactttaaacacttatactcagttaatatttcaactcttgtgtgaggaattggtttttatgctttctagcagacagattgcctgagactgacacttctgaccaagtaaaataagcatatttaaaatgctctgtagcttattttcgcaacgtatttgtgaacactagaacttccatatggaagggactgggggagaggatgcacacagtttgaaaaactattcaggaactggagagggtaatgaaaatgaaaaaatgtaacttatggcctccaatctatcttttcaaaaagtaattaaaaactgaaaagcaaaagaataattacttcttagtttaatacccccattctaacacctgatgtaatcattagggtttgatgcagctcaagataaacattgtataaaaagagtaatatacaaatggaatatattgtcattcacatgcataaatagattagcttactattttagagcactgattcactaatttatattcaaatttgtgtttcttacccaattcatgtttctagcctcacttccattcctgagtcatagtcaggatgaatagtcatagcctgaagatttaaatttagatgttctaccatttactacctcataattaatctcaagttttattcaccacccctccaattaagaggttcttctattagtcatttgatcttctatctcagtcttgcttacactcccttgaaaccacactttgatcttgtctcaaatctaagctccacctttgtcttactagttgtgggttcttgaggaaggtgtctagcagagtgtctggctcatagtaggagattttaaagtattgtttcttttttccttgtctcagagcctcatccttccccacccatccagatgatcctgttcattattcaaagactagatctgatcacttctcttacatggaccccatgggacttgcattcttctctgagccaaataaggaaacgtatttgtcccttaataaatactctgatttattattttctttttcatgttgtatcattggagtttttggatacaagcaatagaaaggatttggctgacatgggtaaagagaggaccttttgggagggctaaggtagctcactcgattcaccagtctagagaaccaagcttgggaatggatgggaagcaaagaggtatcacatgggtgagagacgaggaatctggtgaacagtctcataacaggagcagttgttgagcaagccaccaccaccgaggtgaatgagctctgactgcttcttccactgttgtggcaattgcttagggtgcaaataagaagagactgtgtgatgggttcagcccagctacaccagggcagttagtggaaggatctgccctttcgactgccctagtacgaggccaggcacctgaacttattatcaccaaagacttcacacagcaggagacacagaagtccctgaaaggaagtctggatgctgttaggaaggagaaactgaattgcagtgaccagaccaccaaaacgttccctaccatttttacccttcaaactctggaaattttcatttcctgaagagcatagattgtaattatgctaggttttggagttcctaaagtttgtatattcatgacatatttattaaccctttaatatacatgtaccaacatttatctgaggtgccgtgtatatagcagtgtatacataaacattcctgtcttcctggagcttgtattttggtggcaaggtgaggcagtcaatgagcaagattagaaaaatgcagcttgtattagtgatgtgtgatggaggaaaagatgacatggcagggcaatagaaaatgctatggtatatgacttgaagttttaaaaagtgattggagaaggtctcactaactaaggaggggacatttgaacaaaaactgatggatgtgaggaagctagcaatgcagatatatgagggaagagtgatccaggcaaagggaatggcaagtgcaaacacaggtgcatgtgttcccctggcacgttaaggaccagcctagaggtcattgcagctggagtggaatgaaggagaaggaaagtagtgggagatgagatcagaaatgtaggagggaaccagactaccatagatgcgacacatgaacaagatgtggcctctgcttccaatggccttgtggtctaagaggaggcacagatgtgaaaggacgtacttcagtacattgcagcaagcaccaaaattaggcagagggtgcaggctaactgcacccaggcaggaggatgggcctggttagatctctgcttgtctgtgagctctttgagggagtgatgtatcttattcattttgcatcctgggtggcttgtagagtgcctgacaaataccttttgtatatatttttgaattcattttgagtggttgaattacagatacaatgggcataatgtgtgagaaggagcaggattttccttaatcacagacagaggaggcttagggaaagagattaaggaaaataggaaagccacagacggttgaagagccaagagttgaatctctgcagtcttctctctactcggtactttttctgtccttggcatcattgctttgatgttgtaaagtattgaccacataaactactataaaagttttttgagaggtaagcataatgtctatattagttgcatgatctgcaacatcaaggtagttgattattttactgcaatttaggggtttgatttactggcttatttgtgctgttttttccccatgtggacggttttgtgcttgtctttatactttttctctacagggcactcaaggaacaccaaaatgtaaaatagaaccacaccattgtatagcagctgtagacagatatcagtgaggctgataatttggatttttctattgcaactgctactgccatctagtattatctaatactgagtggcttcttccatgatgacttcttgaattgtgaagtggaaatttggtagccttatgtaaccaagcacttacattatttaattaagcaaggtgctacatgaatcaacaaagcaacacaagctgaatatcaggaaaacacatttcaattagtgacagcaggaccagtgcctgaaggccctattcattgggtagaaaatatgacaatgccagggaaaaatgcaaattcatttcttataatattctgtgtgctgaactgctaaactaatatttattagtaatcttagagtcagtagtctttgcatatacgttttacttcctttcctttatatttcatttatcaataagtttttggagtccccgtgggtgaaaatgttgatctgttagggatttagaaaatctagtaaaagtttgcctgggctcagaagcttattaatctatttgaaaaatatgtgtctgccactgtactaggcattaagcatacaaaaatgaataaaatatgaagtctttttatatatatatttttattatactgtaagttctagggtacatgtgcacaacatgcaggtttgttacatatgtatacatgtgccatgttggtctgctgcacccattaactcgtcatttacattaggtatatctcctaatgctatccctcccccctccccccatcccacaacaggccctggtatgtgatgttccccttcctgtgtctttaagctctttctgaacaggagagaagccacaaactatcatatagtgtgatacgggctgtgatatagaatatctgggagtgctttgagaacctacaggaaagaggaggtcttctaatgaggtcataggcaatgcttccaagggagtttttcttcaaatggaggaaaaggaaaagggattctaggtgaagggaataggatgacccaaggtctaggagtttgaaaatgatggcacttgaagagatgcatacaagaatgctgggctgagggatttgcatttgccccataggtagtgaggagccaggagagatatgtgatattccaggttcctgtggatgaaccatccaggtgaagacatcagaatacagtaagagtcttaactttgactgcaggtctagaactcacaagggaagctggcttgataacatccccaaaggagagaatttacattgaaagaggaaggctgatgacaagacattagagaaaagcaatattttaataggtaggttgaagaaatgatatcagagaagccaggctttgccttgtgtttggaacaggcctgccagtagatgcctttatagtaaaagataaataacaataaatgaaatgcttttattgttaataaaaatgttgatgatgatgacaatgatagtagtagctaatacctattgagcacctactctgtactgggcacagctctaagaatttttcatttaatcctacaacaaccatatgagataaatagtactgttataatatcattttcgtttggcagataaggaaaccaagatgcagaggctttaaagtcagttgtccaaggtcacacggctaataagcaatgggtttaggacttcaacagtcttgcttcagagtttacactccctatctgctatcgtatcttttaaatagtctaacaactgtttgggagatgtcttatcaaaattgctctctcgaccgggtgcagtggttcacacctgtaatcccagcacgttgggaggccgaggcaggaggattgcttgagcccaggaatttgagaccagcctgggcaacatagtgagaccacttctgttaaaacaaattaaataaaaaagtgctctctccctgggagttcaagatttcagtgagctatgattggaccactgcactccagtctgggtggctgagggagaccttgtctctaaaaaaaaaaaaaaaaaaagctcgctcatacccaaagtcagggcaataaaggtttgagtggtcaaataaagggttgagtggtcaaagtcacataaaggtagagcttcaacagattatttttctttagattttcaagtcagcatgaggttgtctgatacaaacatcatagatgccatggttaaatggttctgtttctcagaaagccccctttcttcttataactgccccttcctttttaacagaccagcttagcctgctcagcatgagtgagccttgactattcaatattccacaggcccctatagggcctgttggtggccatggtagggggcatagtggacttgctgatccttgtgattattgagtatgaatttaagatgcacatggctgaggctggtggtggtgaaggtgcgaagatacagcagcatgaatccaggaggtggaggatgcagtgagccgagatcgcttcattacactccagcctggatgacagagtgagactccgtctcaaaaaaaaaaaaaaaaaaaaaagatttgcaagagttaccacctgctgctataagactgtaaagagcatggactaaaactgaatgggggtatggggtgccaccttggcaggagttgactgagcctcaaggtttgtttggtttttgatgattctaagctgacaatcatagggaaaaagaataagagtgcacattcagtttaaaaccaaaatatactcactatcagcatagcaggaatacagaataagaagtccacagggcctggaaaagtcagaaaagactttgtcaagggaaagagattacagctgaataggtggaggagaaggtagcttgatcaaaaatgtgctgttgggaatacatatggtaaaaacaaaagataaagagactggcccaagcatcaggtcagatgtgtggagaggaaggtggaaaataaagtttcataaataaagtgaggtcagattttatggggccttcaaaggagttcgatgttttagccatgggaaaaatggggcaggtgggaatgcttgaactaggaattaatgatgaaagaggtatttgaaggtcattaatcctaatatgttggattgcagagagactgcaggtaggaagggcagttagaaaactgtaattatcaagtgtttgagatgggttaaagcctgaaggaagatgtggatggaggactgagaagcaaggagcaagtccaatgggcagtatagttagatgaaacagaagggagactaaaagcaggttccctatcttgccttgaggattagaagactgaggacatcaccaatgaggtacttaggaagataagcctattttcattattagttagaaaactattttttttttctgaattgattctcctaagaattttatactgtattgttttcaagatggacatcattctgtctttgggatgtgtcttatacttctgctggccaggccgtaattgtgatatcattgcttttgattgtggatttgtaccagaacttgcagaatgggggccagtggctcagaagaaaatctcggagataatatgtgatctctctttgaggagatgctgtagtacctccctcttgatggcagagagaatgattttgtgtggagaagcacagaaactgaaaacaccaagtcacaatttatttagtagattccaactgcaaataaagaaagtttagggataccttaaccagtttatttctttgtaatgtaggtacaagaatatatattacaaaaaacaatctgggcaagtttaaaagcacattttaataaagataaaaaaattttaagtgataaagtattctttcatagtttaattggcctttttttcattcccagtacatatggcaatggggtatcttacaatcagtggcattttcaaataaataaggtaaaatatccaggacccactgcttgtttgaaatttgcttgctggagttaagagaagtgaacattttaaagattttttttttcctttagacagaaccttatttcatttgtgaaggctgactggacttggatgctgcccactagttaatttagtgtggcaaaaaataagaattctgtgtctgggcttcactgtctgcaaaaatgaatgcattattgtaaaatgtgcactaatctaaaaagtgtattgccttcctagaagtctgagtaatgtcttacacacataatcacactgcccgtcttcatatggacatgagtcctatagtgcttgagaaatggaaattatttgactgcatcagctagtgcatcgtacttctggttattttgaatttttgtaatcagatgctgctgaggctgtggccttttccccacctcctctctcatacatatatatgagtggtgtgttcagtgaaattttctgacatgaaaaagaagtccttaaaccaaaaataataataataataataacaataaagggaccactgtcttagaaaacattagttacccgttctctttccttctcaaggaggaatgacttcagtgcaattaacaatccgtgtctttgtgtcccagtttgatcttgcccagtttgaaacagcttgcactactagattggttcttgtaagtgttgaaagttcttaattacaaattaaatcttgatcctgtaacttggtagtaatcctaccatctatatataactttacgattttcagaggactttctttattgaaggcagtatgaagcaggaagggcaggcattgtgccactttacggttggggaaactgagacacagagagagtaaatgacttgtttgggtcatagcagttagtagtaaatgtcagaggagggatggaacctagattgggtgactccttgttcagtgctcttttatttttacttctcctgttcatattgaattgtttcagaggttggaattaggaacaaaataaacctatatcccattttctgagtcacagtccctcagacatgtgaaggcagcaatcatgagttgttgtttgttttccagccaaacatatctcttttccagactgtagtaacatagagaccccctcaaagatccctgatgtgacagaggtaaagacatttactagagtcagaggtcagctttcttacctgtgaattggccaaaggcatctattaggctatggaatgttaattatttcctgcatttgtctttggctagccttctctaaatgcaccataactcacctgaaaaactaccagatcatgttgtttttgagttaggtcaccagccctcatcaggatcttttaggcatgcctggaacgttggttgacaaaatccaatgaaatgaccacctatttttctctagccagtgagtcttaataggaggtgagcaatgggaacacctttaaaaaaaagatgcctgtgcctcatcatatagttactgaaccagaaatgaggggagaagatctcaaagatggatattatgatggtaaatacacttgggaaattctaatgtatccctgagataccactgtcatactactaaagcctaaaatgacatttaaaaaaatgctaccacctatttttattggctcatacaaatcttgtcatcatttgatattgtcatgacatccgccaaaattataactgacccaggtctccctactcatgtacatattcattcattcaacaagtattcattgagtacctggtacggtggataaggtagtgaataagacaaagtctatatcccacagagctcgtattctaatgggtaagaaggcagcaaataaataagcagaaacatctcttaggtagtggtaaatgctacaaagaaagatgaagctgggtgaggagatatagaataatgaatagggggttgcaagctaccaaaacagaatggtcaggaaggctgaggtggtgacatttgacagtcctaaataaagtgagggagcataggaagatccagggtgaacggtagtccaggcagagggaacagcaagtgtcaaagtcctgaggacaaatttggactgctagccttcatattagtttaaaatcattgtttgattttataagacatactagcctttcagaaatataggatataattgatcagggcctgaaggatgaactcattttcttctgttagctccaggtacttcttaacaatacttaatctacttttgctgtttgctctttgtagacaacaatgcagaagttggatgcatcttctatgacatttttggacttgtgttttaagagaggtacattgcctctttggggatctggaatcttcctgatagcgagtcagcaagattggtgggcccaacactggcacatgtctcagccaaattctctgtgtagcttctgacaaatgccaaactactggtaaatatccaccccccccccccccccactgaaagccaaggacaataatattctttattcattttctggctctgagtatcttttctttttgtttttgcagcctaacctttttgtcatctttggcatttttcacaggctccagctcattcctggctttagttgaacttttctgacattcttcatataggtcagtgctactcttatatttcattctttgttatatgattctccttccatcttttatgtggttgttttgaagcctgaacccctcagaaagtttcctctgtgaccacattattttctctggaagcctgctcttttatctcccctccgcagctgtttgcaagtgtgtgtatgtgtatgtgtgtgtgtgtgtgtgcctgtctgaaatgttttttagaggctcattcctttctgaggtaggtaggttcctatttagaacttctgagcctaacatcatgcttagtttacttctaattttaatgaacacttttattaagatcctgtcttagttcatgtgcactgctataacaaaataccttagactgggtaatataaagataatagaaatttgtttctcccagttctcaaggctcagaagttcaagatcaagatatgagcagattcagtgtctggtgagggctgttctctgcttccaaaatggtgccttgttgttttgtccttacatggtagaaggtggaagggtaaaggggcctacctcgatccctttagcccttttataaggcacgaattccatccaaaagagtagagcccccatggcttaaccacctcctaaaggccccacctcttaatactgttgcacggaggattaagtttcaacaagacttttggaggggacacaaactttcaaaccatggtatattctaaatttgtgtcttagttcatcctttctctttcacaaactccaggatgacataatttatttcctccaaaatttctgtcacaccagcatcaccttccagtgacttcttcttcttagaattatgatagaggagctgttaatcttcttttatagcatagcaattgagaccatgggaaaatctgggttcaagtccaacaccaccgcttactctctgggttggctgtaggcaaattgttatgaagactgaaatagtgcacaccaagtgctttaggaatgtgcttggtatatttttagtcctcaataattgctagtggttaccataatcattatcagcatcaatatcatgattctgagataagaaattattgtcaagctaagtcaagaatgaatagattcactaaacaagtatctggactgtcgacattcccctaactataatattgtaactctgtaaaaatatttctaatctatactcagaaaatatccttcacaccttctgttcctgagagcttcaatgtctttttatacagcagtttaactgtcctcaacttctcgccccaaacttacatattcaaacattcatcaagatgttcaacagaataaagggccttaccaatatcaaacaagcaccctttaaaagtgctctgtaaaattatcctgtaatttagaagacaggtagacgacgacatgaccacataaaatcctgttattgttaggaatgattactactccttcaaatacatacaaagtcacttttaagttggttaggcttttgaataaggagagaggaatggctcaaccagtcattttagaataaataattatcccatgctgatagagtggaatggaataatctgagagtgattgtgggagtttggacttcaatttgaaatatacaatgagttgttcatgttgaaaaactgaccaggatgaaagactgttggagttattagataattctcttccgatagaagctgagctaaaaataaacttcctgtttacttcctttcctttcatctaaagtcaagacgatgcatgtcaaagatggctgtgcttcattcattcattcattcattcattcattcagcagttatttattgagtatccactgtatatcaggtactgttctgggcattagaattacagaggtaaatgcaaggtgcctgccttcatggagtgtacactgtacaggaggggattagatttaagcaagagaataagccagaaagataatttcagatagtgttaaggcctgtgaagaaaagagaacaggccaatggaatgggtagtgcaaagagggaggaaatgagatacttagagacaagaatgatgataagtttcagatctggggagcattctctgaggggaaactggattttatattctatccagtgtggattgagaagccatttagaggttgcaagcaggagagtaacatgttctggatttcatctcacagcaattcccctgtgttcttaggataatgtattggaaataaatctgactggatgtgaggatgccagttaagagtctggtccaggagaaaaagggtggtggattggatgagagttggggaagtggggatggagaagagtgactagagtcaagatttattttgggttctgaagtgacaggaactcccaacagacacagctctgtggggtggtaaggtagagggatgtttctgacctgcctgtctggtggagggtggaaccctttgttgaaattagaaaggtagaggagctggctttttggagaggatagatatagagagtgaggaatgaaaaattaaagtcagggctttaaaagcctatgaggcatccacgtggaggtataaaatagtcagccggagggatagtcaaagcaagagggaaattggggaacattagcatgttcataatattaatactatgggaataggggagatcaacaaggaagaacgtagagagagaagaaaagaggacccaggacaaagccctggagaaattaattagtgggtagagaaagaggatgttgaagactgaaaaggaacagcagaggagttgggaaaaccaggcagatattttattgctaaatccaagagaagagctttcagaagttctgaaagttgtccaccatgtgaagttctactgggagattaagaaccggagagcaggaaaggcccatcatagtggccagatggaagtcattgtgctgtaagcaaaagtgttttgagtggggtgtaggtgggtggagaaaagattacagggagtgagagagtgaatgggacgtgaggaagcagatggagatggtgagtgcacatagtttttcaaagaagctgtgaatgggcggaacctggaggggatatgagtcatcacagaaatattagacatttctgagatggcacctgaaagaaaagttgacctgggagaggactggctggcatatagtaattactctggggtttaaagggtaggaatggcttgaggttaaggtctctgacctctttttagcttaggacaatctctcttcctcttttgttcctcccaagaggacgttgtttgagcatccatccatgactgaaacttgcctgtccttgtacattttagtaacatgagccaataaatttgcttatatttttatagcttaagatgtttgcaatagagtctttttattgtctatatggtacatatgtctgtatctatgtgatacatggctacataatcatataaatatattgtctacatggagtttctcagaattaagaaaaagcacaattactctgtagttcaccctaatagttatctaaactaaggaaagggggaataaatgaaaaaaagtaacattttatcataatgttgtttttagatagcatatatagcatttactttaccagttcattgtaagttggcaaacatttagaacttgaaatgaaatcagagctcatctggtttagtttcattgagtagaggaaatggaagcctaaagggagtgaatgacccatggaaggaaagaacctaggacctggctttcaacctaggaaccagagctttggagtaacacagacctgggtttgagttctgcctctgccacccatacccttgaaactctgggtgaattatttagctgctctgtgtttattttctaatccataaaatgaaattataagacattgatcttgtagttatgaggcatatatgagattgcaaattaactagcaaggcgtctagcacatagaaatcccttgatcagtgttaaatctgtagtgtcccaaaaccttgaatgaattagtagtaagctgaaaaacatgaagatcatcctagtatataaaaatcatactttcctctcttgtcttcttactgttagtttttgggtaaaccagtaattccatttttcaacaaattatttggataattattgattcatataaagttataagaaataacagaaagaacttgtgtacagtttcccccaatggtaacattttgaaaaacttaataaaatatcactcaataatttgatgttatgaacaacaaatattttactggtgctaatatctattaaaacatcagaaaattcaattttatgtaatttgggactaaagcaatatcctgaatttcagtatctgttggaaccattagacaaatggatctagtgccacagacagctgactttgctctgacttggtgaccttggccaaggcacttaatttttatgctctagagctaattataaattgggacaaaagtactcatctctgcttaattcaggggagtgttccagattaattcgatactgtgcataggtatcccctggctatctctcctgccacctttctttatatactgtctatgttttccttttccttctttgccaacccataatgattttctcagttttcaaagcacaccatgttttatctcgtttctatacattttctaatgctgttcctccatgtctatcttattcccttcctaccctgcctcccaatctatacatacacttattcttcctcctcttctttccttccacacccccccccaacttctacttaatttttgaaatcacaacttttacaaaatcttcaggggaagctctgcataacccccagaccagattaggtcccagtggtgtgttcccttagcatcctgggcctccattcacagcactttaccccatgtccttattgtgctttgtctagtgtttgtttttaccagtatgtgaagtgagggcagggagaagattgccttattcaccacttcattgtacttatcacagtgtctgccacagagtggatgcccagtaaatactcattgaatgagtgaatgaatacatttaataaacatacacttgcttttttggaaggaaacgctgtgcagatcaggtggaactgtgggtggtatttctatttagtatgtgactcatctatattgaaggctgttaaatgtttaaagtgtatctttgtatggtagtttggttttccttatttctttcttttgttttcatgtcagaattactgtgtaattatgtcttgcaaaacacctcaaatggtggccaagataattttttttttttttgaggtggagtctcactctgtcactcaggctggagcgcagtggtgcaatctcggctcactgcaagctccgcctcccgggttcacgccattctcctgactcagcctcccgagtagctgggactacaggtgcccaccaccacgcctggctaattttttgtatttttagtagagacggggtttcaccgtgttagccaggatggtctcgatctcctgacctcatgatccgcctgcctcggcctcccaaagtgctgggattacaggcgtgagccaagatgaattttaatagggaagacaaacccaaaatagagatgaatgtttactgtggtgcattaaagcattaaagagttgtgaatgtgaagctctccccagtctttagtaacatcaagttatcttggtacaggaagcaaatagccacttctcattttgcctcaggtggtgaaaaacttcccattttaggccagttgagattgtatgtgctgtatggctatgaatgccaaatatgagtcttaaactccaaatatgtggctgagctaaaagtaatgttaaattgtactgtctgctttggtgtcttataatgacttaaaataatcaaagtaagaagaaatttttgtacctatgtcaactgagatttcatttgttttttttctttttcttcctgtagattaggacttataaatgttccccttcagagtactagccttgatttatcccattgttcctgccttttgctttctctgtctctggtgttgggatagcccaataaaaccaactttcttctatactcagcaattgcattgggagggaggagcagagacttttccttgtttcatttctagtcactaagagggtattttgagccttgaggtgtatatatcagagatcctagatacctagatcctatagttggtttactatcagaatcaccaggcaaacttttaaaaaaagtgcagattctgggacccatgcccaaaaattcttattcaataagtttagggtgggactgaaaatcaaactcttttgatgatactgatgtataaccaagtttggaaactactgtttgggaatcccaaatgcttgaaaccctttgtgagtctttggtgtctttgggctaaaattccaaaccttgagcatggtcctttgtggtctgacttctcctggtccattgctccagcttcttttctgcacgcgaccccctcacactcttctactgagccatggtaactacctgtaggttactgattgctcaatggattttcttaacttttggacatggtggaacatgttttgccccctccatgtcctgggtaattcctgttgtcttttggacttctctcacctactctgatagagctgggcttgtctgggctctcctggtgccttatctcttccctttcttttcctacttatcacactgtattgatttgtcctgcacatagtgggaataaatagatagttatgaatggaataagttgcttgctcagttttctgtctttcctactgtattatgagctcctttaaataagacctgcatcttttccactttgtaggcctcgtgcacgtgttagcatgtggagagcacttaacaaatcatagttaaacatgtaaattaataactgatattgaaaataaaagaatcctgtcctttgggtaaaagatcctgcagtagttaatgttctgagctggaaaacatttgcctattacaatagacatgtattttactagaatagaaaagaacctgggccataaacagtaattgagattgggaatattaatagaaaaacagagaaacatacagttaaattgttctgtatgtattttcaagtgttttattttattttcatataggtaataccatcgtatgttacaaattttaaagataaaatagtatacagggaagaaagagtctccttcctgcctcatttctcagccaccaatttctccaacccagaggcagtcaacgttttagttttatacctttcacaagacgaatggtaacataggctgcaggctgtctgtttgcttttttacttactggtttgtcttactggcaaacatctatataaatgagtgagtacacaaggagattctttttatctctttcattgtttcaaagtattccactctatggatatattccaattcattttactagtccattattgatggatttttaggtgaccgttttaaattccatatctgtgaattcattttttcacccatgtcattttgcgcatgcacatgtatatgtaggaaaatttttagagctatattttctaggtcattgaatgtgtgctttgtaatattaccaaactgccaaaatggggattatatcaattgttctgttaattgtcaccaccaacctcaaatacctgggaccttgtgggctccggatcaattgttctgttaattgtcaccaccagcctcaaatacctgggaccttgtgggctcgggccatcaagcagatggtctttcagactgtgcaatgtattctgtaatgtgtacatttggttgagatgagttgaaagtatttgagagtacctggaactctgaagctacctcagctacctgaagcaaccattgaggctgaattttcagaatgttagtgtttatctattaaattaatcgtttatttagggatatttagttaataaataaaataataaaatgtaaacattttctcattggagttttatcagtatttctgccattgatccttggaaaggggacttatatatgattagagtcaggaatttggaaatcataggaagtaacagcaaagttgacagttgactgaaataattaaaagaaggtctaggaggacatggttcttccttgtacacctactggtcatgcccaatgaggagagtcattcctcctatgctttccattttgttgaaggatcataacaggctgcactttctgatagaatttcacatagtgctggagccaggttcaccatcattttctttattttggtttgcatttctgtcttgaggatctaaatttttttcttaggtaacttttctggcatcagaaaattttctcaggcatacattttacctgaaatacttattatgaacaatgaatattaatcattctattgagactggcagaacctaggatcatgaacaccacactttaaatgtgcttttattttaagtaagagtcatttttttctgggatttttaaaattgttgataaaaatttaggaaattcagaactatattttgaaaaggaaagaaaatgtttctacctttatcatatgaatgcagaaattattgatatttggtatgttttctttgatcttgattatatagatttcttcacattcttaaacacttatactgtgcaatgtatgtagcatcctgaattttcaactatatgaaaattacatattttttcaggttaaaaattattttaaatgattttaatgagatattaatattctatattatgcatataacataacatatttaaccattctcatattgtgggatatttgtgtttctatttttagctcttttaaaatgtgctgcagctaataacttttctgtgaatgttagtctatgactatcttgctatgcatattgcaagtggaaataccagatcaaagggtatcaatattttttaaactctagatacaaaaatgccaagatgcttccagagtaagactctaatttatacctccatcatcaatttatgaagttgtccatatcatatattcttttaactttgtcccccattttttaaaaacatgcacaattatatcttcttgtttacattttaaacattattattagtgaagtagagtattttaaaagtttgttactcatttttctttccctttttgttaaatatctatccctgcctatccttttgtatttctgtctttaggagacttgctgctttttcccagagattttaatgttctttctatataaactatatttcaatggtcacagatattttctccaggaaattccagcttttttgccttttaattttctcagactgggtaaatttaagaatttatttatatgaagtctactaatcttttactttgtgaattctttctttgcttttgtgttgggaaatcctttctatattcaaagtgatgacaaatattcatccatattttctcctattttaaaaataatttcattaaaggataagttcttaaaggagtaattctataatgtatcaggtggtgggaaatgcagagaagcaaagtgaatcaagtagggggtatgtgaagtgtgggctgtgaaggaaggcctcgcttaccagatgcacctgaccagagacctgtggggggaggggagggagacaagccaacgtacctgatgctccaagcagagggatcagcaaatgtaaaggtccttagtgggagtatgctcagctcaagggctatcaggaaggcctgtgttgggggagcagaatgagtgcttgggagagagcaggtggaaatgaggcctgaatttcagaataggccgggggcaggagcattctagcctctcataaaccattttgggtgcttgggtttttactcttaatgacacaggaatcattgcaaagacttaaataggggagtgacctgacatgacttacttttaaaaaggattactttaactgcttgagaaagcatagatatctaaaagaaaatgtccaggcacagggatcctatgtataccctccttccttttgaaatttgtgctttcttgcttataaacttgctataatctatacctaatctattaaaaacatatttcaaataaataagaaagagatggatgtagcagttcagttgtgttcagatgtatgtaacaaaccctgctgcagaggttgaatccagtggggctttatttttctctcatcacaggaaacctggaggaagacaattcaggactagttcagcagctcaaggaaggcctccaggatacaggcttcttctactgtcctaaacatgtatgtggctatcatcctcatgttgacaagattgatgctttcctccagacaccacattctgcatcctaggcaggaggaaggagatggtcagaagacagctgaaactgtcttttcactaggaaacaaaccattttcctggatcctcagtagtaggcttctgattacttcatggccagaactgggtcataccactattccttgtgggcacgttgctgccttgaataccagctataccttcttactaaggaagatggaactaacagtgtttgtgataatggatagcctgtagaaaaatggatatagatgagtctcaaaataaaaatatacaaatatacatgtcctagtcaatatacataaaaattacaaaatctgtaatattccaaaacgcaaactaaaactgtcagttaccactttgtccgtcatgttggcaatttaaataaatcgataacactcaaagttagcaagaataggtaaaatgggaatgttttatggcgccagaggtataaccttcctgggaacaatttaatcattcatgtggtgtgtatgtaagtgtatcttattgagggtttgctttgcatttccctgatgactaatgaagtagaggacctttgtacaactttctaaccatttgaatttcccctttgatgagctgcctgttcaagtctcttgaccatttttctacttaattataatctttttatataaatatgaagaggttgtttatattttctagatacaagccatttgtctggaatatgcacggcaaacatcttctcctaataagtagcttgccttttcaaagctctcttaataatttattttgtgaacagaagtttttaatattatataatttaccattcttttattgttaagtacattgtatgtcctgtttaagaaatatttccttactccaacttcatgaagatattttctaatataatgttctagagatttgtttttaccttcatatttattaaaaagactgtcctctacaattacttagtaatattacctttgccctaatttgaatgttttcatatgcattggtttctttttgagcttttgcttctgttctattggtctatttgtcaatcactgcacctgtaccactctctcttagttaccatagtttttaaataacttttggtatccaaaatttagcaggttcttccccatttttttcctgttcagaacctataaagtctttcatttacctttactttagaaattacagcatacttccgtgacctattaacttccaatgttgactgaagtatgcataaatgttttacgtgtatatttatcaaaggctaaaggtagtatctctgtcctcttcccaaataacgcaaggatctaaataccatttaactacaatcttcccattcttacatataatattacaattgttcagtattttacttatacctgctttttgatactccccaaataaaccattattactattttgttgttgtttttgtagccagtcagtagttctaggtagacttaccaacatgacaaccagtttatttatgtattattgtttttgcattttccatgttccttccggattctgtctggcttctaagaaggagcatcttttatggacagttctgagtgataaaatctctctggcttactttctgaaaaatatctttattttgcttcattcatgaatatagtgttgctaagtatagaattctaaagtgatagttattttttcttagttcttagaagataatctttttggatgtccttaggagatattttttcatcgctttctgtcatcttctgtagctgatgaaagaagtctgtcaatgtaattatggtttccttgtcaataattgttttctctgtttgctttagctgtttcctcttttctttggaagagtgcagttttacttgttgtgttagctgtggtatgtttagaaatactagagacccgtgttttccttctattatggaaagttttcaaccattactttgaatattctctcccttattctctcctcttttatttttagaatttatgtatacacagcattgagtattctgtgcctcatgtttcttaatgaatctttcatattttttatttcttcatttctccatgctgcattctgcatgattttcccaggtgtatcacctcccttattacctccctctttagttggtgtcttttttgttccttttcaaagcaaccttttattcccacagagttataaactagtcctttctactcattcactgtatttatctaatagtccattttagattttcctttcttcagttgtggggatacaaattattgtctatttttatctgcttaatcttcctcatcatgttccatttccttttgtgtttcatagcttttctttgtgagttcctcttctgcagaagttttgatagttgttgtttgtatgtacatttttgaggaggggattccatgtgtcctggcttctcatggactgggtggcattttgaggtctgtggcttcgtgtagggagactgaatgctagctttcacctcatgtggtcccaagttcatttttttttctcctcatacgctttatggcccaaacccctaagttctaaagtctaaatctaaagtccatttgaagtgcatcaattcctgcctcttggtcaggaatcaaatgccttctttgtttctatagctggggcattccatttcttagtttcaagcttggctttgtaatgctttctttgttgtatttgcatgcatcatttaagtgtgttagtaatgtcattttggtccatcgtatccttttttctcccctttatttgttttattgtcaataacttctactttctgcctttagctttaattattagttactaaaacaactttatgctaacatcagaggcttataaaaaatagaaaaatttccccataatcccatattgagtcaaaatgatctatttttattctctagatatccttcaaatctttattcatagggtgctgttgttacaatcatgccatatatttaattttgtgttataactctcttctggtttacattttgcccgtatttctttgtaatcttcaaattaccattttaatggctctatgatagcctcttgaattggtgtactctatcatacttacagagtttgttttctgtttttccttgtttatacaaatttccccagaatatttttgcatttgtagtgtttgcattattttctgcggctaaaatctcagaagagaggatgttaaattaaaaattcttaaccatgcattgccaatttgacctttgaatggcttttctcattttacagtgacattaggaataaattcacataccgacataaatttaatacctactgtgtgggaagttctgtgcattttgagtggcatagtgacaaataggacctgcttcaagtttcaaggaatttacagtgaaatcaaggatatagatatactatcaacttttataatattaggataaatggagcaagtggtacagtcaaaatctaatcaaagaaggaattttatagaagaacttgtatttcagccagggatagaggaaggggtggagtttccctgtacaaagggaggctggataatattccaggctgagagaacttaacggagaaacagccagaggtatgaaaaagtctacagtgcatttggaaactattgaaatcgatggtgtggctggaacaatgggtgagagaaaggagcttgtaggagacttgaagtactttgccgaaggattttggttataatcagccagaattttcatttctgccactaattgcaaatgctggtttgagaaaagcatgcactgtagattcatggtagcctgtgattggcagaacccaccagtctcctattttatagatgaaaacaatttctacggaaattaagaaaattttccaagtttacactaggagtgtatctgaaggcacacttgctccctttttcaagaaaaatttgtttagcatctgtttgtaactcagtagtaagtgcttggaggatagaaagtaaatacagtatagggtcaacttctgtagccagctgggggaaaaacaaatcaatatttgtaaaatggcaggataagacaatgatagaaatgagtaaagggtattttgagaacacagaagaggggaagctatttcagcttggcaagaaggatgaagagtggaagatggtggctctattaaatcataaaggatggataggaagaagcttgccaggtatacctcacccatggtgagggaagggagtttcagcctgagcaaaggcacggggtaggaatcagcatggtggatgtgggaatcagagcagcttcgcattgtggaagaatcacatgtgaggcagagagtggcaggatataaaaccagggctagatggtgtttgctatggtaagtagtatgggcttgatttttttagggctgctgaggatcttaaaatatttaagagggaaacttggcaggactttctgattgactggatgtgggagtaaggatgtgagggagagaagagcaaaatatgattctctggtagacttcttctttcttctctagttagtgagtttatcaagatttaagatggtagtggttttgtttcagcagaagccatgcagtgtggtgtcatgtggcagtggaaaaaccatcatggggcgtatggagactcaaatgttcctgaaatgcctgagagaacatccagggacatttggaggtcactgccagaggccatgcacattgtccagttttcagtggtttctcttcgttgctaagaagcttgaacatatacagaatgcatttaataatgttcagaaaaccttcttaagtggacaatctcaaatgtacaacagacaaagcagaatcagatatttttttggatggtatacctcattagtacagaataattacaacattaggtgataataatagcaactgatatttatggagtactcactgttttccatgtaggatgttaaatgctttacattcgtgatctgacttaatccttaccataatccctactcaaggaaacaaaggcacagagcatgtaattacttgcacacggtcactaactccaatgcaaaccctgaggcatgccaactccaaagccctcatttataaactccaggccatattgcctccccatgaagctgatacgcagacaagtgtggtgccactttgagattctctgggttcagctgtcaaacaatgacatcattaaattatccatgtaaaataagaagttgagtcctctatatccgctgtgtttgaggagtggcaggatgtgggatgaaagaaagaaattggattgcctctgaagccctctgaatttgtaatagaactacagcctcctcaaaccaaaattataaaataacctacatcactctgaaagaattttcttactaaatacgttaatgtgagaagacaaaaccaaaccaccaaagataatatttgaatattgataatattcaaacctcatttgaaatcaaaccactagaaccagaaaagaaaatgaaatgtgactatttaattcctcagcagagatatatgtatgaaaacataatttctatcactggtgataggagaatttgatattgaggacttcatgagttgggaagagcgatttcttaaatgaaggtgataaaagcctgtataaataatacagtcatgtattgcttaatgatggtgatatgtctgagaaatgcattgttagctgatttcatcactgtgggtacatgaaagactgcacttacacaagcttagctagtatagcccactacatagctagggtacatggtatggcctgttgctcctaggctgtaaacctgtacatgttactgtattgaatactgtaaaaaactttaacacagtggtatttttgtgtctaaacctagaaaatgtacagtaaaaatatgatattataattttatgggaccgccatcatatatgtggtccgtcattatgaggctcatgactgtctaagataaaactgtaggcctcataccaaatagagaagattggcaatatctatatgtatatgggtgtggattgtataattaatttctacttagtatcctttgcttcttagaaactttaagttccctcaatttaaaaaaatccttcttgatttcttttgctttttaaagatattttgatgtaaaagagcttttgtttttattttctttgcctggttctccactcaaaaatttaatgcctgtgtgacttagaattctcataagatttagctttctgtctttttacagatatgaagtggcatagtaggatttggggtccattttccctcagcttcctatttcttgccagtagcttcattgcaaaaccactctaccatctgccctgcttctttttctgcttccacccccagttccctcattttctaattactcccaacaggagtgactcaaacatatattggaagcaagattcccacagttgccaaataggagcagggaagtgccacgtactaggttttcacaaaagaagtcattatgtatctggatttttatctgccagagaagaagaggaatgcttgaggaagtcaagtctcagggcaaaaaagtaacataataaacaaattagagaatggcactttcacattaccatttctgttacattttgtggtagtctttcaggctgttcacaagtatatggctcccttccttttttgggctatagtacagtatcgttccgtgctagtatagttcggtccaggctcttctgcactccactgaactcggatatggccatatgacttgacttgttttagccagttaaatgtgagtggcagtgacaggtgtcacttctgagaagaagctttaaaagccagtggctttaagagcatattttgatgtcttatttttgacagtagttgctctatcaacttgagtctttaagtgacagtgtgaacagagcaccctccccataccagctgactcataatggccaggtgacatgggcaagaaagaagcctttgttgttttaagtcactgagatttggggagtaatgttatggtggcagaatctagtctgtcctgactaatacactgaaacagttttagcatgtataatctcatgtagttaagagattcaaatcataattcctccgatacatggatcaaagataatagaagacaaacatttaaagtgtttttaaagcattcactcaaaaagaatgtattttgtttgcatccatatagtagcatctaacctatcgcacaatagttttgtgttatataatagatctgccactgcttcagagcctctgtgagggcagagataaggtctcgttcttttttaatcctggcacctggcactaggtgtggcatttagtgggtacttaatactattagattagtgaagaggactgaaaactgcctggcacatgagaggtactgaataaatatttgtacagatattaatgttgttaatatctgtaccaaatattcagcacctgtcattaaaattcatccatcacctatcataaaattaattagcattggaaattctctttgtacaatcacaaataattgtacaaagtgcattttcaacatttcaaccccttggtagctactgggctaatttttcaggcacaaagaagcagtttaatgtggaccctcaagttgtattttttcctgccaccagggcctttaaagccttacttaaggaagtaccattatttcaactttggcaggagggatgatacatttgcatgtaaactggtttggagtttgatgctgagcttgcatcgtgaccacctttccactggacattataattagggggaaattctgatgctaaagcttggccagtgtatagttattaattcaaagttgattatctcaccagggattgtgaagagtttcatttggttttaaaactgcctaatacatgttattctaaggtgttgggaaattatcagtgtggctgctttgtgtgctctccttggtccagtgaaagcttcaccttactccttggcccctgccagctcctattttatctgtttcttcccaggaaggatttcaggcatctgggaacatacatgtacacaaggttgttgtcatcaggtccctgcttgcctacttccttcttcctaaatttagattctctaaatggagcttactttcctatgtctctgtcctgtctaagcagtttctccattacccaaaatgcaattccccaggttcattaattcattctcaaatatctcttaagagcctcctctataccaggcattgttcaaagccttgtgagtacagctttcctggaacttctatttcattggaagagacagatgataaataaaaaagtaaatacagtcatgcatcacttaacgatgagaatattttctgagaaatgcattgttaagtgattttatcattgtatgactatcacagtgtgtccagagttcgttccttctggtgcatttgtgttctcgctgacttcaagaatggggccgcggaccttcgcggtgagtgttacagctcttaaagatggcacagacccaaagagtgagcaacagcaagatttattgtgaagagcgaaagaacaaagcttccacagcatggaaggggacctgagagagttgccgctgctggcttgggtggccagcttttattcccttatttatcaccacccatgtcctgctgattggtccgttttagagagcactgattggttgattttacagagcattgattggcccattttacaaacctctagctagctacagagcactgattggtgcattttacaaacctcttgtaagacaggaaagttctccaagtccccattcgaccaggatgtccagctggcttcacctctcaacagtgtgtacttaaacctagatggtatagcctactatgcaccttgggtatgtgatatggtctattgctcctaggctgcaaacctgtacagcatgttactgtactgaatagtgtaggcaattgtaacacagtgataagtatttgtgtatctaaacatatctaaacatagaaaaggtacagtaaaaatacagtataaaagataaaaaatggtacacttgtataggacatttaccatgaatgaagcctgcggaactggaaattgctcttgatgaatcagtttgtgagtagtaaatgaatatgaaggcctaggacattaccatatactactgtagactttataaacatcctacatttagtctacactaaggttaaatttttttgtttcttcactgttaaattaaccttagcttactctttttgctgtataaacttatttaaaaaatgtttttgactcttttgtaataatatttcacttaaacacacattgcacaggtgtacaaaagtatttcctttcattgcattcttattctataagtttttttctattttgaatttttgttctttaaactttctttgttaagaactaagatacaaactcacacattagcgtaggcctacacagggtgaggaacattagtatcactgtcttccatctccacatcttgtcccactggaaggtcttcaggggcaataacatgcatggagctgtcatccatgataacaatgccttctggaatacttcttgaaggacctgcctgaagctgctttctagttaacttttaaatttaatttaattttaatttttaaatttgtattcttttagagccacggggtctcattatgttgcccaagctggcctcaaacacctgggctcaagcgatcctctcacctcagcctctggagtagcagctggaactataggcatgtgccactgcacccagttaaatttttaaataaatagaaggagtatactctaaaataacaataaaaagtgtagtacagtaaatacataaaccagtaacatagttttttattatccttattattattatttgagacggattttgctttgttgcccaggctggagtgcagtggtgcaatctcagctcactgcaatctccgcctcccaggttcaagtgattctcttgcctcagcctcataagtagctaggattacaggcgcctgccaccatgcccagctaatttttgtatttttagtagagatgggatttcgccatgttgaccaggctggtctcaaactcctgacctcaggtgatttgcccacctcagcctcccaaagtgctgggattacaggcgtgagccactgtgcctggcctttattatcattattaagtattatatactggacataattgtgtgtgctacacttttatgcaactggcagcacagtaggtttgttcacatcagtatcactgcaaacatgtgagtaatgcattgccctatgacattataatggctatgacatcactaggtaataggaattttccacttcggtataatgtcatgggatcaccatcatatatgttgtccatcattgactgaaacgtcattatgcagtgcatgactgtatacggtaagtcaggcagctgtaagtgctacagtgaataataaagagggaagaggtattatgtttgtggaagtagggtgggacagtgttactaatcatttcaggacaggaaaagcctaactgataaggtgttaggtaaacagctgaaaccttaaggaagtgatgaagaaagccacgagcacatggggtgaagaggagctagaaaggttcccaacagaggggacagcaggagctgaggcaggagcatgcttggcaacttcaaagaagaggaagcaggccagagtaattggggatcagagcaggatgggctgaagtggattatacagatcttgtagggctttttggtcagtgttatttagtctttagcctgagtaaggtaggaagctgttgtgagtttttgagcagagggtgccttaagaggatctggctgatacggtaagaactggtcaccagaacagaaaaagggtgaccagttagacatctgttagataataattcaggcatgaaatgaaggcattgactttcaatactcagctcaagtgttaactctaactaggaagcctctcctaactcccctaggctgagttgagtctacctcttttgagtttctgtaacaatcttactcttgaaatgaaggctttcggctgagttcacttatatttggaagctgactatatagttgagaggtctctgaattaatttacaattagaataaagtttatttatagataagtaaaagggctaacttagtatattatgtattatatattcattatgtacaaatatacgtgcattatattattaaaacttaacaataattgtggcaattacttaaaactttgtccattacaaagatttttgggacaggattattttgataaggtttaaaattgccagaaatggtaaaataaaaagcagagtgactcatgatgggttttattattgttttcaaattctttataaactaccccgtaatgcctatacccacagtggactgatctcactgccttgtcttgatatatcactgatggtaagatcttttattcaaagtgccttgagcaaaagaaaattccttcaggcacggtttgatccagggagctcgaacagtgtcatcagagctcctccaaattattccaatctgttttccatctgttttcctctgggttggcttccttctacagcaggctgtctacttttagttgcaagatgactgacagtgactccagccatccaaatgcctttctccaggtcactgcagcagaagtcccaaaatatgactctaacaatgtcgtatgcccgtacttgaaccaatcacagtggccacaggaatgcaatattctaattggcctttgaaagtcaatattctaattctgacaggcttgggtcacttgcccccatttggagctgggtatggggtaggtccattttacacgaattacatggaagtagaggaggaaaggcaggcccccaagaaaaattaagattgctgttagcagaaaaagaggagatagatatgggatattcaagctacatccatgtactacaagcaattatttctgattcctatccagaattctgtcctaaaagtgttcccacttggtaaatcaggtacatagatatgaagttctcacccccgcattgattgccactgtagcttcctcttcctttcgtaggattctcagcaggaatcccctcttcagcctctcactcacacacccacacacagacacctttcatcataagccctgcttttgcctcaaggagctttcatattgtgtgcgttcagtaaagcaaaaaataattcctcacaaaatcggcattttttattatactttaagttctgagatacatgtgcagaacgtgcaggtttgttacatagatatacatgcgccatggtggtttgctgcacccatcaacccgtcatctacattttaggtatttctcctaatgctatccctcccctaacccccgacaccctgacaggccccagtgtgtgatgttcccctccttgtgtccatgtgtcctcattgttcaactcccacttatgagtgagaacatgcagtgtttggttttctgttcctgtgttagtttgctgagaatggttttcagcttcatccatggtgtatatgtgccacattttctttatccaggctatcattgatgggcatttgggttagttccaagtctttgctatcgtgaatagtgctgcaataaacatatgtgtgcatgtgtctttatagtagaatgatttataatcctttaggtacatacccagtaatgggattgctgggtcaaatggtatttctgattctagatccttgaggaatcgccacactgtcttccacaatggttgaactaatttacactcctgccaacagtgtaaaagtgtctatatttctccgaaaagcaatgacaacaaaagccaaagttgacaaatgggatctaattaaaccaaagaacttctgcacagctaaagaaactatcatcagagtgagcaggcaacctacagaatggaagaaaatttttgcaatctatccatctgacaaagggctaatatctataatctacaagaaacttaaacaaatttatgagaaaaaaacaaccccatcaaaaagtgggcgaaggatatgaacagacacatctcaaaaggacatttatgcggccaacaaacatatgaaaaaaagctcatcatcactggtcattagagaaatgcaaatcaaaagcacaatgagatatcatctcatgccagttagaatggtgatcattaaaaagtcaggaaacaaaatttgcattttattttaccctgttgatgctgtataaatccaggtctcagcaggaaacagatggaacactcaaattaggataattcaagaagagtataataaagggactatttgcaaaggtgtgggtatcgtgtaagaaaagcacagggacattacagcgctgtgggactagtaaatgaagctctgtttatctcccccaggtctgaaaaaggttgggggaggagatagccattgccagagctaccagacttggtggggagacacagccagctgtggatgatttcataggaaagccactggggtagtaatactctgacatctctctcccttagctttcctgtcttctacaagtgcctttcattggcagaagccacacggcaggggagcccattgacagagtccattccagtcagcctctagagtggagggcagggttgacaagagaggagagaggatacggaggggaagtggatgttatccagaagagtccatctctttgtcctctcagtatatgtgcttatctttaagtgaaaagttcctgttcccttcacagaggacacaggaagtctcatcgctatggctctatgttggataattttactttaatcatactgcctcttcaaagcagtggcaggggaataaaggaataatggaaggcatagcacctgcagttcttgattctgaagcataaggtgtctactctcaccatgactccacgttccccttaccttctccagctcctcagctggatgtggctggatggcggtgacccaaaccttcgttctgcagaatctcagtgccacccctgcccccacctttttggatagcttcagtgttatttggttccaagcatggtcctcaatgttgtatcagcaacccagctgctccctggtagttgggcttactctgtaagtccttttctctgtgttagttcagtaggatgatgaatccaaactacctaggggctgtctttgcttccaacttaatggaattgtggctgtgtttcctgatagaagcatttctacattaaacatgaggacttccaaggtcatgtggtcaagctcaaggtcatagagatgagaagcaaaaattctgtaagtggatagttagtgattagggttagagttaggataagaacactgatacctctccttgttcctggtcctgtgcattctggctgaggaggagatacgttatacaaaatactgtttatgtaaaatgctttttgaatgcatatactaaattctgtgggacagcagcccaactttgtagaagttgtctcctctcctagctcccactgtaattgagcctttgctctagacactaacaagacagagaggcctgatacagtaaaggtgtactgttatccgcagtaagcaaatggatcccgattttctttactgatggggctggaggtgggaggtgagggcatgagtacattagtctggtcagtagctacataccaggcaccacactctgtgttgattgctgcaataaaaatatcacttctggagccatagttgtgattggcaatatcacttggttcagtttatgactcttgcttaacggtcttcatgtcttcagaccatcttgtatcagtcaaggttctccagagaaccagaatcagtatattgcccagatgagcattaagcaaactggagacccaggagagccaccagtggtatattttcagttcatgtccaaaggcctgagcagtaggcgagccaatggaataaggtctagcctgagtctgagtccaaaggcaggagaaaactgatgccccagctcaaagacagtcgggtgtagagagttagttcttcattattcagtccctttggtctattcagtgtttcagtgggttaaagaaggcctgtagaggacaaactgctttactcggtctacccattccaatgttagtctcatccagaaaaactctctctctgtctctctctctctcacacacacacacacacacacactcagaatgacgtttaaccaaatatatggacaccccatggcccagtcaggttgacacataaaattaaccagcacacatctgtctgactgttgctgaattaaatgaagataacataggaattatgcctacattctttgagtcctggatagtagcaccaagctctgcaattcctccaggtgtgtggctttgttcttagtttattctacagggaggggcagttttaggagtgtcattttgcactctttcattgccctcatgcaatgaatcagtaaaccaatgtagtgttttgccagttgataaatatatctgcttctactatacaatatggtactggggaaataacatcaggatggatctctggtgccgttggacccactctgagatggactcaggccaagactctgtcacctgtctccacaagcctcccatttgaatggtgtaccacagcaatatttcagagagcaacttaagtctagacccacagctaacctggggaaagcctgagcctttctttcttcagtgcacagtcaccctggaaacagccataggatgctatgtgggaggcttgaagggcgagtcacagcatgcacctgaggcagcattgttgggtccctctcaaagacacccagccactttctctattgagaggctctaggtcagtggaacttggtgagaggctaaaatccttactatggtgactgcattaggtcccagcccacgagagtagaattttgtctcttctatatgccaagtagcaccttagtaggtggtccatctatttttgtttctatttctgagattatttagtcaccaccacagatccctgtggaataagattttgattaccactcatccctgtggtttgtttcatttaccttatttctgatagttaaatgccgccaaccagttggtctcccttactcttgggttcctttatctccattgataacaaagacactgattccatttcagccacccccatcccattttccaggctgcagaagaaagccaccacacccagggcagccaccacaagctttccaagaatactcctcctcccccttgtgggagttgtggttagagaatggctgttgctcatcctaggtccacttcaccactcccatttctgagacttcagatttcttcctctccagcagggatcagctcaggaccagatcataaatattttaggctttgtgagccaagaggcaaaattcaacaggtattcttgccaaaggctgatagttttgtttgtttgtttaacatttaaaaattgtaaaaaccattcttacctttcaggccatacagaaacagacagcaggccagatgtggcccacagtctgtagtttgccaacccccttctccacaggatgccacagaagttcagttgaaccacataaacacagactacccttgagtccaggctttaattgtccaattaggtagattactgatgccactccctggtactcaacctgaaacactgaatcctaaatccggggtgagtatatcccatgagtgaatttaatgagatcaagccttatgttttgtcctcattgatccaatgcctttcgaaactcataccttctctcctggctcctgccaatatagactggtgtgaggttctataaatcttatgaaagatttcttatgtaagggatgtaggctgtctcatatttctccctctgagctgtgcttggacctgagtcttagatcaagaggcagtgagaggtgataggaatgagtcctgagggaatgaccagcaggttattatgcatggaaaagctgttcttcttagacagggaggacaaatctgtccccatgggcaagaagattttgtgggttcgaagttttcatatttgtccgtgtctgcccaaatgatcgcaatccagttatcagggtcacattcccttgatatgagacccctcgtatgagctgatcatgtacttggtgctgcagctctgcaacttttgttaggctctgagctttgtcctcagccatatctgccgtgggactctggaaaatgaggggttgctgcagttataccatctgaatagctacagggactttctgattttttctatgcgtgctctcaattgtacattcagagatttcagtttctcattttccttttgtacaccttctaaggctgtgagaagaagccaagagactcaacagtctttatagtcactgctgtaaccatagcaattaagtgcctctgccactgacctcccagcatctccccttccacctgcatttcatctcctaccactgctagagacaacttgaataactgatgtcaccacttgtcctggattatttgttttctgttttttcctggcaaagtggttctacctgtgtttctcaacaacatgatcaatctaatcctggaatcccacttcaggatctcaatagaaaacagaatgctcaaattgggatagttgaggaaaaattcatgaagggttatagaggcctaacccagtgatgatgaggagcagttactgggacttggagacaggcataactgtggaaagggttgctggaaagaagctgggatcctaagttaagcaacacagtcatcacttttgacattttcctctaatattttgtgcagttatgcagcaaattgtatttcaaaggtaaaccttatttaaaaccccatagcatcatatgactcctatttttaaaagtctgcaaaataattacatccctttctttagttatccttatcatattctacagctgatggaattcagttaagcagcattggttgtctattcaaaactaaattaatatagtgaggatttattttaagttttcattatttttttttacatcatagcccttgaaacatgacagtttgtcattccatgtatttgcaggatttttttttaagaaaaccatcctgattctctattttcttactttcaaataccatcacagtataatttattttaatcccttatcctgtgggtcacttttatctgatgattgctttcatttaaattttaattggggtttgaaaactctttttatggactggaggacaataagtaaacttttgtagtatggcagggtgatctatagtccaggaaatcaatatctaggcttctatatgcaggagctgttcaaggcaggaactattttcttatttatttttgaagtcacattagagttccaaatgtataattatacaggattccataagttaatagtataggcttattggttttaaagaagtcttcttcttcacagtgatattttttcaggtattattgagatgtgtccttatttatctggagaatagatatacttattctctgccttcatttcgttattgctacctagtggtaggagatgacaaaaaacctcatctaataggtgtcacttatacctcttaacatcactatttccaaatattaattgttccttggaaatccttttactagggctgttcttgatggtctgtctgcattcatcactttgtgattactgagttttcatatcaccttaaatctttgatgagctgttcctcaaagaaagaaggtcatttatcatgtctgttttactgaaagaaggacaagatgagacaaagaggtattacataattcagtgtgcctatgaagctttctaggccgtattccaaaatagatagcagtttcttcaatcaaactctgtataagataaatgagatattgtttggtaagaaccccccaccccactttgtgccaaacttgttggcaccctgcagtttacagcatgaaagtcagcttctctgcacagtgatttttaagactgctaaaggcaatcagctgttcttagagctgtgccccaatgcactttatatgcccttctgttatagcactgagcacctggtggtttgtaaccttttacaagtctttttccttctgtagactgaatgccctgacagcaaggactgttaattattcaccattctgcatacactctgattgggtggcttacaaacaacagaaatttatctcttgcagttttggaggctgggaggtccaatatccaagcactgacagatttggtgtctggtgagggccagcttcctggttcatacatagccatcttctcactgcattctcacatggtgcaaaggatgagggagctctctggagtctcttttataagagcactaattccattcttggtttggggtgggggctctgcactcatgacctaatcacctcccaaaggtcctacctcctaatgtcatcacattgaggattaaactttcaacatatgaattttggagggtcataaacatttagtttataaaaaagggctgcttggtgtatcatggccactgaataaattttgagtagcaatcttacctggtatgccattgcatttatatatgattgccactaataactcaaattactgaatttatgttgtatcgatgatgctgttttcctagtcttagtattagtagccaaatggccttggattaactttctcaatattattcattcattcattcattcaacatttattgaataccttactaaatggcaagctctgaattaagctttgagaatccaagaagactaagactttgttcccacctttcccttcagcttccctttcctaagatagacataataaaacaattgcatcacaacatgatggatcctgtcatagtcagagtggaaatagaaggagattgagtgggacaggggagttgaaagatgcccagcagcccccagggagagtgaaaacgtgatctcaagatcagctttattttctgaccaattctcatataccaagtgtggtcaggaacatatatttatgtgtctaggtagccagttgcatttcattttatgaagctaagtgattatgatgattagctatgggattaacatacgttttcagctaagcaagtcattaaaaacaaatgcaagtacaattatctcctcctttagcttcagtaaattaacatgttatagtaagaaccttgttcatttgtatgatgctaggaaaaagccacacaaatgacctgctttttactttatatttcggcagctataattttgtaaaaatgggacatgttggccatctgaaaagcacttagttgtataacttctacaagtcattgaaagtaattatcacatcataatccaatgttttcctgaggttcccatgggaagtaaagtatattctatcctgatgtggtttggatgtatgtccctgtccaaatctcatgtagaattgtaatcccagtgttggaggaggggcctagtgggaggtgatttgatcatgggggcggatttcctccttgctgttcttgtgatagtgagttctcacaagatctggttgtttaaaagtgtgcagcacctccctcttgtctttcttcctccttctttggccacataagaccatgcctgcttcccttttgccttctgccatggttttaagtttcttgaggcctccccagccatgcttcctgtacaacctgtggaattgtgagtcaattaaaccttttttctttataaagtacctagtctcagttagttctttatagcaatgtgagaatagactaatacagcaaattggtactgggagtgggcatttctgcaaagatacctgaaaatgtggaagtgcctttggaactgggtaatgggcagaagttgaaagagtatggagggctcagaggaagacaactgggggaaagtttggaatttcctagaaacttgttaagttgttgtaaccaaaatgctgatagcaatatggtcaatgaggtccaggctggggaggtctcagatggaaatgagtaacttattgggaactggagcaaaggtcacttttgttatacactaggaaagaggttggaggtatcatgcccctgccctagagatctgtggaactttgaatttaagagtggtgatttagggtttctggttaaagaaatgtctaagcagcaaaacattgaagatgtggtgtggctgcttctagcagcccatatttatatttgtgagccaagaaatgacctggtactggaacttatatttaaaagggaagtagagtgtaaaaattttgaaaatatgccagcccagctatgtggtagagaagaaaaatccattttctggggaagaattcaagctggctgcagaaatttgcataagtgaaaaggagctgaatgttaatagccaagacaatggggaaaatgcctcaaaggcatttcagagcagctcctcccatcatagggtcagaggcctaggagggaagagtggttttgcggactgggcccagggccccgctgacctgcgctacctcaggacactgctccctgtgtcctagctgctccagctccagctgtggctaaaagggccctagatacatcttaggccactgctacggaaggtgccagccataagcgttggtagcttccacatggtgttaagccttcttgtgcacagagggcaagagttgaggcttgggaacctctgcctagatttcagaggatgtatggaaatggctggatgtccagccagcagtctgctgcaggggtggagtcctcatggagaacctctactagggcagtgtggagggaaaatgtgaggttggagtcccccacacagagtccttcactggggcactgccttgtggagctgtgagaagagggccactgtcctctggaacccagaatggtagatccactggcaacttgtaccatgtgcctggaaaagctgcaggcaatctataccaatccttggtagcagccatgggagctgatccctgtatagccacaggggcagagctgcctaaggccttgggagcctagcccttgcatcaggtggccaggatatgagacatgaagtcaaaggagattattttggagttttaagtttttttattttttatttttatttttttgagacagagtctcactctgctgcccaggctggaatgcagtggcatgatcttggctcactgcaacctctacctcctgggttcaagtgatgctcctgcctcaacctcccaagtagatggaattacaggtatgcaccaacctgcctggctaattttcatatttttagtagagacagggttttgccatgttggtcaggctggtctcaaactcctggcctcaagtcatctgcccgcctcagcctcccaaagttctgggattccatgcgtgagccaccacacccagccaggagttttaagctgccctgcttggttttgaacttgtatgggtcctgtagccccttagttttggctgatttctccttttgattgggtgtatttccccaatgcctgtaccctcattgtatcttgaaagtaactaacttgtttttgattttacaggctcctaggcagaagggacttgccttgtctcagatgagactttggaccatggagttttgaattaatgatgaaatgagtcaaggctttgaggaactgttgagaagggatgattgtattttgcaatgtgagaaggacatgagatttgggaggggccagaggtggaatatgtggtttgggttttgtgcctgcccacctcatgtcgaattgtaatcctcagtgttggaggagggacctggtgggaggtgactggatcatggcggtggattttccccttactgttcttgtgatagtgagtgagttctcgtgagatctggttgtttaaaagtgaaacccggggtacaccatccagacaggaagccatgaagagaaagggtaggtgatttcacgcaggaatgttctatgagccagggcagcatacatcacttctgaccagaactcagacacgtactacaagggagcctagaaatgtcgtctagctgtgtgtccagaggaaaagaaggaactgggtttggtgaataactaaccacaatgatgataaacttttaaaaattaatcacattatctataactgcccctaaactgcttcaaaattttcacaacagcctcattcacccaatttcctattgacaaatatttattgttctcctgtaatgtgtcagagacattgagccagagtggagacagtagacgtggtaaaaagttgatcagattactgatatattttaaaggtaaagtcaataggatttgctgatggactgaatctgggatataagagcaacagaggattcaagaatgactttcagattttgggcatgagcaactgggaggataaaggatgccatttattgaaatcagagcactgaggtagagaggtcattttgtgggttggggggtggggataacttaacagtttgctctggccatgtcaagtttgaaatacctcttagacatcctagtggagatgccaaagagtcagttgaataaacaaatcttaatttttaaacaaagtacaaccagagccagcttcatgagtgggcaacccatgcagtcccacagggctctcctacatggaaaggtcccatacttgatgtaatggtttactgttgcagtcttgaaatttttaataaattacttagtaagtgctccgtatttttatttttcgccaggccctacaaattatgtagcttgtcctgggaggaattctttttgaggcagtggaaacttgtaagtgtggggttctgaaggcaaggaaaagaaaaccttttgagaagaaagagattgtgagagatcaaggaatataaagaccaaaaaaaaaaaaaaaaaacagtgggaattatcaagatggaattgctagtgatgtcgacaagagccatgtccaagggtggagtgggggaggataaaaatcctgttggaatgagctgaaaagaggagagctgcctatggccacagtttccccctgcagggagcagggaaatgggatgatagctggaaggttgtgctgagtcaaagcatgtttttgaaaaatgagagaaattaaaaatgtttgtctgctgatgtgagggattcaggagagagggagaaactgatgatgcagtggagaaagggaagaattacagggaaagtacgtaagtcaaggacaatggaggacatgtggaggagctggctgtaagaatagtcatgtgattccatttcaaaagcagagaaggcagatttctcaagaccatgtattgaagagactatcctttctccacatatgttcttggaacctttgttggaaatcagttgaccataaatgcatgggtttatcactggattttctattcccttccattggttgatgtgcctgtttttatgccagtaccatactattttgattactttagctatgtaatatgttttgaaatcaaataatgtgatgcttctagctttgttctttttgcgcaagattgccttggttgttcgggatctaaaaaagtaagaaattttgtcatttgtgacaaaatggatgaacctggaggatattatgctaaatgaaataagccaggtactgaaagacaaatactgcatgatctcacttatatgtggaatattaaaaaataaaactcatagaagcagagagtagaatgatgattgccaggggctgagggtaggggacggataaaggagagctgttgttcaacgggcacaaagttttggtgagacaggaaggctaagttctggagatctattgtacagcatgatgactatagttaataataatatatggtatatttgaaaattgccaagagattagattttaaatgttataatcacaaaaaaagataagtgtatgaggtgctggatatactaattagcttgatttaatcattctataatatatgatattatatatatatatcaaatcatcacattttatagcataaatatatataatttttattttccaaatataccttaatttttaagaaacagagaaagcagagtctatgggttccagaaggttggcaatttggggttggttctagaccacgtgcttttttttttttcttaatggaatatgaggtgaggtcagcagctgaggtggtgggaggagtcatgagtttggtaagagtaacttcagagaactgaaaggttaatttactagaagatggtaagattgctgggcaatcctgtgctgagttgccatttgagattttgtgaatatccatttgctgtcaacatcgtcgagtgatgtttttttctccagcatctttcagctgctcaggtgcaagtacagagtagagggatagttgagtttagacatgattggttctgttatggctcttattttacagatgaagggactagggttcagagaagaaagtaacttgctagtaatggacagagtttgcacataaatcttctctgaccctcgactccaggctcttaagcagtatgtcatatttcagagctgttcttaatatcatggaataaaaagtgtagattctgcaaacttctatcccttcccctagtggcgagcaggtgaataagcaatactgtaatttgtatctcaactttttttttcctactagcattatctaaaaagggtatctcagctagttaccaaatcccagccttgggaatcacaaagcaatattgtgcattgaagatatgctcatgggatagaaaaagtatcactgagtttgatcaccatctctcctgcctgctggccatgtgacttgcagcatggttgtaagaatctgttcagcattaactgagcacctatggtatgccaagcagtaaggaagatactgagaagatattgatgaaactgaattttgtcctcctaagaattatagtccagggaattcagtgagatagtatatgcacaatgttgtgtccaacacagggtgggcacttaataggtgttaattctctttgccttctctatccatttgtcctcaagtacctgatgacacctcttggtgaaaatatcaacactcactgagatactaaatgagggccccactcatgtgtaaatatccaatgatgttaatatttaaaaattagttcccatccactgaatcagaatctcagcaactttgagtgaaggcaggacccttaactgagttgagtcttcctctacccataaaaatatactgtatataactttttcctgaagctattggaatgaatacaagttagcatgattgtctactggcaatactagaataatctccctaaggcgtgctgttttctggctggaagttattttattctgttgaaatgtatttttttaaatgaaaggggcatttccttttcctatattatttgctttcaaaaagcgaagagaattctttaaacatggcaaattaaccactggtgaatcttaaattttaccttctcaatgatgcatgttctgattcaccagtcaatatttatttctaagccttcagatctcaaaaaggtctatatggtacctgagttagtgcatctcaagtaaccaacccctgggaaggtgttttatttctgtaacacaaatgaggcaggattttatgcccctggaggggagatgtttgtcttttatctctatattggggtacctaatacaggaaagagtgttaaatgaataaaggaatggacccacagtggggaaaaggagcttgcttgatatcagtgtgtttgaatttattaccatgaatctcactttctaaaattgctagcactattaaagtttctgacagtgaagcaagccattggaacatgtttgtggtgtgaatattaggtgtattattatgcactcaatttagcttttttattttatataatttctctccaagtggaaatcatgttctaggtaaaggaacaagaaattaagcagtgtggaggttagattcaacttccactaatggagaagatgactttggataactattggctccagtttcatttggggattagggattggattagaatttgtaaatctaattgttgtttctctgtaaaattgggagaccctcagggttgagagcagatcttcctcttttgcatctatttcagcacctagcccagtgcattgtaaatgcttaataaatactagatgaattaaaagtgaagtattctatttattctttagagaaagatacacagacgtttttgccaaccagcagaaatgaaggcagcaaccacttctagtttatcttgtattcctagcatcaggcaaaatgatagggacatggtaggcatccaacaactgttaattggctcctccaatcacccttttttgtcatccttccacaggaatttattgaatgccttctaagtgtcagaaacttggtttatattaatgaaagaacacattccagaggagtagttttatttgtataggcaattacaaagtaatgggatacaggttataatagaagtatgtaaaatttcactgaagttcacagggaggagaacctcatctgctcgggagttggggaagacactccaggatgatgagggttgagctattgaaagaggaatgggatttgttaaagtggaccagggtttgagggtattagaacacactccagttagagaagatggcacacacatgttcttggagctgtgatatagcacagtacacattgtaggggtagtttagcatggctataggaagaagtgggtaacataggggaaggaggtatggacagaattgagaaacagggatgattctgggaggttattagaggtcagagtttgaagaacatctcaaaacaggaaatactgactggtatctgagcttctctagaaggctgaagttaaattctataggtcatgtctcagtaatagcagtggtagtaatagcaatggctaatatttattgagcatttgttagagacaggtgcctttctaagcatttcatcttcttaataacttataaggtagatattgtctttatcctcatttgacagatgaggagattgaagcgtagaggtgcctcattcaaggtcaccgagcaagtccagactttaactcagagggtctggctgcagaatctgttcttaatcactatattatattacaacgcagaaaatatagtgttgtaatgctccaaagttaatttatacaataatacaatcacaaggattagaacttcattctcactttaaatccaaacagcagcatgaatcactgcttctgcctttcatatgttttttaatggcttgatcattgtcttcctgatgatttgattatgtgaggagggcaagttaaggtcactgccactaggtgctcactgttgttgcccatatgcaagacctcagtaaaagatgtctatatggcgaatgtaacttttagccaggtctttgcgctatgagagtatttagtctgtctgatctttgaagatatctatgcatggaccattggctctaaaatccccctctttgtatccccacaacaatgcatattttcatctagtgtactcttaaaaggggccagattttgtgaacatagatgcctgtccttcagagtttatttatagaatatgctccaagctcaattcccacctatgagtgagaacatgcggtgtttggttttttgtccttgcgatagtttgctgagtatgatggtttccagtttcatccatgtccctacatggacacaggaaggggaacatcacacaccagggactgttttggggtggggggaggcgggagggatagcattaggagatatacctaatgctaaatgacgagttaatgggtacagcacaccaacatggcacatgtatacatatgtaacaaacctgcacgttgtgcacatgtaccctaaaacttaaagtataataataataaaataaaataaaaaaagaagaaaggcaggaagaaatggaagaagaaaaaaacccattcctttatattataatacaaatgcatattcatattctgaattttaacattaacattataataaaactgtttttatctttaggaaaaaaaaaaaaaagaatatgctccaagcatttgcttctcaaattctccactattggataacaaataagccataatgtaacaggattttcatttaggtttttccattaagccttagccatggattgtgatggtatctggttgaggccagatctgagtttagtttttactctgctgccgaaattgttgtgtgatcttgagccagtcattgcactgttctcaacctcagtttcctcatctggaaaatgagggtgttggagcagacgatcagtgagctttctcccaactcttaacattctctacttgtagagtttttataatcaaacacaattatgtaaaagagagaaaagcagttgtcatggaaactgttatttaatacataacactgtttcttaatcagcctgttttccttgaagaaatttgcttctcttgtgatacaggcccaaaggtctcctaattctgcctttagaaaggctcagatttcagttccatcacttaagaattcaatgcatggaaccagttacttaaccaccctgtgcctaaattgctttattctaaaagtggtattgacaagaatactgacctcatagtgtggagcatcaggcctgatgcacaacaacaaaaatgttaatgataataataccaatacagataatattaaaaatatctaatgtttattgagttacttattgctactctgtgctaggcattagtaaatgtattaactcatggaatcttcaaaccaaccctgtggggtaaatgttactattaatctcataattagatcaagttacgtacttgtcccaagtcacacaacttgaacggggtggaaccagaatacttgtcgagctacataggccaatttcagagcctacactctgaaccattaacgtttctcaataataacactgttaatacataattgtgaataaccagcatcttttatggcctttgctatatgcccaaatctgttctatcctatgaggtagatgatatcatcatctctatttcgtagataagaaaactgagacctctagaggttaattaaaaacacatagttggtagtagtggaggcaggacttgaactcttgcagtctggctcctgagttcatatttttaacgatgatatctcagtatgagctattattaccctacatccagttcagttttgtgtccatgaatgatgtaagatgattatagctccacccactagatgatgtgagcctttggcagtcttctggaactctgttttttttgtttgttttttgtttttttgtttgtttgtttttgagacagagtctctctctgttccccaggctggagtgcagtggcatgatcttggctctctgcaacctctgcctcccgggttcaagcagttctcccttcctcagcctcctgagtagctaggattataggcacccgccactgtgcctggctaagttttgtattttttagtagagacgaggtttctccatgttggccaggctggtcttgaactcctgacctcaggtgatctgtccgtcttggcctcccaaattgctgggattacaggtgtgagccaccgcacccagctggagctctgtttatgctctttgttgattccctattgtgctcctaactaccacaatcgtttatggaaaagccaagctgcgacacaagtatcttgccatgtcttataaaataaaacaagaggagataagtacaaaagtctatgaatttcaggccagtaagctctaaaatttcaaacagcaaatacagtccgtaaaacatttgagagagagtttacttcagtagctccaattatctgagcaatgttttccaaataccttagcacctattgatctaagagtgaagtaggagaacttctttaaagatcagatagtaaatattttcagccttaagggccataaggtctctgtcatgactgtttaactctgttaaagtgcaaaagcagccatagatgatagtaaacaaatgtatctgtgtttcaataaaactttatttacaaaaacagatggtaggccagatggcccagaagccattgcttactgacctctaatctaagagagagatagcctactgataaagtatttaatgccaatgggttttgggataagtggcctcttgtacgtgcataaaagcaatagtaatgacatgtttattttttccttccctcctcatttttaatgagtcctgatcttgctgttccacatttactaaattaggtactggcaaaatgtgatagtgtaggcttacactattcacattactatctgctacttgactcaatatattgaaatttgactttaaggacagactttcagcagtaggaagcaatgttgacaaaacaacttttaaaaaagatcatatagaatgaaaacgtggatatgtgccttgttttgagctatctcaaatccttttgctaaataagtagggggtaaattattttaaatggggaaaatggaacacaatttttaaatattttaaggcatttcaaatgggccttaaaatacaacggttgtcctctggagggattttcattaattattaaccatatcagaaatgtaattaagtcagtgctgaaattagtcaagatcagctttataactcaaatcacataaataacatatatgggttctatgaattaatcattgtagatttgattaaaaagttccatttcaaagttcatgcaatttaatgtcatgttgtttctgtttttcaaacatttgttaaaccaactgtctatagaggcacattatatggctaaagatctaattgcaccattgttagcatagaactgtagtcagtaaataattagtggcttgcattgtgaagttttgataaatttttaggcttctctgaattaacatttgtcttatggtcagttaaggaaattaaatatcgattaaggaaattcagacagggcagcttcacagtctccctcctccacagggccccccatgaccactgccttggaggctgtgctgactttggggaaggcctatcagtggctgtgacctgggttaagctgatggaccaggggcatttttgagaatattgattagattaaggagaggtggggacctgtattagttttttattgcttctgtaacaaattaccacacactcagtgccttaaaatgtcaccaatttatcttacatttctgtgagttagatgtctggtgcaggtctcactgggccaaaatcaaagtattagctgggctgtgttccttctgtctttctggagactctaggggagaatctgttttatggcctttgttttttgggatggaatctcgctctatcacccaggctggagtgcagtggtgcgatctcagctcactgtaatctctgcctcccgcattcaagcgattctcccgcctcagccccccgagtagctgggattacaggcatgcgcaaccatgcccagctatttttagtatttgtagtagaggtggggtttcaccatgttgtccaggctggtcttgaactcctgacctcaggtgatccgcccgccttggcctcccagaatactgggattacaggcatgagccaccatacccagcctcggtgccttttccagctcctagggctgccacatccctagactcatggtccctctttcatgtttgaagccagcaacataatgtctctctgatccaagccaccaaaggttctctgtttttgaggtcttatgtgattagattgccccccttccttttggatatcccaggataacccctccatttcaaagtccttaaatctgcaaagtccctgttagtcccatgtaaggtgacatattcacaggttccagagatgaagagttgggcattttagcagagccatcattctgtctaccacacaaccgacattcagtgtattggattcactgtcggcgcttcctctgtttaccagcccatcttcttatgtttcagcttcttgtgtcctgacacccatttttgtctcagtccactttaaaccttgttcttctcagttctcaatttctctgaccttcctttagcatgcagtccagtggaccttcttctgctgagagcagtattgctggccaggctgtctgggttcaaagctaggctgtgcctcataaacatgacctttggtaagttatgcaatatctctgtaactcagttttctcatctgtaaaaggaggataaagaatgtgcctggactacatatgattgatgtggtgattacatgcattaatatattcatcactcttagaacaatgcctgagacatagtaaaccatcaatacatgctaaccattgttgctgtgaatttggttactctccttttgggtgctggtagaaattccctcaagattttatctgtgatttcttgtattttcttcggaagttgcagcttctctcaaagctttagcattcatccctaggcaaagaactccagctggacgcatttccaagctctatacctttatttctggcagtactaggtgaacatttttgtttggatgtcccaggggagccacaaagctgaacttaacatcttgcctaccgaaatattccatccgtgttcttatttctattactgtctttagatccgaagtcaatttttattctttccctctcatttaccactaaacatcaaaaaagttatcaaatactaaagactctactttcaaactatcttttaatctatttgtgtccccacttccactgctctgatccaggcttctatgaccgttaccctgatttgttgccccagttgaagtagaacagtattcttaaacctttgctctgattatgcaacccccacccccagacccgcccctcccttccaccttgctccagcatcttaagtgattccccgctgtcttagcatggagactacatccagtgtagcatataagtgagttttcttcaggaattccctaaaaatttaaaaatttcatacaaaagtatgttgtgaagatcgttgctttcagtctcaacaaccagtcactgctcacgcatcttaaacatgcttgaaacaggacatcttttcctttcatgaatgagccttgttctttcatacctgaaccttcaccatggggggcgtgctcttctcctccatctctgcctatgagaaatctacccagcaatgaggcttagtgacaatacccaccactctctttgtgaagccttccctggtagcctttccctgaaccgtgtaagtcagaggtcagcaaactacagcccacaggccaaatccagcctattgcttagttttataagttttattagaactcagtcacactcattcgtttatgtattgtctgtggctgcttttgggtctacagtagcagagttgagtagctgcaacagagaccatatggcccacaaagcccaaaataaattatgctctggctctttacagaaaaaaacatgctgacccctttctcccctcagagattacatagtctaccttgtgcatctttgacatctccttctgttagagtcacttctgcacaacttttttcctggcaagaacgatctcctcttgtagacatagattctgcctttttcatccttgtttctatccttgggcctagcaggggtagggctcagtagttgttggggacaatagattgcctgtaaaaaaattttttaaactacattttgctcacttggctaagtgacaaaaatcttatataaagcagtgttccctttagggggttagtgcttatcatttgatgtttctggtagtaaaccatttcatgtttcacttcgagaagcgcttttttgactgccaagataagctgcaaaattgagtccaaggatcttaagaaataatattcctaagccatttaagcagctcacttggtgatctcatttaataagtggtccactgaaatttaggattgcagagtatactttttcattatgcatgggtttcaccatgtgaggtagatatctagttcctactcagctatttttgttgactgcctagggtatgataatatttgaccatgctactctcttatgaaaaatgccaaatagttaaatttgttttaggaaaaccagagattcctctcttgctcctaaaggagaaaccaaatgaccctgggtttctttcttttttttttttctttctaaaacccaagaagtattgatgtcatgtcctcctgcgaagtgcattagctgtccttgcctttgctgctttagtactggggaatgcctctgtcagacagtgagctcatgagtgcaaggactctgtcttttaatttctgaatcctcagtgtttggcacagagaaagctcttgacaaatatttattaaatgaataagtcaataaataattgaagatctcagaaagaaccttttccccaaggtattacttttaaactataaacttacaattgcctacttctatctagttcacatccttaaatatcacttgggagaatttcctgttgtgatgatatagagtttatgtctagctgtgggaggtcaagggtgggctacgttgtgcctaagtccacagaacacaaggaaaacccttaaacttttgtgaggtgaccggaaataaatatctgcttcctaagtatttccctgagtgagaatgtaaaggtttaagataaattaagtatcacagggtgagacaaagtgagaaattcaggatttagattggcattcagagcagggagggaaaaaaagatgacccaaattgacacaaaatgagaaaatcttgggaaataaaagtaaacggtagcaaatgtgatgtatttgagaaccttacaaggaggttttcagtatgttccagttgatttataggatgtagaaacattaagtgttaaaatggaaaggggtggattttcaagactctcacagtgagggttcagttaggaatcagaattccaacaaacaaacagattttaataaagatgttacaaaggagaggctgggttatggaaattgacaagagatggtgaagcacccagggtctagcaagggtgaggagcctttataaaacatgcctcaagaggcaagggcaatattggagccgcgcaagagcaggagccctgggaaaggggctacccaataggagtagaccttgcagagggctttccaaatggctagggccctcacaagtattcacacaggaagggagcagggaagaagtaactcagcctgtttttcctcccaacctttagctccttcttgtgcctccattggctgaggccaactggaggcctgtgagggagcccaggtgatgaaggagtcaccttcccaggacacagaacaggtggagaatggatttgaagtaggtggaggcccacaaaacgtcaccagcacagggaccatctccagcctttcagtttacaaatgaggaaaacgaggcccagactgggggaaatgaacaccttggaaattcatccctttcagccttaacacttaatgttcttttttttctttttataggtagtctcttatttttattattattattattatacttcaagttttagggtacatgtgcacaatgtgcaggtttgttacatatgtatgcatgtgccatgctgctgtgctgcacccattaactcgtcatttagcattaggtatatctcctaatgctatccctcccccctccccccaccccacaacagtccccagagtgtgatgttccccttcctgtgtccatgtgttctcattgttcaattctcatctatgagtgagaacatgtggtgtttggttttttgtccttgcgatagtttactgagaatgatgatttccgatttcatccatgtccctacaaaggacatgatctcatcattttttatggctgcatagtattccatggtgtatatgtgccacattttcttaatccagtatatcattgtcggacatttaggttggttccaagtctttgctattgtgaatagtgccgcagtaaacatatgtgtgcatgtgtctttatagcagcatgatttatagtcctttgggtatatacccagtaatgggatggctgggtcaagtggtatttctagttctagatccctgaggaatcgccacactgacttccacaatggttgaactagtttactactcatctgacaaagggctaatatccagaatctacaatgaactcaaacaaatttacaagaaaaaaacaaccccctcgaatagtggacaaaggatatgagcagacacttctcaaaagaagacatttatgcagccaacagacacatgaaaaaatgctcatcatcactggccatcagagaaatgcaaatcaaaaccacaatgagataccatctcacaccagttagaatggcaatcattaaaaagtcaggaaacaacaggtgctggagaggatgtggagaaataggaacacttttacactgttggtgggatgtaaactagttcaacacttaatgttctatatcctcataaatcagtgttcaaatgagaaagacaataaggactgactgaataaataaatggaagaataaattaatttgaagaataaatgaatttttcatatcataaatccatttttcaccaacatgtttgctaggtggcattctaacctatcagtggaccataatatatttaactattgccctattaacagttatttttctagtttctaatattactataatcataattattatagttatgtcagtattaattataattatgatactaagtactatttattgagtatgtcaggcaccatgctgtgtgaaaacatatactttttttagcccttattatgaatatttgaagtatgaatttaaactcccattttgtaaaagaggaaattgaagctcacgtagtaactcaatcataactcatcagaagttccacagctactacaagatagacccagaatatgcacgaatatccattcaacacaaaagtccatctctctattgcttccctatttaataaaaattttgaatggaacattttcttacgtaactgttagtatgtcttatcattttcttgagataacttcctagaagtagaattcttgggtccaaagagatgatcctatttttaagtagtaagaaataacatttagttgcaatttgaaacatattaaatatctgtgagagaaaccttatatgggtatgaaatttttagttttgtcaaatgatctgattgcgaatggtgagatagccatgtctgagagcccccattttcttatgttaccagcagtgaagagcatcttttttaatagcctgtattttttagagcagttttaggttcacagcaaaattgactgcaaaatacagacattccttgtgtatctcctgcccctacatgtgcatagcctcctctattatgaccttcccacaccagagtggtacaattattacaattgatgaacctacattgacacatcatcacccagagtccatagtgtgtattagcgttcactgttggtgttgtacattctgtgggttttgacaaatttattacaatatgtatgcaccattatagcattaaacagagtagttttattgccctaaaaatcccttgtgctctgcctatttctccctcctttcttctttcctcgtggcaaccactgatctttttactgtctccatagttttgccttttctagaatgccatgtagttggaactatgtaatatgtagccttttcagactggcttctttcacttagtaatggttcttgaacatttaaggtaagtaaatggacagttaaggttcccacatgtcttttcatggcttgacagtttgttttgttttaatgcttaataatattccattgtctgaatgtatcacagtttatttgtcagtttacctactgaaggacatcttggttgtttccaagttttggcaattatgaataaaactgctgtaaacattcatgcgcaggtttctgtgggaacataagttttcatctcacttgggtaaataccaaggtgcatgattgctggattgtatggtgagagtaagttgagttttgtgagaaactgccaaactgtcttccaaagtggccataccattttgtatttccaccagcagtgaatgaaggttcctgtcgcactgtattcttgccatcatttgatgttgttggtgtttttgactttcactattctaatagatgtggagtggtatctcgttgttttaatttgcaattaattacccaatgacatctacattattttttaagatttatttttattttaatattttatttatgtacttattttcaattaacaaataaaaattgtatatgtttatcatttataacataaagttttgaaatgtgtatacattgtgggatagctaaatcaatgcaattaatacatatgttatatcacatacttgtcaatttttatggtgagaatgcttaaaattactctgttagtgatttttaagaatacaatacattattattaagtatacccactattttgtataatagatccccagaacttatttctcctgtctaaatgaaattttgtatcctttgaccaacatctccacaactgagctccaccccccagcttttggtaaccgccattctactctctggtacttatgagttcaaaattccacaaataactgagatcatgtggagtttgtcttcctgtgcctggcttattttacttaatgtcctccaggttcatccatattattgcaaatgacaggattttccttgtttttctttttaaggttgaatagaatgtctttgaatatatccaccacacattttctctgtcaatttttccattgatagatacttagattccatattatggctgtgttttggctattgtgtctaaagttgcagtgaccacaggagtactgatagctgttggacgtactactttcatctcctttggctatatactacaacatttaaagagttttaaatcactctttatgaattaaaaaaaatctcaggttgttttcactgtagatgggctagtagggttgaggaaaggagagtgggaaggctaagctattcaaggttgtcttcaatgaccactttcccttactcaccccctcttccaaggtcttagctaatctcccagggactgaacactctccagacaaaatcaacgtaacagaagtctggcatttgagaatatttgagtttagttacctgtagtcttccttaggtatccctagaaagattagttcctggataaccacctccctcccttccccagataccaaaatgttcaagtcccttacatgaaatagcaaagtatttacatattacctatgtgcatccttccatatactttaaataatctctagattacttataatacccagtacaatgtaaatgatatgtaaatagttgttatactgtattttaaaatttattttcctttattattgttttaattgtagtttttttttttctgaatattttctatccgaggttggtttattccacagacatgggaactgcagataaggagggccgtctgtactttgtttgatacctgtcctgccggctccctgccacccccggcaccctccgtttctttctagaactatttacattaatgtctactgtgagctaggcattgtgataggcatgaaataagacacagtcctggccccacattcaggggacatatatatagacaatcacagtgcagttgggtaggtcttggtgtagttatgtaccaggtgctaacagagtgcaggggagggacatgtgagctgagggttctggggatgcttggtagagttaggggttgggaataatggggtttcttcagaagggtggtgaatgagctgatcttaggagaatatattggattagggctatgaaagagagcatttcaggcaagaaggaggatttttttttttttcatgaactcactacttaggaccaaactgtgagcaccagcactgtttcattttcaccttatggagaccattattggaggtgtgttcatcaagttttttctatgaaccaacaaacccaaatctcagtggttcacacccagaaacatttgtctttttgttcagagttttttcaggcagctgttgtttgcctgatattggctggtttaagtaaggcttggtccaggttgcagatcaggtttgagtttgttcttagtgtctccttctgggacccatggctagtcgggacatgtgctttttatgataatagcagaagcaaaagagaccaagcctaaaccacacaagcacatttctgctttcatctgtttgctaacatccctttgactaaagcaagtcatgatggccaagtccaaaaccaatggagcagggaatataccttctctctctattgggaagtactaacaagtcacatggcagagagaagttatgaattacgaatcaggggcaataatctactctgccactgtggtttcctgaaatgaagtcctgatagaatttggtcgcagggggattaaaagggagattctcactcagcctcagcaacaggaaagaaagaagttacaaaaagcctgtaaagaatctaaaggaggatttgaaggagagaaagcaccaataatctaactgcagcactttatttgaatttaagtaacgctggtcaaacattcttacaggctcttaccctttctgatctataaattcttcatgtagatattgagccaaaggttagatctagaaaatattatatctagtccttagcatgttggtttcttttcaatgcgcttaaacgctcagttaacgtggctttagacataattgtaacagaattacaaaggacagcaccttggcagaaagttcttcctggttttgatgtgttgctactgccagatttttgtgacatgctgatgctaatctgtcaaatagcctgacactaagtgagaagagaaataaaaggaggcatgacagggccaaggacctggtgtggtggaggatggttgggcagtagcaaatcctctcatcagccctactgagactaagcaacaacctatcttcaggtctctgggttcggtggttggggggagcgggggcggtcctacgtgggttagaactcatactactctcagaaatgcacctactttcagttacccaccaattctgatgctcaaagcccctccaaacctgttttctgtgggtccacctgagctcgcttaactaagatagcacaaattctgccccctcttatgggaacatacctaagctaatgacacatgaggtgctacctcttccgcatgtatacctacgtgtttgagctttttcctcccttggatgtgggagggtatcagtctattttataaacattttgtcaagtgtcctttgagtcaaataagagaggatattagaaaagctccagaaaactttgggaggccgaggcgggcggatcacgaggtcaggagattgagaccatcccggctaaaacggtgaaaccccgtctctactaaaaatacaaaaaattagccgggcgtggtggcgggcgcctgtagtcccagctacttgggaggctgaggcaggagaatggcgtgaacccgggaggcggagcttgcagtgagccgagatcccgccactgcactccagcctgggcgacagagcgagactccatctcaaaaaaaaaaaaaaaagaaaaagaaaagctccagaaagtttggaaaagtaaattcagacctgagagtaaccaagagagttcccaccttccttctggtcaatgttccaggaaggcgaagcactggatttaccctccactttgcagttaaagaggaaactcgaaataaatattcccttctacaggtttttttttttaattaagaatagatgagtcttatgttttgtgtgtggtggtgacattcaaaacatagtttttcagtgttttgaaaagtaatttacctaagaaatgacaagaagagtaatgcaacacatagacagcattgctgtgagttgtaaaacattgacagaacgacaaatgttcctgtggcatagagtccttctgaatcacagaaatgacatttggatgaaagcaaatcatttttacataggcacactgctaactgtgcagtgaagccagaaatagcacaccttggaagtgggccagagagaaagaacacctaagaattttatgttattcagaaaaattttcactttttcggtaggatttttgaggagtaaagaaaatatttgagagccttaaagaaaatctgagctttgttttttttttttttttgagacagagttttgctctttgttgcccaggctggagtgcagtggtgctatctcagctcactgaaacctccgcctcttgggttcaagcgattctcctgtctcagtctcccgagtagttgggatgacaggcacccaccaccatgcccagctaatttttgtatttttagcagagatggggtttcaccatgttggccaggctggcctcaaactcctgacctcagatgatccacccgccttggcctcccaaagtgctgggattataggtgtgagccactgtgcctggcctttgatttttatttattaaaatattagtcatttattgtgttcccgtatactcatcaagtgtctcttgagaaaactcagaccaagcaggaaacataggcttgatgtttaggagacagagtaaagtgggaggcatgacatggggagctgatcacacagagattacagatggagataaggagtgcataacatccccaaggatggacaggatggagagaagaaaaggccaaaatcaaaactttggaaaatgcccactgtggtgggctgataatggctcccaaatatctgtccacattctaattcccagaacctgcaagtgttaccttgtttgaaaagagtctttgcatatgtggtttacttaggaatcttgagatagggagattatcctccattatccaggtgatccctaaatgtcacaaccagcgtccttataagagagaggcagagggagattagacacaaacactgagaaggtgatataatcacagagatagagattggagtgatgttgtcacaaggcgaggaacaccaaggaatgctggcgcccgtgagaagctgaaggaggcaaggaatggattctccccagagcttctgtctacctttctggagtcttgattggcctacaggtgttcagtttgcacttctgtggaaacagggaacatacagcagtgacacagagccctgccgacaccatggtgagagacacctggccttcagaactgtgagatgataaaatcttgtttgaactcatcctggttgtggtaatttgttaaattgggctttgggaactaatatacccacctttgggaacaggaacagaaagagtttaaaaaagtaaggggaggtagcaagaagcttaagtgtcatgaaaacgaaagccaaagcaagagtttaaaaacagatgagcagaggcaatggtataaacgctagagcctaaagcctaatgggtaaaaatgaagattgaggagaatcattgatatgatagaagctaatgatggcagctaacttgtactgagcacccattatgctggacattgccataagcactctgcagatataaactcaattctcacaaaaccctatcaggtatgaattattgttaccccattttacaggtgaaaaaactgaggcaaaaatttaaataaatgcattaagtaacataggtggtaaatggtgtggccaagatttgagcccagaattctggctacagcatccacattttagccactactttgtactaacctcaccttatcccccaaggtgtgtgtttcccaaggttctgactttgggtcttttatcaagtaaggtagatgatgtgtctcaagaggaaaaggtatttttgtaatgattatttgaggttgaaaggaggaagattaggaactttatatcacctggaccccatcttctcagctgagttggagaggaggctatctgatgaggctgagggaggcagctaagtttctgacctcagggagcctaggaaagacagtgaggatacaataaaacaggaagcactaaatgaaaaacttgctgcacagtgaagcatgctcagtgttatttccttgactggcttttggcactgtgccatctgtgcccaagatgtctgcaccatgtagcgtgccaagtgcagaaggaaaagggactgaaggggcatcatcgccccacacctgccctatggaaagtactttgttcagagacgaagaaggaatccgaaaactgcacaatatgacctttgtcattagaaactcttgaacgtttgagaaatggaccatccatgtactggcagatgaatgagagttcaagggcattacatgataagggctaattgcaagactagagactggagtgggtcagaggaactgaaatgtgtcaaggggaaggtacagctctagatagttcttactaaggtctttgacagctgatcaagaatcaggaggacatttcagcctggacgatgccatgggccaagcatgggagaggggagaaacagatggttctttaagagcttaggccaaaggactctcaacattctgggcttccaatctgtcccccacccaggatagctttctgttaagttactattcagaaccactgcaggcttaaaacaatgagtgtttatattggtattgaatccattagactgcatggtatagtggaaaaaggcaaggttaaaatatcagttaatcactttgttgtgtgaccttggtcaagtaacttctcgagcctcagatttcccatttgtaaaacatagataccaattctcaggctcttatggttgtgatgatacattaatgggataatgatcaatatcgagtgtggtgcctgacatttaatagatagtgtcaacaatttttttttagactaagaacaaattggatgatgtaatttattggctgacaattcatttctaaagatgtgacttcagaatgttctataaatgttaacattttcaaatgcccagagtatattttctatcttgcatactagctatttatttacaaatctctttctcccattgacttagcccttgtgtgaggagagctcttttaggctaggccctttatctgtactttgaggacccttaattcctagaggaagaacatggatttttctcaggcattaaagattccttccaaatttccatgtaacatacccactttcctcatacctatcttctcctggtaatattcttgaattattttttatttttaacattttttgctatgatctacattattatattttaaaaacacaatttcaagttatatattttaaaaaaatgccatttatttccatgatacaatttctattctcatttacgtcattttgtgcttccttcagaaaagttatataaaagctaaaagtgctgtgctgagtcagaatcctgttcccctcagcccaataagcctctgcaaaaaggaaaagaagaaattttttcaggagagcagtctatttcatatttgcagactgagagtgcatgtatcatctgatgttgacttaaaatgtctctccccttcccttcatctgtcatccacaaagctgtttgcattcttctggagtcttgatgggtctacagatggttcagtttgtacctccgtggaaacagggaacatgcaccagtggcacagagcatggtggagtggaagaaaatcactccaccatgatgtggatgatgcatgtgtggttgatgctgtggtgtctgtcctacttatagagagagacctctgggagtagaaggctcatacttgcctaggcacctgagcatcagagtgcctgggggcagcctgccagcctatctcctacggggccacccagcctgacagtcctaacctgggtgaatctcctgagaccaaggcttaggctcacagcattgtgggcttagaaacaacatcttgggggcagactcataccaagcaattcatgtggaggtagatgtgtgaaagcccaggatgtccatctgttagctcacactgagaaccctagctgccaggtagacaggaacactagcgtgaaaactctcttcctgtactggaagcccaatcctaatccataggttatccggtgagcactgttggaatgagggcagttaaatggataaaggagagtaaaaccatatgtcaggactgtctggcggtgcaactggaattcttgaacttagtctgtttcttagatgagtgctgcctatatttgttacagtttgttttaatgatttcctggcttaacaagccctaatctgatttgagtcatccttccttaagatttgctagagtttacaaattggcccaggtcatatcctctttttcccctgggaaaatttaaggtgacccttcttacctttgacatgacctatgattggtgattttgcagtttacctcttagcagacttgttattttccctgtttctgggtttttagtagacttcttattgtagctttaaaataattttttttacattccatttttttaatgttcaatatccattttaatgcatacaacaacattataaggtagatactgttttatatcccatttacatataaagaaacctgagactcagaggctaatgaacttgcctagaaatacctggccagtaaaggaagaggttgtgattcaaacctacgcactctgattccaatacttaagacatacctgtggctacttttctgaatgtttcacatgtactatctaatgtaatccttacagttacacaatttttattaaaaagtacagttctcactcagaaagaaagaaggatttgcataaaaaagaatttcaagcccagaaatactaatattacaggtgtcaggaatagtaacatccagcctacttccagcctttctctctctctctttctctccttccctcctttcttttctccctacttccttctctctctctccctctcccaccctccctccttctttctctttttatttacttacttatttatttatttttattatactttgagttctagggtacatgtgcacaacgtgcaggtttgttacatatgtatacatgtgccatgttggtgtgctgcactcattaactcgtcatttacattaggtatctcctaatgctatccctcccccctccccctaccccatgacaggccccagtgtgtgatgttccccttcctgtgtccaagtgttctcattgttcagttcccacctatgagtgagaacatgcagtgtttgggtttttctgtccgtcaatgatagactggattaagaaaatgtggaacatatacaccacggaatactatgcagccataaaaaaggatgagttcatgtcctttatagggacatggatgaagctggaaaccatcattctcagcaaactatcacagggacagaaaaccaaaaaatccaaaataatttttaattctctttcttatcggtgtttcttagcaagaattcttctgtagtgaagaattttccctcatcaactaataaaaaatggctagtaaaggcaggataaatgcttgctttattccctttattaatcttctgagtaacgaattggtatcttaggaacctccaatggtgaacaatgagtgttttaaaaagatacacattgaactcagcctttctttatacagttgatatgcatcagtagatggagtccatattaatgatgtaatctatataggctgatgtaatcaattctacttttgaggagattgacatgatgtctggaatttgctttaaatactccagcatctaaaaagcaaatcaacaacaaagggagtgggatcgatgaaaaaaaattggaaaaatcttgatatttgttgacactggttgatgagtacatggagttcattatactattcattttgcttttggtatgtttgaaatatttccaaataaaatagttctcaagatgcatataattctaaggttatcaagagtgtaaatgtgagtttagccaacaactttggcctatctgtgaatcttgtggagaaagttcttgatttttattgaaattccagataccccaacagtagttcctaagccctactgctttggcaacagcatgtcaaatatgtgcacattttcccagcattttggaaggaatttttataagaattttcagatttgactgattggatcctgattcataaaagtcttgtcttggtaactaaggatgtctacttttgagtgatgcataccttaagaatttgaaacatggttgcttctgttctctggacttcatatgagagcgtaacagccttttagccattctgaagtgacttcttcagtctaatggtgccatttctcattccaggtttaagtttatctattcatggggctgaaaagcgtt

SEQ ID NO: 15416 - DNA, 410762 bp, Homo sapiens
atggcctccctcaccgcatacggtaactggggccgtcgcgggttcctggggcggcggggcggaagggaggggcccagggagccgtcgaaacacccggggaaacttcggggttcgcctctgcggaggggtctggaagggagggagacggcggccgtgcgcgccgctcctgaggggccgatgttccgcggggtttcgggccgcgggtaacccgggaaccgggtgtctgcgggaaaaacgcttcaaaatttgggaggatctgggagcttcgggactctagaaacattcccctcgcttccgaccactcaggggaagggacgcgggtgttaagtcctcctctagcggggtgaggcttggagttgggagatgtgcgttcagccagcgcttatcttgtccctgactgaccttgggcaagttatttaaacttttcagcctctgcatttctccgtctgtaaatcagagagatgagaacatctctctgacagatgctgtggagttaaaataatatgcactgtaacatgtttttaatgcaaaaaaagaaatcagtttggaaataaaagtttatgaaaaaggaaggcattcatcgttcccctgcccattgttttgttaaataaatatatatgaatagacatatacatatatacatgtgtggtattgcatggttctgaaggaaaacaaaatcactgtgtgaaggtttcaggctcagctagaaatcctagcgcgctggggaagccagcaaggcttcttatcaacgttcttgcttgtgtggataaagcaattctctttagccctttatcagaaatactgctgagacttggttataggaagcagaaactcaagtagacctccctcccttcctcttgcttgcagtcagttgttgcgataagatctagatttggcattttaaaggggaaagctgtgagcaattgatggggaatgttctgcagggacatctcaaagcctgggatgggtgggacggaaattactattctttggtgtggaatcttcattctctaggccagtgatgtcccctgctcattttaccaaggttaacagggtcagtctctttctctggatttaaattgtttaaaatgatcatttaggtggctcagagggtttgcaattgatgcctgggaaccagtaacaaattgtgagcagattacaaatttcagtctggtggcctgttttttctttcctccaacccccttcccccgtgctcagaacatttttgctgggatttaagttgttcttacctgcacgcacatttaacactcaacattgtggttcctgggttaccatctggggataattcaatatgctgatggcattttaggcatattcattggcaaaacatctatttttacaccttttcctatcagagggatctaacttctgtttttttacatcattttagattttgtatgctgccccatggatactgtcagtaataggtttacgtaatgatcagttctgtacgtttctagaagctttaaaagcttaattgagcacccaggtggagaaaatgaagtcagaataagtgaaatcattttgaaaagaagtatatttcagtaattaaaggaaaaaggtggcagatctttgtttttggtgattaagaattacacaggtttctcattagacccttaaagagaactgaagcatatttcaataaaaatatcaattagaatttctgcttgacacattctcctcctgcatccatccctaaaatgatgcatatacttggccacaaattccacgttaattcttagatctgtagcagtgtgagctaaaccatgacagaataaattagtccatcagggttttcaacctagtgaacaagttaaggagaaaaacattgagcacatttaatacattcttcacccactggatactattgagatcattatctgatgagagcttggtccagccctggaaccctccgcaaatcttctctttgacaattgaattccttgtaaaaaatgtcccctgtcaattctgttggatttgggtttaggcatcatgatgggggatgatctaaactttttgcctggaatttatagggttcaatttttgtgtttaattgactgatttaataaatgctttattcttatctttagcacaggggctgccaagagaatgaacagttacactgtagaccatgtgttttaggttcacaagatgagagagaaatttggcttatgtaggcatttcattagcagcagcctctagtaatcctcattagcttcccttctaatatgcatttctgatcccgttctttctgcattttgatcctgctctttttgtcttttgagcttgctctttccgcattttagtatgaatttttactttcaggccaccatctagactcacattctagaaatgagaaatgagattagggtaatcagtaactgtaatccccaccggtaaaaatatgttcaatgaatgatgttatttttagaattctgggtttttaaggcctcaaccctttatactcaccactgacatttattttcttgtcctttaaatggtttaggttcttaaccactttaactcattaaataaccatgcgcatgagactaaggatgggagacaagtattttttagagagaaatgactgggactttaattgttcttggccatgcaaaggaaggcacagaggctgtgtccccacctgaaccaggaagggcgttgtggttagactcacagacctggcctggacctgtcagccgtgatgaggcttaataaggagctgaaagagctgatagagcacagtgatggctgtttcatatagggaagccctctctgaggagaaacttaagcagagaactaaatgaagaaaaggaatgaggcattccattacatggggaaagaggattcttggcaatgtgaacagtaagtgcaaaggccctgagtcaggaatgagcttgtcatgttcaaggctagctagaaggtcattgtggctagagcagagagagcaagcagaagacaggaagacagtgcagtctgagccggtgttgttatataactcctctcccctcattttcctcctacctcttgattttttgtgtgtggactccttctgctaatgctgatgtttgcctgggttctctcaaacttttaaataatttgactctcaaccatttggatgacattggttagatacctcccagatgctaaacaatgaccccatgtgcagagtcagtctcgtagtgggagacctgtaaactggagcaagaaagttttcagagttgtaagtagaagtgtggggtgtgcctgggcatgaagataataataatggcactttatgtgaattagctcagttaatcttcacagcaacttttaagacattgatccaaagtcagccctatattcatttgaagaagttgaggcacagataggttaaggaacttatttagggagtgtaatgagagctaagcctaactgtggaatgtgggaatcaaatggggtgagaagacatgagagcctaggacatcatttcccctcccatgacttcatctttattcaggtgactcccacatagaaatcaccagttagaacttctttcttgcatgtgctatgcttgtatagttagctgccagactatctgtatgctcttctctctttgtgttagcatcacaaactcaatgtgtccaaaacaacccccatcttcctctcctgtccctgttttctatagagtatctccaactactgagctctaactatgttccaggctctagccttaacccagggttactagaacgaataagatctcccgctgtttctgtgacagatggcagagtcagctggaggagacagactcctaaatggagaattataatgcagtgttgtagggaagggctgggtagggtaagggatgggccaaaacagtttcctggaggaggagattgggagaaggccaactgggagaaggaggtcattccagggagcaacagcaacatgaatgaagatgaaggggagaaatgtcaggggtgtgaaggcagccactagtagcatggtgctggtaggtggaacatgacatctgaaacagagtggctagaggttgaaaggggccagcatgctctacccagtcaccctggaatcctggaagtcattgtggagtcctcccttaccagcacatactaacagtgaccttgagtaaatttttgtttgtttgtttgagacaatgtctcactctgttgcccaggctggattgcagtggcatgatcctggctcattgcagcctctacctccctggctcaagcagtcttccttcatcagcctccatagtagctgtgaccacaggtgtgggtcaccatgccaggctaacttttaatttttttttttttttttttaagtagaggcagggtcttgatatgtttcctaggctggtctttcctaggtgatcctcctgccttggcctctcaaatccctgctggaattacaggtgtgagccaccacgcctggcctgaccttgagcaaattaattcaccttctgtgtctcagttttctcatctgtaaaatgaggtcactaagaagttaaaatgcaatagtactgtcaagtgcgcaggagcagtatgtagtgctcagtaagcattaggtattattatcaactcctgctcctagccagtatactctcaatcaccaagtcctgttggtcctttttccttaacatctttcaactttgctttctccttgccctgccctctgttcttatgctagtccaggccaccatcattgcccactttggctgcaacagtggcctcccaactggttcctctgcttctagtcctggcttctttgaattacacttgcaaatctgatcctgttgttccttgtttaaaattctccagtggctcttctctgtgtagggctaaaaattgaacttcctgcccttctctcttgttgcctttgaccctagcatcccaccctctgggcgggaggttgtttgaggccttctcaggtttctggaccttgatgcatgctctgaacgactccctccttctttacaaggccccctctcttttccccttgacattctctgtctgacttggtgcttcctctgggacttcttagggtaagccctttccatagcaggttctaattttgtactgcggtgagtaatcccctctgtgggttgtaaaactcagatgacaaggaccagctattttatctttgtgttccttgtgcctcgcacagtgcctggcacatagtaggtgaccagtacttgggtgtgtgactgagggagtgaatggagtatagtagggggcagtacaccatgtggaagttttaaaaactcctttttcctattgcaaataataagcataataacttttacccttcagaaaagacaaacaagcaaaagaataaaagcatccagactacatggtgagatcaggtacatgctagctggctgggacttatgctttacctactagataaatccaaggagctctttaatgacttctcttgttttttccctacaccacctgacatgcttgttattatgcaagcaagacactcatggtcaacatcgattaggatccttttgattaagaagctgcagcaaagcatgtacagattattttttgaccttcagcccttcatattttgtaaatttctttgtggggtaaaattaaattaaaaaatttttttgattctgagaagcagcattttaattctttcctttaaaacgttatgtttttttgtaacagtgtcatagtctgctctgggctgctatataacaaaatgccaaagtctgggtggcttaaacaacagacatttatttctcatagttctggaggctggaagtccctgttggaggtggtggcagatttaatgtatggtgagggcctgtttcctggcttgtagatagtcatcttcttgctggatgctcacgtggcctttccttggtgtgtgctcagggacagagtgggatctctgtctcttataagggaactaatcccatcaccgggggcccatcctcatgaacaagaagatagaagagatagagattacccagctaggaggaaagaataggtcttgaatattaacttttttcgtaaacctataaaatacacgggaaacgtggactaaatcaacacattgatatttctgaggaacacactcatgtatacatgtacatacacaagtttacacaagtaaactacatttttttcttactagtcagttctctagaaccttttataaacaatttagagtgcttttaaaaatctaaaatctaaacccaattatgtcccaaatgccccatccccaaatactatcacactgggggttagtgagggccttaacatatgaattttgggaggacacattcagctcacaataagtaacaatgtggatttttctactagaatgtagtcctagacacacagtccacagctcccaaggaagtttctagaacaaacaatttaaaataggctttgtgagtgcttactgtgtgtcaggcactgttgtaggttcaggaagcaaaacaaaaacaaacaaaaaacaaaaaaacaaaaaaaccttgcctgtttcatggatcttatgatgtaataataaggcatgaatctttacctcctgaagataatgaaaacagaatataagattttcaacagtgaatcaagtaggtgtaagtaggaaaggaaaggcttttctctaattagggttcatgaaagggcttttgtcacagtgcctgctgctagaagtggaatcaaagggacgccgggataatgagcaccagacacagtatttaaaatgcaggaaaggtgattcaagtatttgaaagcttacgggaggctttggcaaacatttcttgtgccttctatgcattaggctgagacagggtttgaggatgcaagatgagtaaaagatggctttgccctctgggagtctgggtctcactcaggtctgatgcaggttgcagaggagaatactactagaactattactacttcaactagtatctctcctgcctgtcttctagtgaagtggcacataataaatgaaaaaacgttatgaaaacagcaatactgtctttgttttatgatagtaacaaagagatctgtttgcataggaaaagctcttcccagtggaaacacactttatatcctctgattgatttttcagcaccttagggagagacctcccaagccaccactttctacctaggaccagcctgtgtctactatatgttttttgaatggatgaatttcagtcacaacaaaaagaaagtccaggcccagggaggttaggtgaggagatagagattacccagctaggaggaaagaataggtcttgaatattaacttacacagcaaacatggactaaatcaacacattgatatttctgaggaatacccacatgtatacatgtacatacacaagtgaactacatttttttcttactagtcggttctttagaaccttttataaacaatttagattgctttttaaaaaatcagatgcagtaagtagttataactcactctatacaataaacatatattttgtaaattaaatggtatttctagtgcgccagtgtaggtagttattaaaggaatcagatggtgaatatttttgcaaagtcagtagttatgcatcattcttctgtttggtaagttcttggctttcatctgtccctgtatataagcaggcttgtaatatgttttgaaaggtttaatgaaaaccttttctttgtaaaatttctccttactttcttgtgagtgagatgtttgtttgctcagcctttgtggattgtggattccaggagaaggctttacctcagcttctagtccctgtgtctttgtcagggaaattggtatctttttttttttttttttttttgagacggagtctcactctgtcacccaggctggagtgcagtggcgcgatctctgctcactgcaagctccgccttccgggttcacgccattctcctgcctcagcctcccgagtagctgggactacaggcgcccaccaccacgcccggctaattttttgtatttttggtagagacggggtttcaccatgttagccaggatggtctcaatctcctgaccttgtgatccacccgcctcggcctcccaaagtgctgggattataggcatgagccaccacacccggccggaaattgctatcttaactgtcaacctggcctatgcctaaaataaggactttggagcttcatagtttataaacaataatcaagcaattataagaattagtgaaatttccccaaatcagagtgaaacggatgacatgaagatgaataacttaaaacaattgcttcagtaaatgctacttacttcttgggctagactcatgtcaggatatcagttctggttctcccactttctagttgtgtgatgaagagcaaatgacttaaccctccaggtgccattacctcaatagaaaagaaagggaaggagcccatcattcttgtatttctagcaatctgagcggtcacccctcagaacccagcctgggtttggctgccagtctaacttgccatttacctcgtgatgtgaaagccactcagcatttcctattatgattgtcaggtaattctctcaagtaatgtcctctcacctgaaattacttggagatggacttctcctcatggtagttacgtgatgtgttcattttgtgataattttcactgagttgtgcacttgggatttgggcattttattgtatctgtgttaaacttcagtaaaaaaaaaagtcctttctttttatttttaaggcccttctgccttggggcaggtctttcttaaaaagaagctctttgaatcacacgatgcatgccatttctcttctcagcctcagtctatgaatattctgaactaatctatttcttgtgtttctcccttcctgattacacttgtaattctcccattcctagcgcagggcagatcatacaggtccttaaaaagtctttggttgattcctaaggccttgagagttttgcttatgggccttaaagttaagctgtagatcagtgctgctcagtttaatgagactgcaaatcatttggatatcttgtgaaaatgaaaatactgatttagtagcttcgggggagcctggaattctgcatttctaatggactctcaggtggtgcagctgctgctgttcaagagactgcactcggaggagcagggtggtagagaacagtagttggtgcttatatagtgaatgctaccatgacttatgcatgtgaactgtataaagtggccctggttaaaggaactagacttggaattctgttcttttaatttagacatttttggttgtgttttgcttgatagaaatatgcttatattctctgttttgtttggccagtagtgcaacattaaaaaaactttgaaaaaaattggtaatttatacacacacacacacacagaaaagtgcagataataatatttaatagttgccccgggaccccccccgcccattccctaaaaaggacttctactctgatttttatcatcacagattagggttgaaaaacatggcctgtaatgatattgatttattttttaattgttgagatttgctttatggtctaaagtatggtcaagttttataatacttcaccatgggcttaagaagaatatatattccctgactgtcagatgaagcattcagtaactgtccattaaattgagattaattgtactgttcaaattttcagtgtttttactaaaatttttcttgcccaagcaatcagttattaagtatgttaaaatcattcttctcatggtaggtttgtctgttattccctgtagttctgttaatttttgcttcataggtttcagattattttattctggccatatagatttaacatttgtttataccttcttggataattgaaccctgaacctttcatcattattactcaccacctttatccttaataatgctttttgtcttaaagcctttttcctaaaagtaatataggtaccctggctttattttggttagtatctgcttgctgcatctttataaatattttactttcaacatttgtgtccttaggttttagatgtttctcttacaaacagcatttagttttttttggttgttgtttttagaaatccatctcatagtctcttaaatagcaaatttagaccattaacatgtattgttattactactatatttgaacttatttttaaccattttactttgttctttctctgtatttttcctatgactttccccctcatttatttcctttatcaaagttgaacttttttgttatattccttctcccactgttcctcaccaccctaccccatccttacccctttgaacacaactaactggtttggaaatgtagtctatttctgctgttttaataattgcccttgtacttttacttcaatcttacttaacaaattctacacctattcattatattttgtttaactaactctaaatttaatatgttaacctctcctccaaacaatactttgagcacccagctcctggcttgtattctattattatttagtattttacttttattctttttttaaaccctcctatattagacattaaaattattattttatattgacagtagagttgcccacatatttacaagaattccacattcagtggaaagacataaataggcactgtgttttctttttcgtggcggttaggatgaaaggtaagatagtttaattgttgagatgggctttattttcttttgttataagattgtgttgtttatgaacacgcccccaaataatttgagataaataaaatgtgtgtagttttgtccacactttttcgctaagcagtcctctgaaaacagtagatcttgttctgtatggagcctcaatgcttagcacatcagataactgactgtcaaagatgtaacaccagatacaggaggaacctgcctaacccaacttgtgatattaatctgtcctcctgtctttgcctctgctctcaattgcttttctagtgtaagacaaacctggattctgattccagctttgtgacttcctgtgagtgtgactctgggcaagttctttaattttttgagcccctaattcctcatctgcataatagagttataccttaaaagagttgttttgaagcttaaataatgggtataagtgaaataataaatgttcagcatagtgcctgacaaagagtgagtgctcagtaactgatggtgtctaattccaccaccttttctttttcctaggtacttttacagaatttgtattctaggtttgccctgccataatttccgcacttctctatttctttaaaaaagttatagtgaactataatatacatgtagacaagtgaggaagaaaaatgtgtaatgtaatatataattataaaatgaatgccatgtagccaccacctcggttaagaaacagaacacttccagcatccccgaacccacccctgccccatactctttcataacgcaaactcacttcttccccgtcagtggaaccaccacgctgacttttgtgctaattattttgttgcttttctttatagttttaccatccattatgcagtaataaacaatataattcagttgtgtttgttgttgaaatttttataagtggattcacagatattattttcagtttgctcctttcattccatattttgcttgtgagactcattcataatattttgtgtagcttcactttaattttctttgctatgtgggattccatcttatggatatcctgtttcttataagtatgaaataaaaatatagctggaggttgcagtgagctgagatcacacaattgcactccagcctgggcaataaaagcaagggcaaaactctgtctcaaaaaaaaaaaaaaaaaaaaaaaaaaaaaaggtaacactaattgaacacgttctatgtggtaggtcctgttatataaatactttctcatgtattaaataattgaatgctcatataatgttataatataggtgcctttattattctcattttacatatgaggaaacaaagccacatagagaagaaataatgtgtccaggggttggaatagactgtttaatctggatactgactctagaacccacaatgttcattaatctcattcatagtctcaagttttcccactagttacatgattttatcatttaactctaggtggttcttaaaggattaaatggatattcaggctcttctgtaaaatctagcctttttgttttaattccagtaggtaagaataccttccttcaggtcatcactttgcacttggcaattgccacggctctttgtacttttgctcttggagtcttttcaaaatactgccaccaaaattgttgccctggttttaccattcaggcttgattcaaattgccatagttttgctgttcatagcctcttcctaggcattcatttcctaattcaagcattctgcttgtttgttgattactgatttctcattatgctttttcttcttcattccttttctcctcctcattcatagtcatttctgtgcttataaatctctctctctctctctgattgtatacattttttggtgccattgacctgtcctatgaaagtcttcttccttccaaaatcttataagtatagatcaggatagagccctagagaagggtttagaaagaatgaggaatgacaactttagagtacttagtttgatatgttttaagtctgaattttattgattcagcaaattccacaaatatatacagaattatttgctaactatggatttcatgtagctgatttatttttttaaaccgtacctcctcccctgccccccaagagtgagataagcactattgttaccatttgcaggtggaggaatcagtacttaaggaaattaaacagcttggccatgttcaaagaggttatgtgtagcaaagctgggcttccaacttaggtcttctgactctcatcccagtgctttctctttgatcacagcaacctctctgaaattaataggaaggagaattaattatttgtttgttccttctttaattttgttccttccttttttaaaaccaacgaacattcattgagcatttaccttatgccagccacagcactaaactctggaaattgcaaattggataacatgtgggtcttccctggacaagctcatggttgaggagatgtgtaaaccagtgtaatcttgcatgcccagtgctattattggaggtgtggctagctgttcaggaagcattctagagattggagatggtttggagatgtttcttagggaaagagttggccacatacacttgctagaattagttttcccatattaaaaatagttttaaaaatatttcctagcatttacctttctgtttgtgaatgtgcactggcctctgagagccaccactgtttctctgtcctctggcttgccacctgcttttgtcaatacttcccaactgctttcaaaccaagggcacctatagaaaaccccttaaagatgactcctatttcctggcttctctgtccaggtacctgctgttctttcctgctaagaacattcacctacaaagccatcttctctgtcaatccacattgtgttcccattaaagtctgaattgatacgtttctaggcaccttttctctttggatgcatttgactaaatcctaataattacttcttcccctcagacctatactttccaccattatagatcagaattttcttattgtcacataatgttcaaatgttgcctttagaccagtgttgcaactatttaatatgactcttgtaacctgtagtggtttatattagacaaaatgtatttattgtaatattttaaaatcacttataccctatgttaatttttttacagcagttttaggttcataacaaaattaaaaggaagttacagaagagttcccaaaccctcctgtccccacatatactcccctgttatcaatatctcccactggagtggtgcatttgttacaattgataaacctacatcaacacgtcataatcacccaaaatccatagtttatattagggctcactcttggttgttgggtaatttaataatgacttgtatccaccattgcagtatcatacagactaatttcattgccctaataatcctatgtggtgttgctgtttattccttccctccactctgacccctggcaaccactaatctttttattgtctccatagttttgccttttccagaatgtcacatagttggaatcataaagaatttggccttttcagattcatttctttaacttagtattatgcatttaaggttcctccatgtcttttcatgacctgatagctcatttcattttagtgttgaataatattccattgtctggatataccacagttttattttccattcctctatggaaggtcatcttggttgcttccaagttatggcaactatgaataaagctgctaggatatgccacagttttattttccattcctctacggaaggacatcttggttacttccaagttatagcaattatgaataaagctgctataaacatctgtatgtaggtttttggatgggcgtaagttttcagcttctttcagtaaataccaaataccaaggggtgtgattgctggatggtatggtaagagtatgtttagttttgtaataaattgccaaactctcttctagaatggctgtaccattttgtattctcaccagcaatagaggtcctgttgccagcatttggtcttgtcagtgttccagattttggccattctaataaatgtgtagtggtattttatgtttgttttaatttgcatttctctggtgtctgacgtggagcatcttttcatgtgtgtatctgccatctgtatcatctttggtgatgtgtctgtaaaagtgattggcccatttttttaagtcagcttatttgttttcttattgttgttttaagagttctttgtatactttatataacaatcctttatcagatatgtgttttacaaatattttctcccagtttgtgccctgtcttctcattctgtttgtattatctttcatagagtagcagtttttaatccagtgtatccattatttttttcatggatcttgtctttggcgttatatctaaaacatcactgccatctagatgtttttcctatgttatcttctaggagtttttaaattttgtgttcctgcaatgtttcataaacaatttcaaatactcctgatctagatttgagctctcttctgccacatgctgtcagtgtgaccttgggcacggcactcagccacctggattctcagcctttccatcagagatgtaagggtggcacctacctcgtgcacgaaatgttgtgggtgaaaatgctgatatgcaatgcacctgtgaggctttgatttcttttgcccccctctgcctagaacattttctgttcacggtaatgaggaaattgattcctgtgctgcacttttagcttttgagggcattgcatctgcccctctctgtctccactgccactcctcccatggtttgaccaccactatttctcgtcagaatactgcagcagcctcgcaaataagtccttctactctcatctcagtgtcctccaatctatcctggaaactgccacaaagtgatcttcctaaaacaaaaataggatcctgctttctaggcagaagccaaacttgttaacttggtttacaagacactttgcaacctggctgctgctcatctctccttctcttactgcattcagctgctaacccacgaagctgcctgtggcctctcagcctccagaggatggaggatggggatgatagctcccctgcctgcatcgtttccctcaattcatccactttttgcccagtcagatagtactcaccttttaggttttcattaggatgttaaatttcctccaggaaaccttacctgatactctttagtctatagtctgggtcaggcaccctctctcctgtctaactccctgcccccaactgcccaagcacccttcactctcccattgtaataatgatgacatgaaactgcaattgcctgtgtgtagctgtctgggttgtttattgatatgttctaagtgcccatcccagggtctggcacctggctctccctaaacgttgatgggtgaaccactgaatgagtatgagactacccgtgtcatagacaaggagagctggtttatttaccaccagtcatatatttacattgtggtcatggtgtctactaagttataattaaccttcttgtcttttattttcttaacagacaaagatgtgagcagcggaagttataacctttcctctgcaacgacgggcagctactacagttgtgtcagccagatcaccataggtgagcactagtgtcattttgatttttttaaaaaaatattattgcctggaaaagctggaggtcaagggggtggctggggaggagagggaagaaaatataaatgcataggcatttattttcagaatcagagcaattgcttgtggactcacttttctggatcgccctcttgtggatttctactgcttttgcatggaattagatggaggaaatgtccagggagataagaagtcatctcttgttcccagatcttcatcatttgctttaacccttttgtttttgtagcacctgtactattatgcacttgatagtacaatcgaattactttttaaagatttatattaatctatttttaaaagaaataagtgcaaattgaaaatgcatggtaaaagtctactctttgctgtttggagaacatgctaagcaagtgttagagtgctgctgaaaatcaaagtgagactttctccttgttatgctcactcaaccttaaacactggttactttggtcgaaagtagaagagtgagccgtgccatttttcttttggttgaatccttcttctcctttccatttcctttcaaaactttcttgattctagaatgttgggcagtgacttagagatcagaaaagaaaagtgaagataatagctacagcttatgcttattttgcacttattgcctgccagctgctcttgactccctgcatacattattttacttaatcagaactctatgagcaagttactgttatttctccattttacagatgaggaaacttgcgctttgccacccagctagaaattaattacccaagatttcattctaggtctgtttgacactaaatcctatatactcttaaacactatgccgtggcttctcaaactccagcaatgtggatgcctatgcaaagcattaatgatgaacctctaaaatggatttaaattatttttattatgaggttacttaagtatgttcaaacatagaactatatatagacaccttgcattccaaatagccattaaaattgattttgcagatgagatttaaaattcagtaacccaaataaaaatacaaatttaccacactaattgaatatgatgtatgttgttattttgctgaaatgcagtcactgcttgtaatgcaatggggtactggctgcagtgatgttggttctttgagtgcagtacagttttactgctaggtacttcatgatgactctgcattgctgccacctttctgagttcaaccccctgtgaaatcaatgttaatgctcactgatgtgaggttattgaatcttcatttgccatgaatgtacctcggcatatccatctctccccttttctcattcattgtaccaattggtgccaaacctgatagaaacacaaaagtaaacccaggcattaaaattaagtggcaggacttggttcagaatatgcttgtattaatttttaaatgattaacttttaaatgagaaacaaagatagtttaaaaattctcgtggagagctcgcagaccctggtttgaaaacactgagcaacctaaaatgccattcccagagacatcagtgagacattaaacattagctaagtagtaggaggacatttagggttcacagtaggggggtgacaagacaaatgtatggatgagagaagattattatggtggtgaacaggatggagttcctatgggagaatctggtgttgtaacagagttagtggctgtgactgtggtcttgacatgagacagaaatcaactagggaggtgggatgaagaggcgggtctagggggagagggatggaattgctggcaggactagtcattggctggatatggggatagtaagtgttccctgagattttgcatcagggtgacagagtctgagctgttcccaggaatgtggaagtcaggaagagggaggatgtgatggtgataggttagatgtgttgatttgatgtgcccgtgagacttctcacgtcagaatgcctcacggaaaattagaaatatggagaacatgttcaggagatgaagatattggcactatctgcacagagagttcagtcaaatctttggaagaagatgagataataagagtgagaattagtacgttgtgtgtgtttggaggaccaaggaccaatctttgggggaagcacggtgagggtagaaataatgacagaggtaggagaaccaagcaagcacctttcttggaaagcccagagaatttctaggacagactgaggaggttgaaaattaaagtctgccttggtgacatcgtgagagccacgtgagtgggtggcgggatgggagccacgttgcagagctctgaaaagggagaggagggctgtgagtagagaattctcttttaaggtgcttttttcaatgaaaatggaggggtagatagtgtgaggatgattcagtagctaacaaacactttggggagctttctttttgccaagcactgtgttctaactactttttctgtatttactcatttaatcctcaaaaagatcctgaggtaaacagtgatattttcccccattttataaatgaggagatggagtccctgagagggtaaagaattgcctgaggacatatgagagtaagagctgcaatttgagcccaggtcattgggctcctattggatgacactcttgttacctgacatcttgcagacttgggccaagtggccttccctggtccagtcagctttagctaccatgtcagggtgttgggttgaaatgtatcccccaaaaaggtactttgaagttcgaatccccagtacctgtgattgtgactgtatttggaaatagggtctttgcaggtgtagttaagttaagatgaggtcatctggactagggtgggccctactccaatgtgactagtgtccttataagaagggaagagacacagagaccatacagagagagctgtgtgatggcagaggcagagatatgagtgatgcatctccaagccaaggaataccctgggatttctggcaacaccagaagcctggagagaggcatggaacagattctcctctagagccttcagagatagcacagccctgctgacaccttattttggactcgcagcccccagaaccatgagagaataaatttctgttgttttaagccacccagtttgtggtactttgtcacagcagccctagaaaactaacctctgaaggggaggtaggtatgacagatgcttaatcttcccagaaggtgccagtgtaacaagaaggctcttgaatactgcttcagttccctggctcaaattggctgaaacgataggaaatttattatttcacataacagggacaccagaggcaggcccgtctttaggatgggttgattaggctgctcagtgacattgtgaaaggccttctcccctgtgccttcctctctcaatttatcttcatggtggcagccacatggctgcagggtttcaggaattgcattcagacctgacaatgatcacagggtaagaagttttggtgccctcctcaggccattgctctaggagctgagaaactttcccctgcagctccttgacagactcctcctatctcactaggcaggtctgcgtcccaagaccccatccttgagccaatcattgacaagggagatggcattatctttggccctatcaggcccacctgaggcttttggacagggatgaggatgggaaggagccttgtgtcctgggtcacaaggctgtgtggggtgggacagattcccaaatgaagtcgtggctctgttgggagggaggaggggaatgattctgcataggcaatgggcaatatccactgctcacagtctgtccagtgcaaagcacttttgcaatatttatagtaagaacaaaaatactttacaaccttagactcaaagcactagagggaggacagatctatggatcatccaagaggtgttttctaaaatctcctttgttttctttcatttcttgtacttcagtccttctcttacagaatagtcatctcacacagaagtgtcacatttgtgagggtgttccatttaggaaaatagcatatgtgtggatttcctagtaatgtggttcctagatgaacctatgtcttgcccaaagcaggggggtcaaaaaatccagggaacagaagaaagactcctcctaaaactattctgtttatccatgagatactcgattagctccttattttctagataaattcccattttagccatgtatgagagatttaagaaccacatagttaacattattttttctcaagacagcttacaatttggggtgttctttctctttcttcacaattttgggttcagtgggaattgagacccctattcctgcctccctccccaagaggggacatgatggtgggtgagggaggatgagcaggctatcaatgctgccaatgtgacatttctattctttgccccgtgggtatcagctgttctcttggatggttgtctcttcaaaatactgtggcttcattgttgcttttaaattgagactcatctatttatattccatcataattatgcagatcttgtcatagctcgtttatatcaataatgcagattaaaatatttgctaatgaactccattttcagagtaaatgatgtagaaatttcctaaacaaaaaagacttgttagctgtgtgaactatattttttcaaaattaaatatatgctataaattagctataattttatataagaaatgctaaaacctgaaatcttagagagtccagagttccttagagactttttatttttttggaaaaagaacatatatttatttattaagtgtttatgatgaatcagatactatatatttatatatttaaccgcatatatttaaggtgcacaacataatgtcttggtatacatagtgaaatgattactacagtcaagcaacttgacatgaccatcatatcacagttaccttttttaacatgtgtgtggtaagagcacctaaaatctactgttagcaaatttccagttcacacaagatgaagttattaactctagttctcatgctgtatattaaatctctagacttattcatattacataacttaattacaacttggtacttttttacttacgtcttctgatcctccttgctcctggtaatcaccggtccactctttgtttatatatatctaaatctttatatatatataatctctaaatctttatatatatatctaaatctttatatatatctaaatctttatgtatatataatttgtatatatataaaatctttataatttaatgtaaattaatccttataatttatatatatataaaagtttatatatgtaaaaattttgtgtataagtgagatcataaacttattttctgttatttcacttagcataatattccccaggtttgtccaaattcatgttaccttccccatgtctcagaccctatccctagaaagcctccctcccctgaactcctgaggagcagtttctgatctactttaaaatggtttctttcatcttgctttgtactgtagttagttgtagtttatgggaaagaacatagattttggagtcaaatctgtgctgaagttctgcctctggaacttgatgtaggccaggttgagatccagttttctcatctgtaaaactgaaattgtgatagtccccttgtacaattgctgtgaggattctagatcagttctgcagtttctatcttatagtaggccttaagtaattttttttattatgaacacaggtcttatttcctttattgattggactctgagctccttgaaggcagagtgggcacttagcatgcgcttaataaacataagttgattaagtgaacaagagccatcaagagggatgatgcctgcctgtttattatgaacatgcattcttagctcaaatggtatttggtttgactaacagctaagattttggggaagtatgaaaataagcacactatatggctttgattgctgccactcacctaatatgtttatctcaccaggttatgacgttgcggggcctgtggcaattgggcttacccactggaaaaatccatacgtacaaggcagaccaaccctcccatcagatctgcctctcttcgtctccaaagatgcaggcatccctgtgtaccaccgatccttcacccgcaagactgaccaggccacacctttgtcctgtccagcctcactgtctatcactccagtgccttcttacagcagtagcagccaggaaaccctgagtcaagacacaacaggtaagtgttggcttcctgttggagattcgggactgggtgtgtataagattccttcatgcatttgcctgctgaataaattgcatttgtatttctgcttgtgtgatatgatggaccccaacaatacctctatgttcatactggcttttctttttaatgagatggggtctcactttgttgtccaggctggtatcgaactcctggcctcaagcaatccctcccacctcagcctcctgagtagctgggactacaggcacgcacaccaccatgcccagctctcactggcctttaatagctttgctataccagaaggaaggttgaatgtgtatagaaatatttgacctaagtgctagttctgtttggtaaaatgttatctagaaatcaactctgaatcagaatttcaagatatgtcatatggctttaatttattgaatgctctatttagtgacaagatatctatcttggactaaactcgtgtattcaaaaaagtcatcaaaaagtcatctttgaataccgtagttaatatcaattcatgttgctccaccaaattgatctatttcaggggtctgcaaactactgccaaatctggctggctacctgtttttgtacagcccgagaactaagaatagtttttacatttttaaatggttggaaaaaaagtttttaaacaatattttgatacacatgaaagttacataaaattcacatttcagtatttatatataaggttttcctgggacacagccacactgattcatttctgtattgtctatggctgttttcacataacagtggcagagttgagtaattgtactcttgcaaacgctgaaatatttattatctggccctttatagaaaatgtttgctgactgctgatctatgtgatccttggaagtcatgagttaaacagtcagggcaagaagaatgcttacaacatcctgccttaaaatttatcgcttatatcacactggaaatagctgcagaaatggccatgcaaggatggccagttaattgtttttatttctaaaatctgagttggaggtttaaattatgcaaaatctatcctgccatgttttccttctatagatacagcacttagaggtaatggtttagtcagccaaatccaatgtgtaattctggttctggaaataaatctttgaatgttgggataccacgacactcaacaatttatagatgctgccacctagaggtaagatgctgaggttgcagaagttccagattatcaaaactaatctttaaagcagtagattgcagacttcactaaaggttaagaatcagcactgcacttgttaaaaatgaagattcctgggtcttaccccaggggatgctgtgtccatggcacagggtgagcttcagcaatctgcatttggcaggcttttccttcctgggattttgattcctgcggttcacaaacatacctggaggaccccctccaaaggctctttagtcaaatggctgaattgaaatatcagggattggtaatgaagagcactggggaacatttgcataccatcagttctgcacatggcaaaagtaatcatctttctgactgtccttgttgaaggtcagtttgacagcggaaagaaatcactatctggggcttgaaaatgtttctgtatagtaagtttaaaattttctgggttttgcttttattgtgaaggaaagctgactcttcttgctttagtttaataaaatcagaagttaatatataaagtacctcctttatatattaacccagggtagctgaaagcttatggcattttttggcaaagaggggtgtgaaatggcagctgccagattaacattttatcatggttcccttagttgactttttttctcctccatagagcactatactcagagtcaatctgatttttggataaaggtttctgtgtttaacttggaggttttcacaaacaaaagcctataattctcttcattcctggggactttccattagcaataaaatattgatttgttccaagcaactgcttattattattcttactattagtatcctaacaaagtaagcctggacatccaaatatatactacacaagcatgtgataatcattttatcatagaaagttatagatgctggtatagtttttgtaagtctcgacaatgactatgtgtaggccaattattacatttatttgattttttagaacaaattgttgattttaatatgtatttttgtgtgaaagcttatagtttcctttctttttatttgtgttttaaagaataaagttaatttcattttgtttaaaaaatacagttttattactcatttatacttaattttttgcttcttttgctagttaaaagaaaactctgaggtgagataagtcagttcagctatactaggataccctacaaattccagactttgccagacatcccttcacaattctaagctatctctcttctctataaacttttggactgatatagaggagctgacaagttttaggcacaatataactatacaattattcatggattgtgagaattttcttatgtttaagaatttcccaaacacattataaaatcatttttccattttataaatcccaccattctgcagtcctagaaagaatgcttaatagcagaacactaactaaatgactagagcttcttgagctctcattttatttagctgtgttcgctattgtcaccatcctattccatcattctttcccttcattgtgtgactaacttctatagtagattctcttgtattagactttacttaaccctgcttgtcaccttgtgcagtgaacaacttgtgaaactgcatagtggtcctgaatgtagttcttccttatgacagaaaaactgtttccagtgtccagcttggtccatccatctatccatccatccactcacccattcatccatccaatatacactaagttaccactccatgttatgtattgtgataagtccttgggagagaaaattaagtaaggcatcacctctatctcaggagctcagagtctagtggaggaggcagacaagtaaggcaagcattctgattcagtgtggtgttaagatagatgatttcacaagacgtgatcacatatgtttttgttttaaattatttaattaatatattattaaaatactaatagtattaaaatattttaaaatatatatctaaaatattagtacaaatacactgaatgcagaatatattattaaattatttcttcaattaaaagaaggtaaatttgagacaaccataggaggaaagcttggaaatgatctctatctcagatacttttagtaggtttgacacacaatttttaaaaaagtaaatgatgatagtattcaattgatattaaattcattacaaataatttataagctttggtttaagagaaaagtaattagaaactttacacttcaaaaagttgctactagatactggactttgggatatactgtaagaattctggttaaatcaagaaatattttgaggacaaaaataaggcatgaaaggtattttaaaaattaaaatggaaataactccttcttgcttagtaagtgtcatagaaaaagagtaaaactattgtcactttatttccttccaatttttattttaggtttgggagtacacgtgcaggtttgctacatggccaaattgcatttcgcttgggtttgttatacaaattatttaatcacccaggtagtgagcacagtacctcataggtagttttttaatcctcaccctcctcccaacctccaccctcaagtaggccttggtgtctgttgttcccttctgtgtgtccatgttaacatgcaatttttgataaccaagatttgtaacttccatcaccactaccacctccgcctcacaacttctctttctagtcattcctatatccccagctgatcctcaatcactccattcctttctatccaatccccagctgcatactgatgcccccaaagccatattttcatgtctgatttctctgacaagttttacatgtgtatttataagtgcctactggaactttcaacccggatatatcccatactatcaaaacttatatatcccgaatggaacttccttctggtagctctcaaagttgaatttattattctatttaatgctggcatagtctcattgtgttagttggactgccatagcaaatatacaactgggtggcttaaacaacaaacgtttctttctcacagaaaagaaaaaaaagaggctaggaagtccaagattagggcactgaccgatttggcgtctggtgagggctgtcttcatggtttctagctggctggtcttctcactgtaccctcacaggatagaatgagagcgagctggccctctggcttcttattataagggcactaatcccatttatgagggctccaccctcataacctaatcacctcccaaagtccctaccttcaaatgccatcacgctggaattaggattccaacatatgaattttggagagacacaaacattcaattaattgcatcatccacagtcctaatccagtgttttgggttaaccccctcatgcttaaccttctgctggccatcagcctccacagccagctggctaacttattaattatgtctattttagaaatattgctacttcaaagcttcgtctccatccctactgacattatttctgctcaagctctcactatctctccttagactagtgctgctagcagtcttgttacaagtcttcctgaatcttaattcttccatgaccatagtttagctttcccaattcatctctctccctcctttccctcactccccctcactttctgtctctcccttcctctctctccccttctctcttttgctctttctctctccctccctctcccaccttttcttcctctttttccacctcctcctgccctccacttgaaaatctctgttgcttctccataatagaataaagtctaaacacttcatacagggtacaggtacgtaagggccttcctaactaattttaactgactctccagcatgtctcaccgctctgtacagatgtgtcagcatagtacttacacttgattctttactgttccctaaaagctcatgattttgcacatctgtgccatctactttgatacctttccttacattcttctcctagaatattcttattcttcaaactcaattaagagtttgtgaattctttccctttttgcctcagcatattttgttattctttctgtttccactggcaattcttatgcacagatttaattttgctcttattgtactccaatacagttttttcatatggctaccataatagacgtaaataaagttcttgagttaggaattaatgttttgatcatgtacttgttcgctcagtgcagagcttggcatgtaagaagtatgttttctatgaccattgaaactgcatattagacacagttgaagagagaactaggcctggaagatagagctgaagaaattaccccattatcagtacagagatatatgagatacaaaaacaagaaggagaaggttgaaatgtagaaagcagaatgaaaaagttcaacatccatttaatagaaattctgtcctgctttaagataatagaatgtatatatatgaggaatatttaaaaaggcaatgactgaaagtttccccagaattgatgaggagacacaaattctttgatgtaagaaacatgatgagtgccaagtagaataaataaaaatatatccatatgtaaatgtatggtgagtcagcaaaaatcagaaacatcttagaaataacctgagagaaaagacacattacctgcaagtgagaaacaaattgtggatagactttcaagtagtaatgatagaggctggaaaacagcagcttgatatcttcaaagtgctgaaggaaacgaaggtcaattcagaattccagatacagctaagtgatcactggagagggaggtcagcataagaaattatttggaaaaagactgggaaaaatgtattctatgcacacctcctgaaagaatgactaaacaacctagtttagaaaagaagggtcttggctgggcatggtggctcacgcctgtaatcctagcattttgggaggctgaggcaggcagatcacctgaggtcaggagttcaagaccagcctggtcaacatggtgaaaccccatctctactaaaatacaaaaattagctgggcgtggtgtcatgcacctgtaatcctagctctttgggaaattgaggcataagaattgcttgaacccggcaggcggaggctgcagtgagctgagttggtgccgctgcactccagcctgagcaacaaagtgagactctgttattaaaaagaatgatcttgaatctagaagaaacgatgaaataataagaaaaatatgtatataaaaattcaaaagatcccacttagaagaatgatttctcaagcagggatgatgttgtttcacaggggacatttggcaatgtctgcagatatttttggttgacacaacttggcaggaggtatcacaggcatctagtgggtggacaccagggatactgctaaacatcctacatgcacaagacgtggtccctaactcattgtcccatgttcactgtcaattcttaactctccttcctccctgggtgtttcttgtcctgtgtgtagtaccttgcccttgcaatgggtcccctcctttagggcattcccagggctctcgtttctctcctagggctgtgcttggtgaagtatgattagcacctttgatttcccctttctcaggtttctgtgttctttaactctccctaaattgtatctcatgctgcacctaggcctttcttttttgctaataccagtttctcaaccttggtgccgtggacattttgggctgaataattcttagctgtgggggttgttttgtgcattgtaggatgtttagcagcatccctggcctgcacccaacagacgtcagttgtgatatctgaaaaaagttttcagacattgccaaatatatgtttgcaggcgaaatcacccccagttgagaaccactgacttacaccaaagtctgatcctgttctctgaagctctgcttagtggcagaagtctggtaccctaatcattgataatgggttcatgggttttaatgcatttgatcctattttagcaagggccttttgccaaccatactctaatcaaaaacatggggggaatttttttccaaagaggaagatttttttcccccttaagactacaggtaacacctttgacacttgccctgcctgcttccctacaccccacctctctgtgaaattatgtcatgaatcaaacctcctctgtatgtgttcaagaccattggtaatctccctgcatttccataagcaggaatcattgagaactcttccctttgccttgtgccctccttctccggcctcaccatcttccctttagtggtcttctggtgggattgtgtttctaaaaaagaacactaggctgggtgtggtggctcacgcctgtaatcccagtactttgggaggccaaggtgggtggatcacaaggtcaggagttcgagatcaccttggccaagatggtgaaaccctgtctctactaaaaatacaaaaattagctgggtgtggtggcatgtgcctgtagtcccagctacctgggaggctgaggcaggagaatcacttgaacccgggaggtgaaggttgcagtgattcgagattgcaccactgcactccagcctgggtgacaagagcataactctgtcttaaaagcaaacaaacaaacaatactaatgaattccaaacattccttatggactttacaaatatgttcctcatcaggaaaggagttgagaaatgactatcttctgttccagatcacttcccaggagtctagcttttacctgtgcacctaaggtctgagcagagcatggtgtcttatattgacggggaagatgttcactcacctttcctggtgaccttaccgagcttactggtactccatatatgcaagctctgaaatcttaggtgcccaatgttatgttgctatgaatttgcctggggtatagaataccttagaagaggtgcccatttgatagcatgaattcaatgtcttataacaaattgtgaccagatactttcagaacggatgccaaaggaaacaggtttgatttcagagatagagtgccgcagacagtgaccctgcaacctgaacaactgatgtgaccacgagatgcagagtaattggacctcaccaggagactcatgtgctcccttgtagagaagctgagagacactccttgtcctgtccctgcttgcacaccatgtgcccagccagcctgagcctttctgctagagtgttagttcagctaaatctgtggcacagagtaatggaagatcagctaccctctacaaaaaccagggcaatataaattagaaagtctctaaaccattatatttaaagtgggtttcttctagagaacatagagttgggtctagtgtttttatccattctgacaatttcttttaattgatgtcgttagaccattcacaagtaaagtgatgattggcatagttgaattagtatctgccatgtttgtaaccattttctattattacatttgttcaccatttctttttttttctactttttctcttgccttttctgattttaattgagcattgtatatgatttttaaaaaatgggatgtcatcttcctacttccctttctgcttttaaaaatttcccttttgtcaaaatagccctgaaggggtatttagattttaatcgtatgttatggaataaattttccggtttggtttatatggagtgtgaatatgagggttaacttacttaagttaggatattgtaacaagtagggcatttttatgcattttggaaggtgatttgtggtttcctaagatgctggctgggtagaagatgtcacagtggaagggaaggcaaatttgagttgaggctattcaggtgagggaccagtgttccaagcagcaggacagtgtgcaaaggctgattccagaggagctgggggtaaatgtctccttcacattgaagttgagtgctgaatgtgttatcaatagaggtattgccgcacagggtggctgggttctctggggctgttactctggtcttccatggtgcattccatgtgttaatggacatttgtgagcaagcccagaattttaacctccatgtatactacttctctgtgaaaaactaagttgggaaccgcctggactttagaactaagaggatcattggaaatgttcattttgacaagagcattggctaagagaaatacattgctgagctttcttcaaatttcctattttcctaaacttgcctatattgttcttttcagaattcaagaacatttcttgttgtttaattatcgattccagcggagtcctgttcattcttcctccatgtgtgctggttatttagttttagaagactgaaaacaccaatgaatcagggaatgattggtggcaaatgatgaagacaaagtcaatttaatgatgtagctatgaagttacttggggatttctaatataagagactgaagaacttgaattaaagctgtgttgaatgtgatttgcaaataattatatatttcagccataaaatcagatggctttaagatgctccaataaagtcatccattcttctagtcatctaaactcttgctactcaaagtgtggtccacaagagctaagagagcctgagtttggatttaaaaatatcgtccaaaagggataatgcgagggacattttagagatagcttcaatagcacttcgtaattaatgggatgtgatatatgactgaatggatgtcccgtatattttcaataaggttaaaatatgatactgaagcttcatagtttaggccagtgattctcaaactttagtgtcaatataagcccagtggacttcttgttaaactgcagatcctcatccagtaggtctgggcaaggggtagtgagattctgcatttctttttttttttcttttttctttttctttttctttttagacagtctcactccatcatccaggctgtagtgcagtggcatgatcttggctcactgcaacttctgcctcctggattcaagcacttgtgcctcagcgtcccaagtagctggaataacaggcatgcaccaacacacctggctaatttttttttttttttttgtatttttagtagagacagggtttcgtcatgttggccaggctagtcttgaactcctgacctcaagttatccacctgcctcggcttctcaaagtgctaggattacatgcgtgagccaccacacctggcctagattctgcatttctaacaagcttccaagtgatgcccatgctgtcagtcatggagcttgggattcagtacaagacacaggtaacaaaaaatattataccaaataatttgtggtcactaacaggcagatgctttgaaggataggaataatcctcttcttaaagattcttggcaatactgtttttatcaaaacacgcctctgagttcccaaaacagtactctataaagaaaattttctttaccaccagttataagtgggaagtctgcttatgccctgttacaggaatattatttgtctgtgatatataagtgtccaaacgtttccacagacattgttttgatattaaaaaccaaatgaaaatcccagcaaccatggtactgactcaagagggagcttagctgtcttagttctggttctctgggaaatagattttgagccagagatgtgcatgcaagaagtttcctggggagagcagttgggatccgtatgtatggtgtgtgtgtgtggtagatggagggaagcataaccaggcagagggaagatatgagctgtgatgatgcacaaacatggcctcagccctcacagagggatacctggagctgggacagtccttcaacattgtcccacaacaaagctattgtaacctgccatcattgcctggatgcaagctgccacgaggaatgaatgtgaccctggggaattctctttgcgggcagtttcccaagaaagattcagccgagagccatcagcagctgggggtgtaccatggggcccacagcatccatgacatcagctgatggaagtgaagtgtttagaaagatctacgcgggaaagcaagtgggagagaatggtggaattctcagtttgaccgcaagcatggaaaatctctgctgacctaagaaaaaggcccagaatctgagcaggttttccaacccccaggaactgctgagtatctggattctggttcagtttgtagttctctccagcaaagaggcacctaacagattgggaaacaccctctggtcactattcctcctggttatgtgggtatatattttggaaactatgcagtttttgtctttttcaggcaaataaggatacaactgatttgtggttgtaattggagaatggaagagttggctcactttccttgtcccaggtcgtgtaactcatattcatttattcagcagctatttattgagtgcctactttgtgcccagtactacattaggtgctgggtgtactggagtgacccaagcagacaaggctcctttcttatggaatggcagtgggataggctagtagaagagagagatatgaaataatcacccaaataaggaaatttcattagctcagtgaaggcaaaggacactattagggggtgtataaagagggcatttaatttggattttgaagatggggaaagactgaggatgtggtagtaatttgagagagatctcaaggatgtgttggagctggtgaagatatagttggaatgtggaataggagacaaagacctggcttgtcttctcagctttgtgacttatcatgttaccttcacactaaagacttaacttctttgagcctcaatttcttcatctgtaaaatggtgcagttataagactcaaatgagataaaataggcaaagtgtttttcaaatcctaaaatgttagcgaaagctacttttcctattaattattctagcccatggattccttctctcccttctcttaactgtctccttctcatatttcctgtgctgggcttcgatgctgaggtttagttaatagtaaaatgctatgtagttaccttcttttagcctatggctttcaacatttttgaacaatacctaaagtaagaaatatttatgtattgtgacctactactactactacttctccatcccttccttcctccctctccctcttacacacacacaaacctgaaaaaaaatttaaggaaataattcttattatttattacatactctgatatttttcattccattccattctgttccccaaaaacaacaagtcaagatccattaaacagatgtcactgcttacgaaggaattgcaactcataatttgaacaagattgatttagataatataatacctgaaatcctttggaaaccttataggggtcacgcaatctttttttaatgtgtgtgtgtgtgaggtctgttgtacaaggaaattatttctctttgagactgattattaatgttcatttcaaaacatctatggtgcctatggcaatgagactgtctcccagagttggcaaagatgtgatccctcaaaagggctctgtattccctgcagttctgacatctctggagtcagtgaagaactgtggcaaaggatctatatccattaaccattattatgataatactgaataacaaacaaccccaaaacctcagtggcatacaggattaagcatttactcgtttatctagaatcagctgggacttggccagagctctgctgatcttggctgggctcactcagtatcttggagttggctggctcttggctgatctaggttgtcctcaatgggagcaattgggatgactcagctgtgctccataagtctctcctcttccagtaggcacaggaatgtgcttcctggcacattctcatgacagtggtggaagtgccagagaaggggccagtccaatcatgcaagcactccaagcttctgatggcagcgtatttgctaatagttcatcagccaaagccatgccacatggatgagcccaaaattaaagatggggcagaatgtcttattctcagtggaacaacactgctaagccacatgatgaaaggctgtggaattagggaactgtgaataattggggccaaagacacaatctatcacagcctctctatctcacgtacatgatctctttcaccccaaagaggccattttatttttcaagtgggctcagatctgagtcctttaggctgggccaggaatatttatctgaaagagacatcatgctgtcctcctcataccctgggtagattgtcctccttttacctattccaacctgaagttgcctataaaggccctctcttcctcagtgtacatcactttaggaaggcagacacttgcaggcagcctgctctgccaatatctgagatgtgcctgggcctacctgcaccctagctacaggcaaaatttatattaagccataacccacactgtatttttttctcccatttttcagttcttcctaggaaaagatttatagcattatactatagtagttttagttgattcatgaaattagatatctaaatgagagattttaatgcgtaaagctatcaatagtacagtacatgtcaaaaatagccttttgttccgacttttcccctaatatttagctctgaatttctggttgtctattggacgtgttcccacatgttcccacaagcacctgtccaagccacttctgtgttccctgtttcaacaagctgcgtcatcatccatcctgcttctgaaacacagagcaaagagtcatctttaaccaaccactcatttgcagtcatcatccctcagttcttttgctcttgtgaataatggctggcaccattattcaaccagacactgaaattgttctttgttcatttactgggccaggttctatgctaagaactggggatgtgagggtgactaagacatgactctctcttttagaagctcagtatctagcaaaggaggtgaactgtgaacacataactcacaatgtaatgtgcacctatgaacacagtgttctcttccacccttcccacatctaattgctcatcaattcttgctcattctacctcacaaatgtccctcaagtctatgctcttttctttagtcctgtggtcattgccatggatcaagtctttctactttcttgccggggcaggggtagtagttcctggctggccttcctatcttcactcttttcccagtctattccaacccccacccccaccacgtgttgtcattgtctaaaacactgatctgaatctgtgattccttggcttataagccatcatggacttggtggtcctcagtaagtaaaacatagaattaccatatgacccaactattccactctgggtatatatccaaaagaattgaaaacaggtattcaaacaaacatttgtaacaaatgttcatagcagcactagtcacaatagccaaaaggtaaaaacagcccaaatgtccatccatggatgaatggataaacaaaatgtggtataatatattatacaatggtatattattcagctgtagaaggaattaagtactgatacatgctacaacatggatgaaccttggaaacatagtgctaagtgaaataagccaggcacaaaataccacatcttgtatgattccatttatatgaaatagagtagtcaaatccatagagacagaaagcagatttgtgattgccaggggaggggagaatgaggaatgactgcttaatgtgtacagggtttccttttgtggtgatgaaaatgttttggaactgggtagtgatgatggttgtacattatgaatgtactgaatgtcactaatggtaaatttgatgttatgtgcattttatcacaataaaataaatgtgtgtccttctatacctgcaaaacccatcaatgatctctggcaacctgtagtttgagtccagatttcatagtgtggggttcatgcccctcatggtctaacctggcctatctttttagctctgttgctctcaagcatcctgcattccagctcttcctggtgtactgttaacatttttgcttatgctcatccctcacctggagtgccttgtttcccttctttcttgcttggtgaaatccaaagtctggttcagatgccgattcctcctcaagggcttcctcataccccatgcttcttcctgtgtgatcccatagcaccttattcagatgattagccaccatgaatcatagttgagtgtgtatctctgccttgccagatggtgagcaccatgcagggagaatgtctgatttgaatttggatccctctagccttgtgtttgatgcataatagttgatcaatatttattgaattaaatgacttgattatttaagtctaggttctatcctgaagctaatgctgtgtccctaatccttaatttaaaatgctgtaatgatcactatgcctgtactttgtttacgatcattttttattatcttcatctaattaccattaattgtcttagctaatagcaaatttcttcctagtttgcttgcacctgcttaacccaaatatttgttttcttggcagtttgagcactcacttagctttcacctgttttcaagtttgctaacagtgcagctgatgttctctcctctccctttgctatccaaagtcccttgaaaccttaacatttaaccactttctctgtgctagggggaatgtgacagaggacgagtcttccactgttttgttagaggatctttgggtcttaggatgacatagtttgcaaagagattctgaatagttatcactaggagaaataaagtagttttccttctttaatctcaagtcagggagtcttcacatgtcattattttaattacgtttattattttttcaagtgtcagatacatttttcttattaattaaaatgcaattacaaaattctaaaagttatattgaagtgcttttaaatgctttatattatccatctatactgctggtgtcgaattacaacatagtaagggctgttaaaatgtttttgaaagctttaaaagggccaatatttcaatattgtgtgtcctgaaatgccactttactttggagccttcctacataataagcagattagtgaagattcaggaagaaattgaagataccattttaaatgtatgtatagaacattatttatttttatttttgaggtgtagtcttgctctgttgcccaggctggagtgcagtggtatgatctcggctcactgcaacctctgcctcccagattcaagtgattctcctgcctcagcctcctgagtagctgagactacaggtgcccaccaccacgtctggctaatttttgtatttttagtagagatggggtttctctatgttggccaggctggcttcgaactcctgaccttgtgattcacccaccttggcctcctaaagtgctgggattacaggcatgagccactgcgcccggcctcaacttgtttttttcacttgttttctctgactctttggtggatatttcaactcttgggagatctcctccttgaagctcttcagacgtgggttctgtcccacttctctgttctacttcttcttttccttgcctaatccttcttcatgtcacttaaatgtcagtgcgtctcaaatgcttgtccttggctcttctttcttgctctctctgcttttcctggtcttgtccaccactacccctatttcacctgcaatctgtattctgtacttttatctcagacctccaacctgaacttctctgacttccttctagacatttccatctgggatgtcctgcaggcactctgactcagattagccaaaaatcgtcctgttgcctcagtttttttttatctgtcccttctggaaaatgtggaactgttagtctgacggtttttaaaatctgtcccttctgcattttccagaagggacagataaaaattggtgaatgtacccagttgcccaagacagaatcataggctgtcctctgccctgctcctcacatccaggtggtaagcctgttgagtctatctccttctatccccaatctccctgccttggttcaaagccttgtcacctttgactggaccattactttgtcacttgtcttccttggagtccctctcattttccatatggctgtcgacttaatctctctaaagcgcaaatctggtatgtcacttccttttgtaaaactttttagttgttcccaattgtgttgtctagagaacaaagtttattctctgtaatgcttcatgattgggcctctgcccaatattatcttcgattactcctacatactcttctttttctcttgtaactacaaaggtgggcctgattgtgaaggccttggataccgtataccatgaacttgactttatggagggtggagccactgctgactttgcattcaaggagagtgaatttcaatattggaaaaaacctttgaaggccactgagtccacttgctccgttagttcctgataagtggatgtccagtctctgaacacagactgccaacctgcctactgttctttgttcttctttataaaatgggaacagtaccaactttcacacaaacatattgtaaagtctaaagtgccgttaaatttatcaagggcaattgtctcacctttcttttggattcctttgcttttatggtttctgtaggagtttttcctcctctgtgggtcttcatccatctatgtctattttactcttttcgcccatctgctatgatcaatttgtatgtattgttcactccttcaaggactgtggattttaatataaagaaataaaattcaacactcaaaacttcctttaaaaagaaaaggcagaaaagatcgtgaggatcacaccatacccagaaatgtcctaaacaggctctttggatcagagactggcaattgagggccatgtgacaggttcttccttcttcagcctccagcttgtctaactgcaatgctctgattcagaattgcactgctcatggaaagattttggccccagagtcacctgcccgcggtcttggctcattcagaattagagtaaggctgacattgaactgtacttgaatgtgagttgttagtgcagatggtggccttggtgtgtaatgcttgccatgtgactggtgcctgggagcagatgggcaccttctttctgtaccagatgacactccaatcttcctcaaaggcacaagtgcaagtggagtgaggcagtctggagccagcaaagcaaggggaggcataaccttagagctagtcaccagcattctgtcctctctggagagaattgctggggatgtatccttaggtgcaagtctgggatttggttcctgagaggatttgttattctcttaaatgttgtgatcccataatgacagctgacacttatatcactctaaagaattgacagtgtgctttcccacacatgaccctgtttgatgttcatattgaccctgtaaaggagttatattaatttcttaggaccgccacaacagaggaccacaagctggatgacctaaaacaacagaaatctattccttcacagttctgaaggccagaagtttgaaataaaaatgtcaacaggctctgctctctctgaagattctgagggagaatcctttctttcctgttccagcttctggtgactcctggaattctttggtttgtgacaacattactcaagtttctacctctgtctacacatggccttctctttgtgtctgtcttccctttttctgtctcttatacaaacacctgtcattggacttaaaatccatcctaattcaggatgctcgagatccttaatcttaactatatgtgcaaagacccttgttcaaaataaagtcactttctgagggtccagatgggcatatattttgggaggcactatttaactcaccacacttggtattagtatcctcatttgaggatatggaaacctagagatggtaggtgttttacacagagacacattggaccatggactctaactcaagtttttggatgccaaatcttacatgctttctgctgcatcatattagtctctcaatatgtgggtgtttttgtgtggtgagaatgttgctttcctttcgtgtatttatttagcacctactacatgcctgatgaagtatatatatttttgttcaactaagaacagactgaaaaattggagctttcttatcttcgtggctgagactagaatcaggagaaagcaagtcaatgatgaattcttatcttggctcagtcatttctttctccttgttcttctctttcccacatcttcagggatatcaagagggactgggcacagcttagcttctagggttatgtggtcagtgtgattgagctaacttggtaagacccgagaaccctcccacatgcctgctaaatgggagctatgctgcttccttcattccctggacagaagatacctacatgccaagcctaaagcttgaaaggaagtgtaaatatgaactactttttcagtttcttagcacatttcttaggagggccaggtgaaactgtgctagaggtcaaggttgtgatgtaccattttgagcccgtttccccatggaacacccagtgtctattgctaacctgttctctgggcctcccctgctggggtagtttcccatgctcccaaggttttcctttcttcttccccccatataaagactttatagtctcatgtgctactttgtcaaacatttgtttctttttatttatgtaaacattttatgaaatatttcagacatgtgaaagggcataaaaacaatatgacaagaacacacatacccagcactcacctgcagacatcagacatgactgatagctttgaggcccccatgtacccctctcctccctgtcagaggtaactgttgttctgaatttggagtttgccattcccacgcatttctttacaatcttacttcattgcctctattcttgtgtgacacagtcttgatcctaaaggaacactggacttcagcaggctttaaagaaggtcatttggagtgacgtttaggagagattttgggggctaatattcattgaatacctactatgtattgccttctgtgttttccatgagctttcactgacagcagccctctctgtttggagtcattatccttgtttgacagccaagaaaatagaaagcagagatggtgaataacctccccaaagtctaacagctgatacctatttgactccatcatgtgtttctcctcaaattgaagctcctttctctctcagtgagaggtgaagagggcgctggtcaggagtgctggatgtgtgatttagactgagtgtccaacctctctgatctttcctgttctctaaaatgaggagtattgagtcaatccctaagacttttcctgttttaaaattctatgcatctcttagaaatctgtggatataaatgctttatgctgtggagtctcatttcaggcccttcccctctagtcttgtaaaacgttcaggtagatatcactttatcactcagaacttcgttttggttacacccatgtcagtttgcagctcctcttctgttctgcaggcttggaggaagatttctatacatcgtcatgggccagcccaagaggtgagaaatgccaaatactcaagctggcttgcccatcttctccttgccatctgtaccttttgggcttgtttggatagcgaagtcaaggtggagaaactcatcaaggtggaacatggtcctttctgggtaaagagagactcaggctaagtttgaagtaggcactctcctgcttctcatcctatgtatcttaactttctcccttcttctttctctgggagagttctttctcttgcccctttggctaccagggacttccttaatgcctctagccattaacggcaaagcctatctttgtggtgccttttgctccatccctccttttctttttcttttgttccaactcctaactgtatttcccccactccaagcaaaaccccaattctccctagatcctcagtggtggaggaaggaaggcatctgtctagaaggcatgaagaagttttggctgcttaagccccaggcctatgtctcatctcttggggtgatttccagtggatccttagcattaggggtccccaagaccacttccagatttggtgatttgctaggaagactcacaaggctcagcacatactcacagctaagatttatcataacaaaagaatacaaaatgaaatcagccaagtttccagaaaaggtggatggggcaaattctggaggaaatcaggaacaaacttttagaagttttcccagagtggaatcacacaggatgagcttaattccttcagcatgaattgtgacaacatgtgtgaagtgtcttccagtgaagctccttaaagacttagcacccagggattttattggccgtgtaggtacctctgcttagcatgtgcaaaaatcccaggaaagtgggtgttcaacataaaccacattgcctgcacaaactgtttaggcacagtgagccactcttatcagttagagatttgagaaaagccttctgaaatctaagttcttagatgccagtcatgtgccaaccctgcaagcaagacttcctaaggaaagcaatctcaggcctgttatgttgacttttctgcacaattctagtcttctttccctacctaggtcctagtttctcagctgttctctgaatctctccccacccacctgtacccatggctccaaagctgcccttctttctctgcttctgggtttttcctttccagagctcatagtggaagaagctatgacctctcctgccctccagtgtacttgcctctccttcactgagcacacagaggctttattattaatcactagggggaaaggggctgtaacaaaagtagtagaaaccttacaaagttcccttaattgtgagcatatcctgcttccatttcttactcttcaaaagtcatttttataaggtgctggaggctttccagatgattctaaatgctgggattttcaggacccagtaactaacccaccagagtttggaacagttgagaggcaggtgcagatgctcagcatatggaggtgaaaataccaccttttttcctgatagagctgtggggagaatgtggcccgaattggataatgcttccctctgcgctttccatccaggccccagaactagccacctcaggcacaatttgagccaatagagcaaccactgatatgtgctggtcccagtggagagggaagaaaggagaccagaatctctagtgcttttgacttttgactagactaccttttcccagttgaaaagcaaggctcccctggcaagggcaggtgaccagaaggatcagttattctagaaagttctccacatgaaaacccagagacatgagaacaagtgcttacttccctggggacaagtgcacatcttcaacactagatgatactgtagtcaaaggaaagtgcaagtgggctctctgcttggctggcggaggtctcaggcccttccagaacctgctcaatttctctctggatcaggccttagaaaaacaagaagttctaatattgacatgtcctgaacacatactctgtgccatgcctcgtctgtggacatgcattaatccactagaatgcagtttccatgtgggcagggagttcttcctgtttagttcgctgctgagtcctcagcactaaaacagtgcccagaacatagtaggcgcctagtggatgtttgttgaatgaatcatttattccactgagtcttcagaacagccttttgaagtactagatgagatattggtttcattttacagatgagaaatctaagtcagtgagattaaataatttgcccaagacatggaacctagtaaatgggtgagcagggatttgaaccagcgttgtctggttatagtcataggggtcttcaaaaaccatgcctgcttggcttgcctttagaattctggatatggcatactctactggcagggagtttgtcttgtgtaatttttgctcagtgtcagcattggagcctagtttctctggactccatatggccacaagggtctgtacccactgaacagaaacccacaggcgtggcagcactatcaccccaggagccagtgggtactgcccctgcaacagatttgagtaacagattttttcttattttgaagcagttgagccataacagaaacaaagtaggcatatttccaccaagcaaaaaggttaaatggacacatatttcacactaaagatcaagtactccagagggtatttgatactcaggtaagcagaatctctagtgcttttgactagcccttgctgtgctagcccagctctccagctccttacacatcattccccttctccatccacagtcacctgtttacaaatggctgactttcaaatgggcagctcttgccagagcctccttatctcccccagtcctgctgcaggagcagctggtgtctggtatactgctcccttttcagttcacataggcttgggtgttttatttcgggtcatgtgggctttcatgaattgaccttgaattttgccaccacttataaccccatttctcccattcatctatcaatccttctttattgaggacatgttgggttttgtgttatgatgtcctggcactataaggtgaatatacttactcccatagtcacatggagagcttgttttctgggttttaaacaaaaggcctaggaaccactttttttttttaaatttttaaatcaaagaccaactgttatgtatctcaagttcctttaggatttgattcttgcctttgtttcctgttggggtagagaatagcaggatgtagtacttgggtgagcactatgtcaagactcatatttttccattgctacaattccacaagatctcaagtagtgtgtatctaggcattctgcaaataagagcttgaatatcttctgctattgtcatttttaaatgcaatttcattacattaataacattcagcttctatcataaaaatggttctcaaaggcagctaatatacagtgcaatatggcattattggatatgaactacttagatttgtctaagattctctgacaaagcagttctggaactggaacttaactatctaggaacccagctcaagatcctgactccctccacaagaagtttactttgctctgccgtcaggacatcagtaatgtgtttatgcctcagagttctaagaaaactcaagattttgctaaatgtttatttcatctcaggacatttctttttataagtaaataaagcaatttgacatttttactcactttaattatccttctcagaacactttctccttgcaaactctaatagcaacaataacagtataatcaagcaagcaataccattaacacatataatcagcaatggttgctgaagttacctcttgcattctccaataagagtgtgagcaacggtatttgtttttactttatacataatcagcacatgtttgattaaatgatgctccaaggaagcatataaacaaaaatggtcacctggtaattaccttagctgtccatggctgttaggagacttttcccacagtttaaatgcagcctgcagttaagtatattaggtctccttagaggctgacttgatcatggtgtataatctttaaatgttctgtttaattcattgtgctgatattttgttgagatttttgcatgtgcattcatcaggaatattggcctgcaatattcttttcttgtagtgtcctcatctggctttggtattagggtaatgctggcctcataaaatgagtttggaattgtttcttcttcaatttttttgaaagggtttaagagggattggttttaatcctttaaatgtttggtagactttaccagtggagacatcagctcctgggcttttatttgttggaaggtttcgattgctgattcaatctcctttcttgttattcttctgttccgagattctatttcttcatgattcagtcttggtagtttgtatgtttctgggaacttatttctgttagattattggtgtataattatctgtactctcttatgaccctttgtatttctgtggtcttggtcctgatactttctcattcatttataattctatttgagtattctcttgttttccaagcctagctaatgatttgtcagttctgtttatattttctttctttctttttttttttttttttgagacagggttctactctgtcacccaggttggagtgcagtggcatgatcagtagctcatgcagcctcagccttccaggcttaaacaatcctcccactgcagcctcctgagtagctgggaccatagacataggctactatgcctggctaatatttttaattttgttttttgtagagacaaggtcttgccaggctggctttgaactcctgggctcaagcgatctttccgccttagcctcccagaatgctaggaattcagatgtgagctaccacgcctggcctttgtttatgttttcaaaaaaaaaaaaaagagttcttagattgatcttttctatttttaaatttaattaattagattttataaataataattatgtatatttatggggtacaatgtgatgttttgatatatgaatacattgtagaaggattaaatcaagctaatagatatattattcacctcaactagttttttttttttgtggtcagaacatttcaagtctattttagcagttttgaaatatacaatgtgtttttattaactccggtcaccatgctatataataaatctccaaaatttattcatcctatctaattgaaattttgtaccctttgactaatatctccctttaccctatccccagtctctggtagtcaccattttactccctgtttctatgagattgactttgtaaatattctacatataagtaagatcatgcagtatttgcctttctgtgcttggcttattttacctagcattctgtcctccaggttcatccaggttgttgcaaatgatagaattccttttctttttaaagctatatagtattctgttgtctgtgctcttatttctttatgctttgatcttagttctgtccttttgctgactttgggcttagtcttctttttctagttccttgaggtataaagttagcgtctttatttgagatctttctcttctttcttaatgtaggcatttattgctataaacatccctcttagaactcctttgctgcatcctgtgagttttggtatgttgtgtttccatttacatttgtctcaagatatttttatatttcccttttgatttcttctttgacccattggttttcaggagtgtgttgtttactttccccatatttgtgaatttttcaaatttcatctcgttattgatttctatttttatactattgtggtataaaagatactagttatgatttcaatatttttaaattttttaagacttactttatggcctaatatgtgatctatcctgaagaatgttccatctgcacctaaaagaattctgctgctgttggatggaagtctgtttgatctatagtgttgttcaagtttgctcttttcttattgattttctggcagaataaactgtttattattaaaaatggggtgttgaagtcttctactagtgttgtgtttctctctatttcacccttcatttctgttactattgctttatatatttaggtgctaagcactgggtacatatatatttacaattgttgtatcttcttgatgaattgacctctttatcatcatataatcatcttatttgtctcttgtgacagtttgtgatttagtctatattctgaacactcctgttctcttttggttaccgtttgtatggaatatctttttccattttttatactttcagcttatgtgtgtccttaaagctaaagtgagtctcttgtaggcagcatataggtatatttttttctttttaaatttattcagccactgtatgtctttttattgaagaatttaatccatttacacttaaagtaattattgataggtaaggacttactactgccattttgtaattgttttctgactgttttgtagtttctttgttccattcttcctttcttaactgtgtttctttgtgatttgatttttgattttttagtggtatactttgattccttttttcatgtgtgtagtagatacacaaaatattttttcatcttttcctttaaaggaagtactttatggcttctctttggcatatgcaaattgctagcatctcatttgtgtattttggggccattattaagtcaaataagggttacctgaacacaagcactgtgataccatgatggttaatctgataatttagacagctactaagtgactaatgggcaggtggtgtatacagtagtatgaatatactggataaagggatgattcattttcccaggtgtgacaaagtgtaacagcacaagattttatcatacattcagaatggcatgcaatttaaaacctatgaattgtttatttctggaatttttcatttaataattttggaccatattagaccatggattactgaaactttggaaagcaaaaccatggagaagggaagccactacagttataaaagtgtattttaagctgataacaactttactttgaccacgtacaaaaactttacactttccccacctcacatggaggctgggtccgtgggtgatggactagaaactagttctgagggagcagtactggaagctgagtggggagctagtggggcaagcctggaccctggatctagtggaacatggggcttcatcagtcagcctgtctctgtgggtgccgccctggtcccttgggccatgggggctgacctggcactggggcagttctgaagcctggggttgagggagttggcctgaagcctagggctctggagctggtttggcactggcataggcctggggcatgagttcatgaaaacaagcttggatcctggggccataggggctggcctggtgccaggtttcactggtgctagggtccgtagccaagttgggtgcccacttcctttttcttccaccattcagagggtatctccacactgtgctggctgggcttgggagaaggatgacatggataatgtgaaactgtccttcttactctttctaaatgtatcttctttctgtgctacacctagatgctataatctctcacctggattccttgactcttgtgaaggtatttttatgtgtgaataattgtttaaattgatgtttctttggggggaccagcactggagtgtcctattctgccatctgatgaacatcattctaccatactgtgtttaaatttatatgccaacatatttggctctttatttggtttctgagtgcctctgggtcaagaactttttcttatttctctattttcagtgtcttgcacagtgcccctacatagtaattcttcagtgtatttgttgaatttaattgctttacttggtttattatggctttgagtcgtaaatgccatacttttatgttaatggttttactagtatttctgaacaacataaaatttgatatttttgtgaaacttaaaatggtataattttcctgaatttttatatttcccatagtgagttgatatcacagttagacctttcagggagtgtgggtgtagaattaagtttggcatcacaattctgtttttataaaaatctcaaagacatgttgactctcttagattcaagtaattagcagatattaaaaatgtcatgtcatgaatctctgtgcctgtgatagcatctaacatgtgaaaaaccatctgttcaggtagctatttacaatgtgtcaagtagcttctctgttgaaaccaggaaacaaccaaaatacaatgacaaaaaacctattttaaaaaaacctattcacacaatcatttttcagcctaaaaatccatattttgtcacaggaggatttttgaaatcattttttggattatattcatttaattacaaaattattcatcctcactttcctcatcaaggatgaaagaatatcctgagaggtatgcatttgtaattttaatataaaggaaagatgctagtgatctagctggctcctgaaattgatccgaactcttaataaataatgcagaaaggtaaataggatatcatgaaggtaatagaaatgtaattgttactttggtgttatgatctaataaggagagtttatagtgtaggcatcccactggggtggaaagaggataccctggggtttcagtcttgcctctacccttaccagttgttgtccatgggcttgtctcatagactctgatcctagtttttctatttgtgaaatgaggctgttataaatttgcatagtattattatgatgcttaaaaaggatgtacaaggtaaaggattattacagaagggcaggtcatctggattatagattattcctaggaaataattaagtcagttctttggacatagttaagtgcagatgcattctagaatgatgtattttcactcattatatctaatatgacctctacttctcccaccccatagctgtgtggtagagctgcattaagttgcttgaacttaaaacacttgccacaagccgtctcttatggaagccttggagccagaggcaaaattataatagttggttataagatatttgcttaacacatatttccagtagtaaaataaactgaattttattgagtactatttgatatactttcacataatttttttcttagccaaattttctaaagttttaggagttaccatgtattgattccaagtaattcagcatagagattgttcattatgcagacagcaataaaacacgttatattacttttagaatttataaaaatgtttgtctctggttgaatattgcgatagctatgtaacaccgtgttttccctttttgctttggctaccaggacactcaaaactcaactttcagttatagaatgttttagccagtgtcagtgtttcttagagggctgtccttagactactgccatcagaatcaccgggagtgcttgttcatgtggactcgggttcttaccccagatgtactaatgtagaatttttctattatgggcctgaaaatctgcattttagacagaacactgtttattcttagacactaaagtttgaaaattactggcctaagagttcagattctttcttcttcctcccattacatggattttgattttctgtttctattttagtagctatattggctatcttatcctaaaccatccatagcctttttagaagtatgaaggacagaatagctgaaaacgtagaagttcaatgggaaaaggttatagaaaccaagatagagtcaaactaaagagaatagtttctgccagtttccttgttttctctttccttaggtgaaagtaagggacacaaacacctcttgcattgaaggaggtgagaaggaggacttgtagctgggacctctgagctcatatttaaccccctgtttctggtagaattgatgatgcagatatcaaaaggccctggagatccatagatttcagaattaacagagtggaagaggccttggcttgaattttttttttttttttttttgcattacttatctgtatctactttgattgtaggatcccttcttataaaggggcagggactctgttttatacctcttagaaatagcacagtgtttagcacttagaacacagttgggaagatgaaaggatggaaaaatggaaggtaaattagtggagctggtgggcattgagaatccgaatttaacctattggtttaagttactgagaattcttgtatcattgaatatgccgatctttaaaaatacacattttagagccaaatctaagttatttaaaaatatgatcaaatactcttcatatcactgtcatattgaagaggaacgggttaaattggaactaccaatttttggccagtgaaccgacctgctgcaggcaggtatgggcaggaaagaagggtttgatgggggccatggcagacctgttcatcagagctcatctagggtcagatcagtgggtggacaggaaagctagaccatggaaatgacaggcagaaccaactctactgactcttgcatagaccagacggatctgtcatgatcttaactgagctggagatagctgagctgtcaggtgtcagggtagctgattaagttaacaagccaaaatgaaagcaacagtcaagcctttaactacttactgcaatagtgtaagcaagcagctaagctagagaaagcaccaccccccaccccagttccattttcccccatggactggtatacttgtccagggtcaggtttatcagtgcagacatgagggctatctcactgctgatggaaccctgaataaaagatttctgcagttttatggacccaggggctaggagaagggagaggggaagggataggagtgaaaagctactgagtactgagtcagaatggagaaaagcatcttcaaagttttccctacccctgacaaggaggtcttgttagaaggacctgaggaaggcctgggtgaccagtggccatagataaatcggcttctgcatgaagatgcctaggctaggaatgcgggtatacgtgagtgtggtcaggcaggagggcctgagtccttgactgcagctccctgcagagactgccatacatcatttgtgcaccaagtctggtgtggggagggcagcattccctgtgagttcttctaggcaaagcctttgtcattgcctatgatcacacatgaaaaatcacacataggattttggtaggagccagactcctcaagaccttcagtgggaaactgactcttcctggagggccagaactgagctggactatatcagggctaagcaggtatgtcagcaattaaagaatatttagtagggcctgtcatagatatagtaggtggtgaactcaaggccactattattaccaccataagaacattcagtttggtactagttgaggaagcatgacatgggactatagctctacagctgtcttcagatatgtgaaggaatgatcatgtgcttgtatgagttatgcaatatgtatttgttgatgagtttagaagatcgaaagggcgtttagtgtggattcaaattatagaattacgcataggcccttgtttccctacctcttttctttaaatgcctctactgcttctactcctctgcctggcacattacatcccctcaccgccaaatctctgcttgtccttcaaaacccaacacagacgacatgtgattcccagggagtccatgtggcatagtggagtgagcatggggcaggaaaacctcaaccctgggatgtcaaatcctcagggagtcctgatacttcccgaaatatgtgaccagggcagatgctgctaattgattgcaaaattttccctttggagcctgacgcagctgcagatcccaaggcagctcatcagtaaactactaccaaccgattaagtagatacaaaggaaaaatcatattgccatggtgaccttcagcctttcattcttcctggtcagaagaaacctcccaacccccttgaattctttttaaaaatgggttttcattaattattgagtagatagaaattatttatgatgtgtaaggaagatgtaaaaaatcacacgatctcaaacacttgtatatgcactatccagtttaaacaaaagaacgtgaatgttgcctttgaagtctcctgtttcctgtcccaattctatcctcttctttctctcctgttagaggtatccagtctcctaaatttgaggtggtcttagcccatttaggctactataacaaaatatcataaactgaccagcttatgaacagtagaaatttatttacttctcacagttttagaggctgagaagtccatgatcaaggtaccagcagattaagtgtctggtgaatgcctgcttcctcattcacagatggtatttttcagggtgtcctcacatggtagatgggacaaggaaactggggcctctttgataaaggcactaatgccagtcatgaaggctgagccccatctccaaatgccttgccttcaaataccatcaccttagggtttatgttctgtcttatttcttcaattagactacaagctccataagggactcagagtgtcctagatatttgtgttctcagagagccaggcattacagattgaacctggtcattgcacaagaatatttattgaatgaaataattaaagagggtcaattttgcattatcctttcccccacaccccacatttagacacattccctcagtggttaactgaacacctgccaggaatgttgcaagaggaattcctacattgggaaggatcttgtactacataagtttcttccaactccaacatttctcaatctctgggaaaatctctgacctatccagaaaagttccctttagtatacagagggaactgcctttaagtcttgaccaaccagcttccctggatcccttggttctttgctttaaaaaacccaactttattgtgaaatataacatatatgcagacaagtgcataaaacataaatgtacactataatgaatgattacgtagcaaccaagtaaattttaaaataacctctattgtgatgccaggttgaagttcagccctttagaaattcagccccttgatatgatctagaaagggttggaaaactattacctgtgtgctaaatatggcccacttcctggttttgtaaataaaactttattggaacgtaaccatgctcatttgttttcatattgtctatggctactttcatgctacaatggcagagttgagtagttgcatcagaggtcaaatgacctgcaaaggaaatatttactgtctggcctttttatataaaaagtttgccaagtcctcttatgtaaaaatttgccaactcctgttctaaagtctgtcttgaaaaaaatataaccgtctgtgcatcctatgtggttttaccctctcagtaaaacaagtctagtgaatctctggttgagaaaaggaagttaaataattataacattcaaaaatattaaactctatggtctattttaatgaaatcttaagaatagccagaaactaaacccaaagcaaattatctctaaatcttgacctccttaagggtctgctgaattgcatcaacaacattttatagctagaagactggagcaacccaatatttttttaggtcatggggtgtaactaattgaatagaaaaagagatcaacatcttgagattatatccctggagaaggcaacacctgaaacagattgagttttttgattaacttattccttagtgagtagaggttaaacatccaagtagatgaaaagacctagaaggaaatagagtagagcacacatcattctttagttgacatttggaaagtgcatttgcacagttacccttcccccacaacatatgcgaatgcacttgcacacacgtgaacacacacagacacaagaaatgatgcttagtcaaagacaaacaaaaacgagatggccactgtccacgtgttttctactatgaacacagaaacttttggctttaattctttcctataatcatcagtcactttccctatagcaaaaccgattttgtttccttggacaatcttgtaaatgaatatgaaaagtaggaaataacttaactgcctacaggggaaatgcatttgaagacaaatgattgtataaagttcattttttaagaatcaagtgtaatttcttatgcaaactgtatttcagtctaaagatctctaatgctcataaggaagtaccttttgttgtacttctttgaggcaaagagagaattgtaatctgagaaagagatacaccattcaaagcctgattacactgcctccttaaatcttctctccccaactgaaaaataattatatataaaaacatcttgcttttcaaatttgcatttaaagaacgcttgtttggggctgtccgagtgaaaaactgagcacactaaaatagcagtctttcaaacatacagaaaattattttttcatccccaaaggaggttgctagaagtgtacctccttgaaaatacgttcgttaaaaatgacatatagagcatagactcacagagtttgatatcagaaggagaccatagacccaaactgagaccctctcgtctaagagaaaaccaatccatggttgtgaatgcatatttctttttttattagttgctttgcattctttattaaagcagaatataaacgatacctgatagtgggacaagtggttggggaacagtgttatcaaacagatctgggctggattcctacatctacgctttataattgtgtgaccttgggaatatgtctgtctctcagaatctcaagtatctcacttgaataatgaaaacgatatggatctttaccattatgttgtttgaagtattaaatgaaataatacctataaaaagtcttaacgtgtagcctggaatgtagtaaaaggatgagaaataagagcacagcattcatgtgcttattagcagccactccaaggctagaagtgatgccactaacacctagtccagattttttcttcctattacgattatgagttcttagagataagagctttttatttgtatgtttgttttttaagaaaaaaaaaacctagtggctttcccccagctgttgtgtttttaagtacctatgatttcttttttttaatttgcagtctgtactaatgtgtactgcggccactgatttttcttaccagttgatgaatataggcagcactgagaaaaaaagctaacaggctgaatgatgataatagttaatacttagtgagtgcttactatatgccaagcactgttcattcatgaatttgtttctttaatcctcagaaaaccctataaggtagcagtgttattatccccgctacacaggaggggaaatggaagcactgagaggtaaagtaacctgtccagttttcatagccaggaatgaggagacccaggagtccaggccaggcagtctggcttcacgcttgctctgggcttgtcctatgtcctggatgcccaggttccccagcctgatctgggcagtgactggattgcttgctggagccgaggctctcagaaccacctcgcgagggctctttgtagctctccagaccgaccccagagcttggataagttaatggtttggttcataaccaccccagggattcagcatcagaaatgacccaggaccccacctgcctaagatgagagggttgcatttcagtttactcttgtttctagacctttcattgggggatacaggggcaagggctctagtataattgctagaatctgttgagatctcttttgtggaccattgtttgagcaagagtaacttttaatgtgaaggggctgcttgaatttgccataaaaataatggtagcctttaagagctagtctaaggattaattgacttaagatttttcttgtttaaatctccttcacctttagggcccacctgctggtcacttgaccttttgccttaatttattttgtaaatactaagccaacaagaggaaaagtgaataccttttacaaagacttccttctcttttgcattgggagtaatttttccttgtagattaactttggatgactggctggggatgagaggatgatgtgcaagagtgacagaatatgaggaaatatgcaggtagtggtatttacagtgactctttagggacattgcttaccaaatgtcatttagttggcacaatgggtattcagtccagttttagagttataaggcaccctgaagacaatttagtcttcatttttacagctaaggaagatgaagaaaagcaatttagtgacagagccaggactagaaaccagatatcctgattttttttttttttttttgagacagagtctcactttgtcacccaggctggagtgcagtggcgtgatctcgactcactgcaacctcagcctcctgggttcaagcaattcttgtgcctcagcctcccaagtagctgggattacaggtatacaccaccaagtccagctaatttttgtatctttttttttttttttttttttttttttttagtagagatggggttttgccatgtgggccgggctggtctcgagctccggacctcaggtgatctgcctgccttggcctcccaaagtgctgggattacaggcatgagccaccatgcccagcccacgtatcctgatttctatgccttttcattttttatactgtttgctgcttgggtagagtaaaaagccatgagaaggaggcagcccttagaaactccccttggctgggagacacagcccgaagattcagtttgcctaagcttgggttcttttatagattccattagttaaaaccctttttctaagttttatatgggaaaaggaaaaagttgtatataaaatatggcaataaatagtgccattattttgtaatattattgcttggaattcagatttataaatttaatcttcatctttccactctcacaaaataaattttagcatttataaagactattttacaaccttttactcatattaatattttctattcaacaattgtgatttgctgtcttaatattcactttgttcaggaatgttcttacttatcatcacattgtgagagtctctcacaagctaaatggtcttggtactttcttgtctttagaagataatgcttacaattttttttttttttttttgtgacggagtctgtctctgtcacccaggctggagtgtagtggcgtgatctcggctcactgcaagctccgcctcccgggttcacaccattctcctgcctcagcctcccgagtagctgggactacaggcacccgccaccatgcccggctaattttttgcatttttagtagagatggggtttcaccgtattagccaggatggtctcgatctcctgacctcgtgatccgcctgcctcggcctcccaaagtgctgggattacaggtgtaagccactgcacccggccgataatgcttaaaatttttgaaacatcattttcctttctctttgccataggaagagtttcagtggacttaaataccttttgtgacaagtgggggtgaatgtatgcttgaattttttctgggatcttaaggttcttgaaggcaatgtgaggtagtaaggtagacaagtataatttaattaactatataaaaactaaatattatggcagcctagttccagaacatttagtgttgcattctgctaccaggaagatgcaaaacgcaagaatcctagtcagataaagtccagcaaagacacctcccataagcctcctttctggatctggtttagggctgtctcttgctgctggaggttgtatggggtggtagaaagaacactagacagaagatccaaagatctgggttcctgggatctccacctgtgctttgggacagttaatgttacctctcttgcccaaagttctctcatttgtaaattcgggttacggcttagaccagtggttgtcagcacagctatgtatcctaatcagttggagatttcccaatatttcatcacaaagttttaaaacgcacagaaatgttgagagaattttgcagtgaacacccgccacgtagattctaccattagcatcgtattaaagttatttttatcacataccaatttatatatccattagttgggaagcttcactaacacactcatatctgttgtagaatatatacctttggggtattaggcagggtgaagaagggagatttctctttctcctttatatacttgtgtttgagatttttgtttaacagtgagcatgtattactactactatgaccaaaagaaaaaaaaaacaaaaaacaaaaaaacagaaaaacccataacaaaacaaatacacatatgcatatattcctgggccaccaacccccagagagtgtgatgcagtagatctgaggtggggcttagtattttttgaagtgtagccaggattgagaacacaggactatgcctctctgaagtgccactggggtttcatagtcacagagtttatgaaatctctttagtgacaacctgaagctcccctctgtagtagattgattccagcttcttctagtttgattccagattcttcctggttcatactgggcattcagccgaatgctgctattggcataacaatgagcttgcagccagcaaaggaactgtgtaggtggagacaacctcagaagcatgagatgcagctttgcttcttggcaatttcttttttattcttattgattctaccatggcagctgtttcagacctctattattgagcccttaaaaccacctcttttatctctttataaataatctgtttgcctcaattgacaccattgccagccactgttgtaggtggctccccagtcacactgtgtggctctctccaggagaaccttctctacccctcatatgtaggttggtatgccagactccccaaacatgctagcctttcctcctttaaagtatttttctcagacatgtagttgccattgcttgtctgttctgtcatctccaccatgctgtcccattcatctttgtacccccagttggtggcacatagtaggtgcttgccatgtaggctgtagatattgtccctttatatcagtgatcaatgtcattgcgaattgtttggtatccttgatagggctttcatgctccaaaaatactttgtatttcccagccattaaaaaattaatatttatttcattaatgttacaaattcaaaaacctagtttttcttaaagcttttaacttacaaactttattttccaattttcaatttgttttttttaagacagggtattaccctgtcatccaggctggagtgcagtgacacaatcatagctcactgcagcctcgaaatcctggactaatgcaatcctcttgccttagcctcccccgagtagcagaagcatgataccacgcctagctaattttaaaatttcttagacagatgaggtctcactaatgcaggaaaacccccaaattgaggcttagctcaggaggtttcttagcttcactcaggaaagaattcaagagcaagctgacagtgaaagaaagcaagtttattagagcaacggggtgcagcaaaatggctgctccacagacagagcagggctatctcatagacagagtagcagccaatagcactcgtggattgctggctagctgtatttatacctacttttaatcatatgctaattaagggacaggttcttcatgaactttctggtctgggaaaggattaggtagctcccagaactgtataaggtaacttctgggtcattgccttggcatttgtaaactgtcatggcactggtgggaatgtcttaaatacattataattagtgtataatgagcaatgagggcaactagaggttgcctttgttgccatcctggttttggcccatttctttgctacatcctgttttgatcaatagagtcctgactgagggtcggaacacaagtactgctgatctcctacctcatccctatgttgcccaggctggtcttgaactcctggcttcaagcaatcctctcaccttggcctcccaaaacgctgggattacaggtgtgagcctctgtgcccagccgcaatttaaaatttttaggtgttaatagtcacaaggaatctgttggtcattgtttggcttcatttatttaataaaattatcctaattattttaaggcattaataattttaatattctgtcttttaaacttcatttgcctgcctagcaaacaaaatctaattctcataaatctagtaaattaaatatatgaacacagtgaaacttagattctcttaaacattccgattttgtaacaaatttagcaaaattctgtcatagcttttaacttgaactcacaagtctcagctactcaatcactcaatttacattagtcacaatgctcatttattagatactctaatgtgccaaactctcttaaatattataaacacttttaatatcagacattaaaatattgataagaaagattttatttataacagtattggagcgctccctggctcagtagacatttactcactgcagtgggagcatttccactatcaaccacagagctgttttgctggttcttgaggttagaggcttcaggtatccaggcagatttttcttacaactacaagcaatgcatagacccctcttccttacatgctgtatcagtgaggtttccatatatgcctgtgcccatagaatggtcttatagtccccctgctttggattctggttataccttgtctagtctgatttaagtctgtaatcatccacccagcttgcttccctactagattggatttaattaatctatttactgcttgattgtattctgtttctgttttttggccacaacatttaaataatgtcttactgtattgcgtatttctatagctctggagaaatggcctttagttctaatgacagttaataactgttttgctacatagggctcctttcattatcccctgccatggatgcatgttttgaagactaataaaaaagacagcatttaattaatgatgtttaatttgtgatcactttcttctggttaaccaaagacaaattcaactgtctatcagagcttcttatcagcatgagataatcagtactacaaatgggttgatataattccagtcaaaaggaaataactggtttctgtttgtgtgcagcttgatcagaggcaaatacataatttttgtgagtctcattggcaatctggaaactgttcatcagcttttcatcacttcctttgtggacatcagattcagaaccacaacttaatcttatcattagtctgtcttctctcctttctcaaaagctgggtcatcccttctcagtatctcctggggacctttcttattcattgcctttacttcctacatctctgatctccactcttcactatttctgtgacccatatgcatctcacatctttccgatgttaaagaaactcatgcctgactttgtttctccctcttacaatcatctaatctctatccttccaatgaccatacaagtttttgaatgtggcccatagaaagaacctattctttctctccttacgttttacttctgtacttccttcctacttggccctatctaaggtcacctgattatggttaaaaaccatggattcctcttggcatttcctagtctgctctcattattttgggtctacttatttggcttctgcatcattgcatttatctgcctctcttctttcccctctgccagtccttagtcactttctctaccttctttttttcatggaggcataatgaagagcataggttttagagtcaggcagacatagggttgaatctctgctttttcgtcaccagttgtgtgaccttgggcaatgctgaactttgcccagcttcagtttccttatctggaacatggggataataataccttacttgtaagttgctgtaaggattaaaagaacaatcagtgtgtagatatggtaactgatattttatagacttccttccctttgtagtttgtaatactaagggtattatccaaagtgtactgaggctttctctttcccacgaagcagtcagctttcattctgtatattaactccaaaatttgtatcaagctcacatatttcccaacttccagacacatatttctaccaggtgctaattttcttcacttggatgcttcattaatccaaaactcaacataattcaagcaatactcagcctgtgattactttcattgttaacagaatctgaatcctcacagtggctccgaggttggaggcttcttcctcccttccttccttccttctctcttctatctacccaacaactgtgtcttgagcactctgttatgggccatccagtgtgctttgcacctacggtacaatgaggagtatgacaaaggcgatctgattgaggaagtgtggtgggtgctgatggtaggaggacagactgcagtgggggcacttcagaggatccccagcagagttgggatgaggtaatggccaagtttacatttcttctcctattcctacccaccccattttcaatagatcttactttcaatttatgaaatatcttgtttccatccttctttttcattcctaccataactatttcattcaatccaagtattccaggtacctcgttttggctggacattcgtaagaccttcccaaatctgtctctagtcaatccatctcctttccaatttgttttctaagaagttgtcaagatcacttcctgaagcacaaatctgatcatttatttcccttgttaaaaatccttatcggttataccagtcaggattcagtataggaaagagaaggcactctaagtatttaatcaggaaaggatttaatgtggggtgtaggtttataaaatctaagggtggctagatgagcaggcacaagaaccatgtgccaaggatctgcaagtctagaggtcaggaatttgcagctttatctgctgttcttggatcgggaaggcaatgatattactagcccacaactgcgtttcttcacttcagaatggtgatgtaccctgggtgttgctgcagaaaaacctcacatctctgtgatcttacttgtcaaagtagaaaactgtccataaagatcaggaagatggtctccctctcatttccaccttccaaatctcagataagggcaactaattagtgggacctaacctaatttgtggaggccatggagtgtagtgtggaagaacacactccatggctccatctagccaggctgtctgctgcctacggcaagtgcaatctaatgttcaaagccgtgtgtggtttttcactgttgtattttgcttaaccccttgtcttccgccatctgtttctgtcactagcagttgctaaacagatacttgttgaatgcattaatgaacgaaggaatccactcctgacccaattctctcttaccttctggccataatgttagtaggaatgcccttcctggcctgtaccaacttcttctacctgccagaatcctcctactctttctctaagtcccaaccaaatcttccctcttgtagggatcttctaactacacccagaacaccccttgtccccttttggaacacagcgactgtttccttcattgatatggtactcttcctctacccttaccttggggtttattcagtatttccttctccttttctccaggcaaagcaactgcagttctcttctaaggatattcattttcctctctcttattgttgtaattgcagttgagagtcaataatttacagatgtagttaaatcttttgtagctgattctctcgtttttactcttgcgtagaaccccacatgcagtttttctcctctgctaacatagttcctgttttagccctagacagaaatacaaaataaatctaaaatgggaggatcctccaaaggaaaaaggaagaattcttgtttataggtttctttttactttttcagtggaattcacgatatgttcccagtgttctggtttgttaggccttgaccagggtaagtgtattacaagaatattccattcccctaacattcatgtttggattcagtgctgtaaaagcagggctatgccgtttgtctgtgtgcttgccccagtggattccttagaacttgactttgttttatgtggggtgtagggaatcctctcactattttttttttcatcttttctttcttcttctattctctctctctctttctctttttaaacaaagccctttgttttctagaggtatctacttcgtaagacaacttaaattagtaaaaaggctacctagtcttcagggaaattcagttttgttgtatttaaatagactttattttctaggtttacagcatagttgagatgaatgtacagagatttcccacacaccctctgcctcccacatatgcatagctcccccaactaccaacatcccccacaaggttagtatatttgttacaaccaatgaacttacatggacacattattatcacccaaagtccatagtttaccttagggctcactcttggtatggtatattctatgggtttggacaaatttataaagacatgcatccaccatcatggtttcatgcagagtagtttcactgccctaaaaatctcctgtgctctgcctgttcatccctccttcctccttccaccttggcaaccattgatatttttactgttttcctagttttgccttttctagactgtcatagagttggaattatatcatatgtagccttctcagattggcttcttacacttagtaatatgcatttaagattccctcatgttcttcatagcttgatagctcattttattttagtgctgaataatattccattgtctggatataccacagttttatttttcattcctctacagaaggacatcttggttgcttccaagttttggcaattatgaataaagcagctatagacattcatgtgcaggtttttacgtggacataagttttcagctcgtttgggaagataccaaggagtatgattgctggatcgtaaggtaagagtatgtttagttttgtaagaaactgctagtatcttccaaagtggctgtaccattttgcattccttccagcaatgcagatttaggaggttcaaaggacttcttaaaaatttataaaaggaaaaattcatccctataaaggtgtagaatgttcagtggatggcctagttttattttaccaaaatatgagcatgtcacagtcctttaaaatgctcattctgctttctcctctcagctcaagtaatagaacttgaaattggttgcagagaaatgaggggaaattctatagcaatggcacactagctaatcactcctgtagcactgatattagagttcattcttaattttctgcttatggatcagcaacactgaaggaatggggaaagcaagctgggtccctgcaattgcctaagtgggctttcttgcttgcttgaatttaacccgaccaaggggagtgtagttctttaggcgctgatggttattgcagttatgagcagaggcatttaatttattccacttctttggatgcactatagctaacttcctgtgaggtaggaaaaggtgggggggaattaaataatcctcaagctggtgtgaagggtcccttgtaagccccagtcttgccctacttcttcaagccacacctgttcttggaatggtacctctgcattggggcagggcactgggccaccaaggaacatcagcagcccattgggatagccccagtctctacactgaaattttgtgctcaggaagacagggtttttttccctccaaatttgaatgctggtgaaatctctccatcaagccccttctgcctggaagaatcaatacctatttctctgccaggcaattccaactagaaagtgtgtttggaatgctttactatccccaaggtgcctcaattacttgggttagcattaaaagccaaggatttcagaggatgaatctttgtgggataaattaatgcctgtggtgttttataatctcaaggagaaggagatgttttagatttaaattttaataaatgagctaattagaaatcagttcagagggatttttaaaattctttgtactgaagaattttttctttttagccaatcatactctaaataattctacagatatacactgaggatccatatgtaccaggcatcacaataagctgagaggttagaaagataggtaaaaacactctcccatccctgaggaaacatatagtctagtaagagagccagacacacagagacatccagtctttttataatcacgtatttgagtgtctccagagagagtttatctcttgggatacaaagatgaataaaactcagggtggggacttctctgaaggaaacacatagtaagacagttatgctactgtgtgatcggtgccaaaacttggagatgggttactccattggggacatgcagatggactgtcaaggaatgctttaaagaggagaaagatgcttgggtggtccttggagaataaataaggattcacaggaggagggcagggaaaagaaagtccaagcattggaaaaagcctgtgccaggaccctgaagttttcaacagcttggtgagttttgcaactctgagtatgaggatgtaagtgaatgagaggatgcaagtggggaatgatggcaagaagaaaggtaggagagcagtcatggggcttgtgacaggtctcatcctgcacacagtaagacgcagaggagagttttctgttggagaaggcacgatggcatcttcatttaaaaatcctcggggttggccagagtgaggctcaaggcagggaggctgcttctgagactatgatattcgctctggggaaaattaatagctagactggggcaatgacagcacagtgaggatagaaagaagaaagaaatgttcaggaggtgatatggacaaatgggttaaagtgaggatggcactgagatttctagctgccctgtaatgtggccaaaacagtcatccatataggattttgataaatgtcattttctttgggccacagagtagatagcgatgcatttacatggaaaaatggaaagtcagaggaagtgcaagcttggaggaaaaaaagcttggatttggtattgggtctagggcatttattcctttaaaaaacaaagctagctgtttcctgctgatgacaaatacattcatatgcctatttggtagatggacatgctgttgctaattgaaaatgctctaattgaaatgaccgttagaaaataaccttcatactttatccctgattgccatggttatttatttattaggcctcctctaaggctaggccaatgagaaaagagggatgatgtggtcaggcttgggaggattttgtgtatctcacctttgagacagctccctgggaggaaagaaaagttgcctagatttctgggctccctgaagtcatttgtgctagttgataattcagggatcaagtcttcccaggatagacttggaccagatcgattttaacataaaataagagaagaaaaatgtgaaatgggatctattgaacttcctgacttattaaataaatgtaatttaacgtttttactcagtaccttagttccagttatagaggtgaggatcagcttgccattcttggtcattcctgtttctgtagggtgcaagagttggcatattatttgtaggttttcctgtcactggatagcattttaatctttgttaatgggtgttacacgttattatgtatctatataaacttgaacgttgttatactaccctgagctccatactaagtgatctccttgatttcattcctactcaagagtcagagatagctggaattttgtacagatgtagagaacatgggaacagttgcataaacattggtcacgctgtaaatattcaagaaatccatcttgagtgtatattgagtgtgtattatgttctggacactttttaggccctgagggctcagtgaggagcacagaagaaacagtccttgcctgagtggagcgtacatgatagtgtagaggatagacattaaacaagcaatcaaatacagtggttacagatagagataaatgtaatgagaaaaaaaaaaagagtaacgagctggaaaatgattgaggtggggagtcagggaagcgtttctgataagaagccattccaggatctaaggaaaaggggttccaagcaaaagaaacagatatgcagaccctgggatgggaatgatcttggtgagttcaagaaacaggaggacagtgattagggcttgtagatgtgatagagctggggagaaatggctaccttcttcccaccactcatggaatgcttattagaggctcaaaaatataatggatgtatgcataccatatataaatatatataccccatctcatgctacatagtcaggcattgttattctcatttcctagatgagggaactgggtctcagagaccaggtctacatagttaggaagtcacagagtgaggcagagtcaaggccttcccactccactctttccacctcatcctaactgcagaccagcaggactgaagcaaggcacttggaatgacataagtgctgagtcactggcctcctaggctgcttgcatggaatacctatcttaacaaaatttgcaatggcttttttggtatattagcaacaataacaattataaagcaatgatgacaacggtgacaatagctatgcctactaccatatgcttttatagtttgtaaagttctttatcatacagcacctcatttgtagctcagaaaagttctcaaagataagcgggacaagttttatgcttctcatttaggttaagagattgcctgaggtgacacagcgcactgagctgggacatggctgttgtgattctaattcagtgctctttacttaaaccatagaaactcctggttgaaggaggagatatatatggttcataagcttgtaggcatgaattcctggaaaacaagtttgtcctttcttcaaagtgctttggactgtaaggaagaggcatgaaagatggattcattctttgtgtacttattgagctcctgttgtgtgtcagacactggaaataacaaagggtcccacttaaataggttaaaaggtactaatttagcacagtgttatctgctatttgtatttgataaaaagacgagaaaaaacactgcggaaacacagaggaagaagcgattaagtaagtcattttggggaatttgaggatggcctcaccgtgaagatggcattgaactgggccttgaaggatgattgatagtggtggggagggattctccagggagagaagcaggaaggctattctaggaaaaaaggattatggcaatagaagaatacactctctgtggggaatagcaacaggtgtaaccagggcatgagataatataggaagtaatggtgggaaattatgctggaaatgtagactgaagtcaggttgcagagggctttgaatgtcaggtgcagaagtgggtgtatttggcctgatcatcccagacctgttacaaggggatggcatgattatatttgttgtattttagaaagaaaattctaatggctaaggtaggtcagattggaaccaaggagagtttagaaaccattataatagtttaaaagaaagaattggttgcagcccctaattctgtgttgagaagaagtttagaggtaacattggtaagacttaagtactgattggatgtggagacactccagttagattttaaatgcacacgctaattttctaacattggtgcacacacacatacttcttattttggcttcaccagactcagcctaattctccctgactatttaagtcagccactgatttatttttctatcttcagaaaaaaaaaaagaaaaaattataggtctgtgatcttatggattctttctgtatgatttgattttgatgatcccataggattcttcaggctaaggaatgctgactgtgcaaacaaatttttgaagacttggatgctctcattatatttatgtgctgcagatacctactatttggaatggttgttgctatttgcaaacccgcctactaagcactttggggaaattattagcagccattgacctctgatagggaaacattagcagttcaacctatcctctctccatttcaggtctcctgctgaatgctgaaggataattaggattttagaatttagtgagggaccatactttaatgtgtatgtcagtcccatacttttctagaatattctttccctctatagtattattctagtaagtaaggactattcctcttggccttaaaatgtaattcaaggctgggtgtggtggttcatgcctgtaatcctagcactttgggaggctgaggcaggcggattgcctgagctcaggagttcgagactagcctgggcaacacggtgaaaccctgtctctactacaatacagaaaattagccgggtgtggtggcatgcagctgtggtcccattgggtatggtggcatgcacctgtggtcccagttacttgggaggctgaggcaggagaattgcttaaacccgggaggcagaggttgcagtgagccgagatcgcaccactgcactccaggctggatggcagagcgagactctgtctccaaaaaacaacaacaacaacaaaaatggtaattatagggtcagagttgagaaacaaaaatcaacaaatacaaatcattttctctttaatttataagcattaggaattcattttttgttgcataaaagatttacatttaatctctgaggtaaaagaagtttcggcttcaacttggacttgtgtcattcccacctcatccaaattcatgtaacatggtgggaagggtcctctattgtctcatacatttagtctaaaagcattcttgggggaccccctcctatgttcaaatcagtgtctccatataaaaggaagctctgaggctgttccagttgttcctacattgtctttgccacttgggtgagcgttttcagcctccctgagccccaggtgccccagtgtacataatacttacactatgggtgctgcaaaggcctggaaagataggtggagccattggagtcaactctggcacatggtggggtttagttattttagacactggctttcagaagttagatggaagagacacagacttttccatatgcagattataacttagttttcaaaaccattaattggcagaaagttatttaaaagtcccaattctcatacctccattaaaatattctgatgtcaaaaatggaattatgtggccgcctaccctctcggtggtctggaaaatagtcatattttcactttttctccttaggctagttacagaacacagaacccacttcccatgaactgtgtctaccctggtgttgaaagactgagcttgaagaatacttgtcttttagcctttagaaagctctgtcaacaagcttctgtgaaacaaagttcctgaaaaagctatcttatttctttttaaataagtggcagatacaggtacataattcagtttatcttgtagtcaggaaaaaggcattaaatcgtgctgttgtagaattttagccacattcttttggccattcaaatggccatcgatccaacaaatactgattgagaacctattatatgttaagtactacaccagttcaacaccagtgaacaagacacaatcgctgatatcatcccaagtttaattgacttgtataaacaatctgtacattacaaaaattaatgttgttgctatctgaaatgggaggcattttctgtcatttttttagtagagaggaataaagagaccgaactttaaaaattaatggcgtttgagttaataactggaatacctatttttattgatcaattgtcatatagatgtgcagttacttaatccactagataatttgtatttctgcagtattttccatttcatgcatcattataatgctgtgtattcaaggtatgaacccgtttcatcaacagtattaatctcaattcatttaggagctttaaataatattcccttattaagtatattcttgatatgctgcccatgcttttacagtgtcagaagccgttaatgcagataaaaacaaacattcagttaaagaaccttctcatatattaattcgatttcagaaattatttgtgcatttatatttcctgaatggcttcggttatgacaaacatctaactaggctaattcagagctttgaggctaaagtccagcctcatggattggtttaatctgaagaacattaaaatagtagaacattttctgtcttggcaagaatcatagtgttgaaatttcaagaagaagatttaaatttgtccatgagactgtaaacttcttgaaggcaaggactcatctctgtagccctgatgcataattgatgttcttcaaatgtttgctgatttgagttgaactgaggagaataacaaaacagcatttgagaatcaaagtctcccaggttttccttatataatttacaaggacttccctggcaaactatcctttcttcttcgtttaaaaaatttcactttattatgttcatctttgatgtggaacattttttatggccttctgctgtgactcattttggtgctgagttatctgcttccttggagctcagcccttccttttaagctgtggtattcaggctccccaaagtcagcttgcctacgggtagagatcacagcaaaatgtgcaaatggtattccaacttctaggtaaaaacagacaactaaaattaaaaactctacatcatgtaagtcacctggaaaaaaaaaacagaaaacaaaacccgagggcatttgtatattcctgttaactcttgactgactaaagggagttatcttttctgcagtgataaaaaggtggcccaagacaatctccccatcttacaaaaagttctgaagttttactgtggagtccaattaaactggcatttaacttcagaaactacatccctatataatgtaatcatcacaaccaaatacaaattaattaatatatatggacaaagtttataagttcaatattagaataggggaaaagggaagtaggaaaagtttagagtcctccacgcatccttcatttatcaccaagagatttgctcctttgctccttctgttagtgtaagtcagaatttctcaattttcagtgtgtttatgaattgttattattgtttatcccaaacacatattttgtcttataggtgatttaagagctctaaaagggacatgttaactatcttcagaagctcacctctaacaatatttctatacctatattatacaagaaaactaatgaagattgacagtcaaattcctggagagacctttgacccttctctgtcttaaatttttcacttctgaaatagaaagccgggtcactggtcatcttatcctgcactttgggcataaagaagcttaggtccaaagcgccattactgtactcatgatgaccccttgaaggcacatcagtagggctgtctggactgtgacatgccatcagacatcatttaggggacttcaagtctggcttcttgcagagatgctgtgggatgcctcaaaaacttcctgcatggctagtgtaactatggggctttagatctttgttaaatacaagcaaacattaacagcagcagtggagaggataagttgccaatcctcccaaatttcttttccaggcagggggttgtcctgccgctctcagaactggctgtcatctgctgctctcttgtcacactgacacggccccctggctgggctgattggtcgctggcaataactgatatggaatactgatgttctctccggcagttccttccactctaaagagactccttttcatccctcttctcgcctttcctagcccagcctagtgcccaccctcccccgaccatgcctcccctgcacctggggagggggaggaccagtcctgggcgtgatgctctgagacggtggtgaaatccaccaggctgctttcactccggctcgctctccggagagtcctgttccagacttctcagggtttttacagcacaaacaactgcatacggcccgaggggaggctgaaaaggacttgtgtgtggtggttttattgcctgtcatcactttgctggcctcctcccgactggagcctggaggttcacagtggatttctttctgccgaagacaccaaggcactgaggaaggatcccttctccttctgttgactctttctatttttatggtaagtgcttacgttgaatgagctgctctgttgctgcagtgaactgaaccgttcgttccccctcttcccagctaagcttagtgaccttccttctgcatttcctctgttttcatggatcttgtctgggatgatccagcttcaaaaatgccaggggtcatttgcctggagtgtttgtctttttatcttttttccataaacgtgagctcttctgctgtgatacgaatataagtgctctgtctttgtccttgaagcagcagccggggaaatgtgttcacgatggtaaactgcagcagcgtgcagggaatctgtggaggatgactgacaaatttgggcaggatgaatcctcagtgtgccaggggcactcactcaggatcagaagggccgggggtgacctgcccacatagcaaactcttccatctttgtggataaagatgagcacacacgtgtgagttatgttgagtctgctgtgggcagctgtgttttctgcacctgcccgtgtgggtctgggatgaccctatatcttgtggggtttacaacttgggcaggaacattctcagcaggaggaatcctgagctggcagacggagtagactgcatgacctcattgcttctttcccttctgagtctcagggtacccagttctgcaaaccatattttacaggctcttcagagagtggtagggcagtgatgacaggaacatttttgagttgacaacatagttttgtcctcctgctaggagataaaatactttgaggttattagaatggttagacttttctaggagaacataagcaggtttctgacgaagactatggatgtggcagattgtttattccagggacattactcttacaatagtgctctaatttttcacctggtctcctgaggtttgctgcaaagagcatcacaacttcaagtctattactggcagcttcttgacgcccaaaggaaaccaagaacattttattagtttcactcctgtgcgttgcaggagtctctcttaacagggattttttttttttttttttggtagcaggtgtgtcgaactattttggtcaaagcatcattccaaagaatagcttcgcagttgtaattctatttagttattttcaagtcttggaccggaggtgggttatcttatttgtgtaggtttttccattctggtccatttcactctagagagggttcttgccaaatgtaattcagtctctgattcataaggtactgaactaatacaatgtgattttttgtgataagtgaggggagagaatgtggggtgaaatttccagtctctcctcctgctctttgggagtttggaatgtaaagttccctaactgcttgctcattttcactacttttatgtcccctgttcatgtggatttttcttgaaatagtggtgatgacatcagacatatgcctttaccttcttctctgggtccaaagtagatgcgtttgttgttgttctgtttttgtttgttttttatttcagtgaagggttccttgcatttgtaaaagcatacgtttaaataaaaaacaagaatttgtagatgtttacatgttagccctgttcaagagtaaaaccagcacagaggttaacagcaaaaaaaaaaaaaattcaaaacaatttttaaaatattatcagcattgcttggcttagctgttctaatatccactcttccctacactcgattgtggttcgcggcaatactgtattgtaatttgactgtcagactgctctgcttcctctttaattctttaatgtttagctgtttactttcatccttaatggtgtgttcttactttgcttaatctttttttctctttttctaattgaaaggatgttatatagtgcctggtaactcaactgaggatactcattaagatggaaagtgttagaatcagcttgggtgtcatggaaatagactcagtatttctcactgcaggcaatttcagaatcatttagaacatatttcattttaattagtagcaactttagccttgagaaaaaacattatttaggtttcctttattttgctaaacagattgtgtacctatgcaatcagaattgtatatatatgtgcaattgtttatatatatgtgtgtgtatatatatatatatacacacatatacaagcgtgtacacaaatgtactgttgtttgtactgtgtcaattgtatatacttaaaaaattgttgtagcatgcccatttggagaacagaaggaaaattcctcagatattgctttaactggcttttttttttttttggtaaggatttccccacttcctagaccccacttccagataatgcctttaagaatttctttgaattgggagagtgcatttttcagcatttccttgtctcacagcatggtgtcatgttaattcctttgcagggtctctgaaagcagcatagaaaactactgcaggaaaaattgataaaagctgtgctgagcggagcctgtagcctcttggtgtgatgaagtcactgcaacattttgtgtgtatttattttgctgctatgccttgcaactgattttgcttgcagacttagcaaattgaagttatttaaaatgggtctggaaacacctagattggtgtagatgcagttgatgcagttattctttttttttttacactctttaattacaactatcatcaaaactgtgctttcactgtttcttttggtggtggtttaatttgaaacttgcagcttaaattataaaccaagtctcccttttaaagtcctcttgccttctgctttctctcttcttcacttttgccattttatatatgtgaacatgcctacatgtacacagacaaactcagacagtgaaaaatgtacaacaattaatgaagagatgattacagcttttcttttagtaaccaaactccaaatgttgaaaccataatcatgtaactgagggaagaaattgtttctgttagtataaatataacctcatacttctgcaggcattcttatcattgaaactgttttccatagttgattaccaggaccagaaatagaattgattttgcattttaattaatgacattctggatctgtctaggttggactgccctcaaaccttgatatgtttactgtctaaaaggtctttgtgttaagagggggagtttatgggtgttataaagtaaaatcatttgattatgtgatacagcttttctttggtaactgaatgaaccatatcattagaatgttggctgaatttttatgttgcttttcccaatattatttagccaatataatcccttttaccatctctttgagccccttttacagagtacaaagagttatgtgcgactcccacatgaggcttcttagagggaagactgttcttcagcagagattcagaactacttctagcaccagctctggtaatctacttggaaaggaacttgcaattcaattggcaactcaggcagattgtataaaataggagaaatgcttcatgagctgtgttgaatactgtatttttgatctgtgcctccctactaaattcatttaggactgtctttactagatcagttttgcagggaaaaaaacatgtcctcagtagcataataatctatccagactgtcataaatgtttatattgcaagttatacttcttaggagttggagggagatggcagaattttggaggagaaccaaatcacagccccaaaataatgcaagacgaaaggggaacattcttcctatgtttagcatttaattctccagtcaggctgtttgctcttaagtctgaagagcgaagaaatgtaaaaacacataatgacaggttttgtgggctttttctctaatagaaatctttaacccttaattaggcatctgctgactgaccttttggtgtgtgtgagccagcagccattcttatagaaagcagacataatgtaatacagtaggaattcagttacttacatctttcctgttggtcccccacaggggacctcctctgagtgtcagagagggagtgagtgtctggagaccatcagagaccacagccagtcacagagagatatcttcaagccccttggattccagttcagcccccaccactaactggctgtgtgactcaaattctgtatctgctacatgaagcttggaccagataatcccagaggactgtaacccagccattaaaaattgtgaagtattaattcacttctatttgctactagatgaacgattatttctaagacaattgacccatattagacattcctggagggagtaggctgtaacttcctttgaccctgcaaagcccccagaactgtgacagtgacgtgagcatcagtgttactcagaaaagtgtgatcatggtacccttcatgaacagggcgaatatgtatatgatgactatctgcttatcctggcacattttggaaagtctcttgtgattatcaaaaaggaccttggccaggggcggtggcccatgcctgtaaatcccagcactttggtaggccgaggtgggcagatcatgaggtcaagagatcgagaccatcctggccaacatggtgaaactccatcttacgaaaaatacaaaaattagctgggcatggtggggcgcgcctgtaatcccagctactcaggaggctgaggtaagagaatcacttgaacccaggaggcggaggttgcagtgagccgagattgcgccattgcactccagcctggcaacagagcaagactccgtctcaaaaaaaaccaaaaggaaccttaaagagcaatttacctaatcctctcattccacagaagttaaggaagtgatatgacttccccaaggctggagactcacatagcacctgggccggatgactttagtgtaaggtgcattcatttactcagaaccctgctccattcccagtgtggggccccttccatgatacacagctgacactgtgccattcattgttcacaaatctgctttgtggcatctgtctcactggtgtccattatttctgggttcatttcatgcagattacgtggctgtaccagtcagagtgagtcatatcaagcaaatgtttatggtaatttgtttatgcttgtgtggaaatgcatttttatgttgaaattctgcttttcctataaacatttaaagaattttacaaaaactatgcatagtttttcccctttgcttaaactatttaaatgatcattgatttctatgtagagggggtgatgtttgtgaattaattccttcaccattcactcatttacctgttacttactgagcacctattgtgtccaccctactgccaagcagcagagatctagtggtgagacagccagacacatccactcctcttgaggagttcagagtctacttatacttcatggagttggttgtcttttcattgtcagccagtgttctatttactgattcacaatttctcaaagaatctggttgaaaaatagtttgcttgggcagatttttttccctgtggttattccattgagaaattcttttcgtagaagggcacctttgctgtcgtggtgacatatatcttccaattttcgaagatattatttttagcttctgattttgtgacctgactgaacagaagagacaaattagctaaacttatttgcactattgttgtgattcatgaaatgacaattcgtgtctttgataaaacttacctgtttcctagaatcttaaactgacagcctggatagcacagtgtccatggaacaaatcacagattaaataccacactcctttgccttgcatatcaggcccataacagtgtacagcccttgcttccttgttctatgtctggttccgaagttccatggaatgctctaggagtaccaaaaccatttgcaatactcagaaatttacagtgctctcacttgcctcagtgcctttgcacatgctatttcctcttctctcttcagactaaactttcaaagcaaatttgatgtcatctcccttggaagtgttttgacacttgccatccttattgacttcttttgcccagagctgagctaggtatactatctctgttgttctgtatccctcaggaccttacagactgtttgtctacttgtctctctctctctctctctctctctctctctcaaacagactttttgtttcttgagggcagggactatatgttctgtacctcaaatcttggtttagtgactgctgtagagcagataaccaataatccttgaacaaacagatgggaatcaccatctaaaacctatggtgctgtcattggcagcttctgctctatgtggagagtttaatttttcaaaccaatgtgactatgaattatactgagaaggataaagagattggcagacatcctgatgtagttcattagaaattctattcaaaaccccaggaaatgtttctgctttcaaatgagtttcagcaaagtaaacaatgaaaatttattaagtgccttctataagcaaagcattgcattaagtaccaaggaatgaaagatttttttttttttttaaaagcacaattcctatcctccagaaagccacaaactagtgagggtttgtcccatgtgtcaatgactggtaatgaggctgactgctataaacagagactgtagtcagctgtatacttgcagataaggcagggggtagaaagggcattctagacagaggggctggcttgagaaggaacttaaagttatgatggtcgtgccagcaatcaggtgactttgatggagcaggggctggggggtggggtggagggaaggtggaaaatgcaaggaaagatgaggaacgttgtgtggggagatgggaatggtatcaggaactctaaatgctgtttattatttttgaaagttggaggatagttaatagggtctggaaaatgccaaatagaaatttgtttggaatctcttctcaggtttaattaaatcaaaagtctgtattctgcagggaaggagagcagttgcgcagtacataactgcataacacgtttttttctcacccatcccttttgcccttgagggtacactttgccattcaaagtcatcacaaggaagtgaagccgggaagtctaacttaaatcaatcagtttagacctgaagggagtttagcattgagatcactgaggtgcctgttaacaaactgtccagggtgtggaaaaccccctgggtctttggtgctgtatttctactgtaaaaatttagttatttttttatttgacaattaactttgtgctatttacaaggaatacagttgttttatgaaccagtgagatatgcatgtgtaagtttgtttcatgtaggtgaaaaagtggcttggaaaattctgtctgtgatagattcaattcatcatcaaaatatgatttctgcttgccttgtccctcctttctttttcctaaaagaatgagtgaacatattcttagggaatggtaagttggtaggttttctgcatctcataattagatctgaccagatgactctccaccttgaaattagtctaaaaagattgaagaatttggaggaagatctctagatatcttgaccagagcatgaaagcaaataaatattgcttgtggagtgagagatgatgtggtagaaaagaagctgcattcattcattcatttattcattcatttgctcactccacaagtacttaatcgagcacgtactatgtttcagcttcctgccttcatggagctaacattctggtcagagtgggagggggagacagaaaaacacattagcaaatacgaagcaagtcagatggtgatcagtgctatggagggaaaaaaaatgaagaatgctttggctgctattatcttcacatttggttctctttaaagttatttaacttatgcattatggttaggttattttcttctctccactcattgtttttagctgcctatttttatattcactttctgacaattctatgataaaccaccatcttgagggtttttttcctcctagataaaagcagcttttgaaataattggagtactgtgaacaaaagttataatgaagcatttacttctggaattgatttaaagaaaagtactacggacatcaaagcccattagtatttttctcaagactaaagttgtcagaatttagaggaacatgggatggaaatggatctgtccctcacttaactctgagaggagcagtttggggtgttctgagaggatgggagcttggagtatagggaactccaaccccgggagcagagaaatggtgggatcacccatgagcagagctcattcagagaagagacgggagtgaattagaaagtgaacatgcaaaaattgagcaaggaatttctctttgggaggaagggaggtagggaggataaaaccagtgagataaatgtcagtgaataaacaacatttacaagaacaaattctgcccaatatagaacatctgagtgagctggttagtggaaatggtgcctcgagataaaaaacaatatttagggatttcccaatattcccatcctatattttgtgggatctttaattcagcatcaatgttccattttactgcaagcaagcctttagtcaatactttctaccttgcttctaaaataattaggatttaaaggaaaatgtctcctagcggtggagtgcctgggctctggggcagacattgtacccatccttactctgccacttactcacctttggaccttgggcaagtgagctggtctccttgtgcatcattgtcctcaattataaaaatgagattaactaattacccctacctcagagttgttatgagtgataaatgaaatagtccatggagagcccttagcacagtgcctgcaagatgattgcattatctaacaattgttaacctgttattaccatgacttgtctctctggtgttagtggtttagagaagttctcacatgtatatatgtattttcccccttagcagagctttttttttttcttcttcaacttttaagttctgcggtaatgtgcaggatgtgcaggtttgttacataggtaaacgtgtgccagggtggtttgctgcccagatcaacccaccacctgggtattaagcccagcatccattagctattcttcctgatactttccctgcccacactgacaggccccagtgtgtgttgttccccacagtgtgtccatgttttctcatcattgagctcccacttataagtgagaacacatggtgtttggttttctgttcctgtgttagtttgctgaggataatggcttccagctccattcatgtccttgagaaggacatgatcttgttcctttttatggctgcatagcattccatggtatatatatacgacatttcctttagccagtctatctttgatgggcatttaggttggttccatgtctttgctattgtgaacagtgctgcagtgaacaaatgcatgcatgtatctttataataaaatgatttatatttctttgggtatatacccggtaatgggattggtgggtcaaatggtatttctggttctaggtctctgaggaattgctacagtgtcttctgcaatggctgaagtaatttacactcccaccaacaatgtaaaagcagtccattttctccacaactttgacagcatctgtcgtttcttgactttttagtaatcacccttctgactggcgtgagatggtatttcattgtggttttgatttgcatttatctaatgatcagcgatgctgagtttttttcatgtttattggccgcatgtatgtcttcttttgagaagtatctgttcatgtcctttgcccactttttaatggagtggtttgtttctttttcttgtaaatttgtttaagttccttgtagactctggagatcagacctttgtcagatggatagattgaaaaaattttctcccattctgtaggttgtctgtttgctctgatgatagtttattttgctcctcagaagttatttagtttaattagatcccatttgtccgtttttgctttcattacaattgctgttggcattttcatgtgaagtctttgcccatgcctgtgtcctgaatggtattgcctaggttttcttctagggtttttatagttgggttttgcatttaagtctttaacctatcttgagttaatttttgtataagatgtaaagaaggagtccattttctattttatgcatatggctagccagttctcccagcaccatttattaaataggacattctttccccattgctagtgtttgtcaggttttttcaaagatcaggtggttgtaggggtgtggtcttatttctgagttctctattctgttccattggtctgtgtgtctgtttttgtaccagtaccatgctgttttggttactgtagccttgtagtatagtttgaagtccggtagtgtgatgtctccagctttattctttttgcttaggattgtcttggctatttgggttcttttttggttccatatgaatttaaaaaatagttttttctaattttgtgaagaatgtcaatggtagtttaatggtaatagtattgaatccgtaaattactttgggcagtattgccattttcatgatactggttcttcctatccatgagcatgagcattgattatacctatccatttgtttgtgtcctctcttatttccttgagcagtggcttgtagttctccttgaagtggtccttcacttcccttgctagctctattcctaggtattttattctctttgtagcaatcactttcttcttcctgtttgtgattaatgattttagggtaaatctttttggagggatctcactttttttttattcagtctcttagatagttattataatttggaatttacttagattttaagtctgtatcatagaacctaaacagtggaattggaggaccatgtggccacaaggtccctgggaggaggacccactagtcacagtaagtgatgttgtggcaggaaaagagaagagtagagtggatgagaaaaggagcaacctaacagcaaatatgatcaatgttctttttctctgttgccattcgggaggatttagggatgaaggctccttaggtggtgtgtagtgtagacaggctacagcttgcagtttcctggagggaatagccaggagagtgtgatttgtataaacaggggcaggtggctaaggaagtatagttaggtgccagtaagtttgtaggaaagaattctaaaagtggaatgcctggttcacagggtatgtgagtttaaaaattctgatggctcttactgaatcaccattaacagaagtgcgccagtttatactcccatcagcaatgaatgagaatgcctgtttcctcacacctatgcccactagcaagcattttgatctttgctaatctgctgggtgaaaagtagcatcttatagtttaatttgagcatcttttcatgtgtttactttgtattttcttcttctatgagctaactctttgttcatgccctttgcaggcccactttcaactattgagttttgattttgatttttaggaggttttttttttgtttcgttttttttttttttttttttttttttttttttttttgtgagacagagtctcgctctgtcacccaggctggagtgccgtggcgtgatctcggctcactgcaacctccgcctcctgggttcaagcaattctcctgcctcagcctcctgagtagctgagattacaggtgcccaccaccatgcccagctaatttttgtatttttagtagagacggggtttcaccatgttggtcaggctggtctcgaactgctgacctcttatctgcctgccttggcctcccaaagtgctgggattacaggtgtaagccactgcgctgtccaggagctctttatatactagaaaaattcacatttccttatgattttttttaccaagtgtttctgcttattttgttatttgtctttgatattgtttatggtatttgaggcataataaatttttatataaagttgtcacatgtttcttttgtactttctgggttttgtgtaataatcagaaaagcctaacccactctgaaaagtcatgcttctacaatttccttttgtatttttatgtaaataaaatcatacttatttgattcataattattttggattagtaatgaaatagaaattccattttattttcccccaacaactacctagttctctccaaacatttcaggcacgatgtgtcttttccttgctggctaggtggtgattcttgagaaagatgatttttacttgggccaaggcaggggtgacatggaagggtatcatcatctatgaaatccccttatgtagttagaactatttttggagagtctgctccattttcttgacttccagtttgttgcagttccacactgtgttaatcactctagttttatgaattttaatatatgatatggctagcctcacccctattacccttttgttccaggattttttttgatcttcctacatgtttatttttctgaataaactttagaaattgtctcattctaaaaaacaatcatgttttggagaaagggttaaattaaatttatagcttaatctagggagagtgttttttaacttttaagctcaggggtacaagtgtgggtttgttgcataggtaaacgtgtgccagggtggtttgtgacacagatcaacctatcacctgggtattaagcccagcatttattagctattcttcctgatgctttccctccgcccctgacaggccccagtgtgtgttgttcctcatagtgtgtccatgagttctcatcattcagctcccacttataagtgagaacacatgatgtttggttttctgttcctgcattagtttgctgaggataatggcttccagctccatccatgtccatccatgtccctgcaaaggacatgatcttgttcctttttatggctgcataatattccacggtatatatgtaccacatcttctttagccagtctgtcattgataagcatttaggttgatttcatatctttactattgtgaatagtgatgcagtgaacattcacatgcatgtatctttatggtagaatgatttatattcctctgggtatatacccagtaataggattgctgggttgaatggtatttctgtctttaggtctttgaggaatcgccacactgacttccataatgtctgaactaattgacactcccatcaacagtgtataagcgttcctttttctccacaacctcaccagtatcctttattttttgacttcttaataatagccattctgactggtgtgagatggtgtctcatttgatttgcatttatctaatgatcaatgatgtcaagctttttttcatattatcgttgccacatgtatatcttttgaaaagtgtctgttcatgccctttgcccactttttaatgggggtgttttacttgtaatttgtttaagtttcttacagaagctagatatagacccttgccagatgtatagtttgcaaaaatttgggagaattttttatgatactgacccaacctgtcgtcacacagggtatatgttcccatttattcagatcttcttttatgaatctccttagttaatgttttaagatattcttcctatatattttggcacgtattttttaaaacattatttgacatggtttataagtatttgtttagtcttcacatatttgcagaggtattgaggagtgaaaaaggaatggaagtgtttctttgacaccgtaaaatagattacctggggaaaaatattgaaactttgcataagtaaatgtaattgattcattttttcttttatctcttctgaccctatatttcgaattgttgatctaactataaaaacgtatttgttttaaatttgcaattgaatttagtaagtgtttttcacacccacaaattcaaagcaccaattgctgagattcttttgcaaagtgttccatatcattgtcttatattaattcattgactattaattaattagcttagtaagcacttaatgaacacttactatagaccaaatgttagaaatatgaagactaataagacatgatccctttcattgaaagatttgctgtttactcagagatggaatgaaatgatgaaaacaaagaattataataatataaggtaatgtgctttacactctgggaggccaaggtgggtggatctggatcacttgagaccaggagttccagacccacctggccaacatggcaaaaccccatctctactaaagatacaagaattagccagatgtggtggcatgcacctgtaatcccagctgctctggaggctgagggaggagaattgcttgaacccaggaggctgagattgcagtcagcagagatcgccccactgcactccaacctgggcgacagagcaagattctgtctcaaaaaaaaaaaaaagggtaatgtgctttcatgaaaatatgtgcaaggcagagttggaacatggagtgggagagcctcaagctgtcctggggcaatcaaagaaggctttactgagcaaccagcatctgaactgagaccattcggatgagttgctgccaggtgggcagatcaggggaggcttctccagacagagaaactagcaagtgcaaaggcactggggcatgaatcagttacaagttattcagtctatggggcttaggagattaggcttagccagtaggcagctgccagatctcaaaggctttatatgacatgcgcaagaggttgtgctatattctgtaggcactggagcaaattgtgagcaagaaaaggtcagattgtagactacataactctggtagccatatggagagcaaagtagaagggtatgggtataaaatcaggaatacaagtatggagattataacagtgggcccagttagagactgttttctcttaaactaggacagtgacattaggaatgacagagagcccctatggaagatttattcattcaacaatcatttattagaatcacctgtatgctaggctctgtgctggatgctaggcatgcagcagtgtgccagacagatatgctccccactcccaaagccatcccattcaaatgggaagagcctgataaggtgatatgtaagttgatatgttaagcagtggtatatgatgaagcagaatgcagcaggatgaaagggaaagggaacatggttaggagtatgctgatcaggatagtcctctgggcaaggtgatgtttgatcaggacatgagctggggagggagggagggtatgagccagggaaatggtgtccaagcacagggaaatggtatccaaaagagaaatggtgtccaagcagagggaacagccagtgcagaggccctgagaaggaactgtgcttggcatggttaaggaataatgaggaggccaaaagggctagagcagagtggtggaggaggtggcttaagtatttagattttatccagaatgagatggggagccagggcattatttttcatacggcagtagcatgatttgactggcagcctttaagaggatctcacctgctgctgtgtggagaatagagggagtcagggtgtaagtaggtcagttacaaggctggtgcagaggtccagaaagggaggtgatgatggaccaggatagtgattctggaggtggtgagaggtggtagaactatggatctgtcttgaacttggtactagaaggatacaggaaagtgtgcataggaagtaaaatgggcaagtgtagattagataactgctaagtgtagattagataactgctaagtgtagacatacaatattttaaagggagatgagggaagtatagccagggagggtcactttagcaagagcagtccatatggtcaataggtcaatatgatgagtacactatcatgaactcttgcaggctaaacttttattatttgtatacttatgagccacactggattgtgtgacatgactaaatagagaattcctgaaattgcctctgggaggatgtattaaatagggtcaatcagaagtacgtaaatggtgtctactcttgagcaataaaatttatagaagccacatctaaatttagctttaagcaatttcggagcctgagaattttcaggaaatagtaatcaaagccctgataatacaagaaattgacatcctttttggactgacatgggagaggaataatttgggcggtcacagaaacggactcatagatcatagatcttgggaatgtggggtcaatgaattaaatatggctgaaaattataaattacctcacatatccaattgcttttagctaaaatcaagagaaagggctttctaaagccgagatactttttttccattagcaaagggttataagatgttctggagacttgagtcaggctagttcccttatctttggaagatattcttgagtgatgcagtgctatcagtttcaaataagtatatttttgtaaatcaggtgatgttatataatgaaactgacatttgtaaaagttttttatggctcccagccaggtgccccttttgtcagaccctgacttttgaaggattttgggctgcttataaggattcagagttcccctgcaaaattgatgttggaaaccatacccacagtctgcgccagtcactgtggactggatacatttccacagtgtgagatgaaatcagaactgaatgagagtggccactgttctcttggccatacctgaccaaaggttctagtttgatgcagattattattctttagttaactgtacagtaaaccatgcacagtcctcattgtaattaggtgggttcattctttcttaattttacctgctgttgtcgtcatgagtcacaaagttgaataactcttcagttattattgtagccagagtgatggataagatagactcccctaaaccatggtagtcgatataaagcttttcttctcttgcccccatagttagcactaactggcccctgttttgtataaccttatacagacttatgtcatagtgctaatgatataccacatgtgtgtacacatatgcacatacctactcacatatacacatgcacacacatatatgtgtacacacacacacacgcgtaattcctcttctctccccccacagactgtagtaggcactttgaatcatgaatcgttcttattttccttttaactattaacacttagctcagcatctggcataaagtaggagctcaaaacatggttgtcgattgaaatctagaactgggttttgcattttcttgttattgctttgttgttgttctgttgattaagtaattctatacctagtttaggtttgaattgctttagagaccctgatgatggtgccttgtgttcttggccacttgattttatgtgacagtcttcagcatattcataactccaagctttacaaaacaggcaatattttatagggaagtagctctgttgcctttctggatgtagaggcagcatgagattataggataaaactccaatatgtttgtatttatgtatatatatattaccttattcatacataataatgtgtatacatacataataatatgaagtaaaagtaggtcagaagtaaagaagaggtgggaacaaaatgaaagcaggaatacaattaaattgcatgtcagaatgacttacatgtaagatacagaggccacctttaaaggctttaagctttcaatcagccagagggaaaagaacaggcttatgggggtaaagataaaccatttgctcaggttgattttaaccatactcttagcaccaacatcagataagaatttctcccaggagtccctatgaagagtacattgtgtttcgttatgaaaatcatcaagctttgcaaggctgattctcataagacaattttgtgttaatagcattgcctcaaggcaaaattttgtaaaagcagtcggcaaggttctgtttaggaatcagttctctgctggtcagtttgactcagggatatgaaaagtgggtggactacttgtctttaagcaatctttcctgtgtattgtttatctcaaataaagctttgaaaattgttttttaacattgaacttgaagtggcactattctccagcaagtaagggcctacagtgtagctactattctgtgtagctagttaaggagagacctggcgtcctagcagtgtcaaatgaaagctggtattagcatccatatgaggaagctgacttgcctagcaaagacatttacctgaatagcaggttgccctccttatttccaggggaagcatgggagaaccaagcagctcagccaggattatgcatagaaaattgtttggacccacgttattgctcagacaaatgggtgatcctctccaagggctttaaataggtccttttggggcagggaacccaaacacttagcaaagtacagaaggtttgaagggaatgaattcccagagtctggattggatgctcagtctcatttctcaccttcccgtttacaatccctctttttccattttagcaaagcaaggcatccttcttatccatctcagatcttactatagtgcattgtgcaggggtgtaaaaacagcctgggcaccaaacagagcagcaattggaaatatttctttgcagagaagtatggtagtgtgaacaataaaagactttccaatataaacatatgctacattgggataaaactctgtggggaagtgggctggatatgagttaaaggagaaaaactagcgatgtaaattttccaactgataaaaaggagcttgagcttggtcagatatcttaaaaatggttgaatgtgggatatgacagttgtgttttaaaacctcaatgtttatgtatgccataaattatattctttgtaatcctataagcttatgatgaagtcaacttaaaacttcactgagttggggcagatcttcagaaggggatacatagctttttgttttgttttgttttgaatctttgggccatgcgtgagcaaacatgtttgaagaccactcatctactgcatgtaatatggctctcaatcagtcctctagctcttgcatcgacctcaagtgttaggtcagcctctagctgtaactcccctccctgttcttaccactactttatatttactttaatataagtctaacagattgcatccatgattcctctaccaaataggaagatctttaattctcgaaaacggtatactatatactctgtagtttccaggaatttttttgtggtgccttatgtaaaggcaaactttaaaaaaattattgagatataatttacatatcatataattcacccatttcaagtatagaattcaataagttatagtaagtttaccaagttgtgaagtcatcatcataaatcagttttagaacatttttgtcaccccaatacgatttatcatgcccatttacgtgaatgttcctatgtttttctaatatttaaggggctacaagttcatatgacaacatgcgtagagagcagtaaggatggaggaaaacaagaggggcagggccagaattttatcatttatggaagcatgagtgctagcatcttctatttttatttttaaaaaaccactctgatgttcttctagtccttatatgtttttattgatacaaatataaccacatgttaaggcaggactctgtctatctcagttttggctaagatcccaatggccaagaatactagattaggttcccccatatcagttacctatttagaacatacaaaacattgtatgggagttagttattgtctgctccataatatgtatgaggttgatgttggggccctggtgaatgtgagggtgggagaagggtactccatcttcacttcaaaccaagtgagaggaatccttattgaacttgacattatctcctgatgggagtttggggacatgaggttcacctgaacctgtggaaggctgtgatgagagctgccgctaagaacaaagtgggagagggggctgcagggagatggccgcaagttggtgggacgaagatgtgtgagattttatcatggatcaggtggatgctctgggatcattttaactttggaatgcactcaagagggatgcctggagggaatgggggagaaacagagagagagagagggcatgagcaagtgcataagtgatggtggggggaatggttatcagttacctaactattctggatacgtaagaatgtagtgcttagagattagacagaaaaatgaaccatttgccatttgaccatctgggagacattattgtatggtctttaaatctgataaacctgaatttaaatctctccctgaccctcagcaagttactgtatttttctgagctttcagagttgtcatggccagtatttgtcgtaatgatataatcattgactttgacaagtcctggaacttgcctttcaaagtatttttgatatttgacactgattgatgagtagataaatatgaatattctgtatagacaacatctatgatctagctagagatctaaaagtcattgttaggtaccataagcgtgtaacatataacattcaatattttgcaaaatccatggtatttcatttactatactgccatttactttcttatttggattacgtaggtgataaatttgtacaagcctgttttcatatactttgaaagtgtgtgaaaataattgtatataaatggtaattctgattttctctagaatacaattcagatttaccagccttcaaataatattattttagatactattgttaataaataatattttttatttagcaaataactttacatatatatgtgtgtgtgtgtgtgtttgtgtgtgtgaatttatgcatatgtatttttccagccaacatgaaagtcttttgaggacaaaattgagtatttgccatcacaaaactataaataacttaaaaatttggcatatttaaatattgcagtaagcaataatacttttatccatttatgcaacttttgtacagaaacagatcttgtagattatcaggtaggatctatggagtgaagtttgataaacttttaaagacaatgaagttaatttttaaaacctcttaaactcaactcttaattattcttaattgtgttctttaatttcttaaattgtgttcccaaagcatttaaaatatataactatcgtagtactgaatgcatggcatagtattatttcattaattcattaatttatttaaaatgactgtagtgaactcgtatggtacaatctctgtccttatggagtctagagttcagtgggatagacgcatgaaacagacacatgagtaatatataattacaaattatgatcactgttatgagttacaggcaaatggcatgagagaataactgtggaagcataatttaattggagggaatgattctctgatgaaagatctgaaagatgagtggtccattatcagttgagaatgggtcaaagaatatttcagatagtgggaacagcatattacaaaggccctgtggtaggaaggagtatgaaatatttaaggaagaggcaaggagtggatatagatgcctcatttaggaggcaatgggaataattcattctggaaatgaggtaaactagacactagattagactagaataagttagtggcagtacagttagaagtgaatggattttaagaaatagtagaaattagagtcaataggacttcaactgtttataaaggagaaaggagaaggtgttgataaataaggctatttgtaaaggtggatggtttggattctagcacattgtactgtgattgttataccataatttatcttctgtgaacattgcaaggaagtttctgcacttattttcaagttttgatgtgtatatttttacaatactgttcacttttctaaacttttcaattgtaagtttcttataattgagaattgttttctctttctttggtatatgtccagagttcttagccctctaaattcagttgttgttgagtaaattttatttttttaaaaaatagagattagaacatctgatttcagatatttaaaaaaacttagatatttatcttgtggggaatgacttaggaacagttttcttgaatgtagagatttgaaataccaatttgcctttgggtcattattttgtaggaatgtgggaagatataaaattcaatgagcaatatgattaggcatttatataattccttaagtatatgctatgtagatctttcaacatatatattaaaagattaaaaaatgcttgattatctggctctggggtatacttgtaaaacttgcctatttgctaaggtcaaaacaggcatgcatgtattttatattctagctttatctatggtatattaataatataactggtttccagcagacacaacctagagtaatccctgcctaggcttagcctagttagagcctagttaggtcttcttgggtttggacatgatttgagatattgaaaagaaaataattgaggagattcaaagcagtattctaatgaagctatatgcaggtttactaaacagccaacttagccatttatctaaaaaaataatatatgtaaaatgtgggttttactgtaatataattaccgagtctccttaccaaaggatgggaaaactttatagccacgagtgacagaaagaaactattgttcagttgttggattccatgtttatgtctgctaaactggtcattgattttcatactgtgaactttcttaacattgccaggtatacagttagaagacctcttatcctaaatgcttaggactaatttcgttggtcagtggaaaaagatggttaaatgagggaatagttaaaacaatatgatacatgcatttcttgaacaatttattttaacctaaaacaaaaattaatttgctaatattttggtgggggctaagggttttacttcaagtaataattcattaatttttttgttttacagtttcttttttgcataatcatgcctggaattcattacctataaggacatagacacttgtgaagacaatcctagtgcagaattcatctaactttaatgaatcatttcattaaagatttcatgatttcccttattattattattacttattattgaatgtatgactcagccttataaagtgtttcctaaacttttagcttattttaaaaatagaaacaccaactttctttttacatttacatttcatttgtttacatggtacttaattaaaattatatagttataataataagtatgaatgacataaaaagttttggaaatgagcacaagtaattcttgttaaacactatagttttaaaaaagtgaagggaaatggaccattgttctaaagattagacaacttaagctatgaggcttggtgagctgtgggtatcagtctttatgtttaataaagggaatggagattgttggctaagttgaggtcaagtaacagagccccctttttgtgctggtttcagcccattacccttcaactttattcactaaatcagatagttacagtgctgcttagaatagctcctgatattaaatagtgtcaataataatactttagcagtcatctctgagcttcatcattataaactagataaataattaaaacaaataataatagaatgtttaatgggagaaataggcactgttgagagaacagtctaagattcagatcatttagctctatgcccagggatgccttactctaggtttgtgacattgaataaattgctaaacctttctggattcagcttccaaatctacaggctggtagttctcaacaaatcgtgattttgcctcccagagaacatttgacaatatctggagatatttttgattgtcataatctggggaatgttcctgatatttagtggctagaggccagcactactgctaagatcctgcaatacacaggacaggtcctaacaagaaagaattatcagttcaaaatttttgtagtgctaaaactgaggatccttgggctagctaatttatgatggtttcttcctcttccctatgtatctatcattctcaaacttaggctgatcatatatatatgtgtatatatatatgtatgtgtgtatatatatatgtgtatatatatatgtatgtgtgtatatatatatttctattttaaataacctgagtaatgacattagatgaattttttttgtctagtaggtgtttaaatgatgcaatagtaattttcaatgtcttatataacataaacagagaagaataaatatagccaaaatttactactctgtactttttctaattcagcattcccaaatgtaagttaaatataactgtagaaaacccacagtagattaaaatatttattctttcagtaaagggacagtttaccaatgctgtcaggtagataggtaccagcaatatagataggaaaggggaaaagctatgtaatgttggagagtttaaatactgtaattcagttgaaaactatatttcagctaatagcaactttgggatttatatatgtatatccctatgatttaaagtaagattcatcagtggtataaaaatgatattttagtgtgctcaattttatgacttgagaccagttcaaaacaagcatcactgctagtataattctaaattattttggaggaaatgtatattttaaaattcttggtggtaattagtgatgataggttcgctgctctatacttttttatgaaataaagtttgacttaaagaacctgagaacaggtttcaaaagtaacagcatagataccaatcacattttttctgagtttttaatttgttgacaaaattttttttaaaaaactgtgatgaaagcatgcgagacttgagatggctgtagaaggagaaactgagtaagttcctcttcttgtcttgtttcctctccctatttctccttctctgttttgcttactccaactccatgcacacttgaatcaccatgaatggtgcccaagttgaagcccaaatcaagttccttagttgttggggccgtgtcttatttgtcttttgatccctggtatctggcatgtagagtctctaagtaaactctctgcccttgacctttctgcatattataggctctgtctttgggttcctccctccctctatttcccttttttctgcttctctctcccttccttccagtttagtttggcatttatagttttcgtggttgtgtggctcttttcatctaacatttctagatgtttagagcagaagggggggccctcccacctgacctcagcctaccacattgttggaatccattcattcttcaacctattaaaatcttactccattttattaccaagtaaactctttcaaacagttaatttatgattctcctggttttattcttaccccattcaccccagcaagaaagtcggtttctcaaaaaaaaaaaaaaaatgcccttctttccctacctgattattatgtagcatgagaattgacagagcacaagcagggaatgattacacaacatttttaaaaactctgtgttgaaatgtatttgtggcattactgtctcaaggaaagccaaatgcatgcctcagaattgagaaaaatgtaagtcggcaagcttatctctaactccccatgataaaataaattgagtgttttagagctgtcagtagtacttgcgcagttctatctctactgctatgtcagttaatatttcctccctcaaaacaaaacgagtgcataggcaaaatgtaagccagcagttgagattctgaactacctccaccagtgggtttcaccccaaagtgtctcctgaaggcctattcatcctgggtttgcaatgctgggttgcaatgttaatcattttttcatgtgctgatgaggaaaatgataaagtgatggatgctgctcttccttctgctttgtcatcctgaccctgattgtgctgggtggactttctcattaacgatgcaaagtccggtgatttgcactgtgctcagctgggcatcatttcttgtatcttatttttgttggtcagcattatagctagttgttggaactgatttcccttgcactctctgtttgactatgccatggccagcacacttttgaatgaaaccgctgatggttgtcgaaactaaagggacattcctatattttggattggctcacgaattcacctgttgatgccctggaggtaattttcactggctttatttatagaaatggcttacacagtgtagttgtgtctagtcagttgccatatggtaccctaatatgccaccaaatggtaatcaaaacttagtagtaaattttcaggaactaataaaacaactgtgatggaggagcttcatttgggatggtagatatcagtggctggagcaatgaggaaggccttgcctttctcttagtgctatttgttagacagaagtttttaaacaggtatgtccagaatagtacttaatttcttaaactataaaagcaatatatggttattattaaaaatcgatttggaatggaagaataaaaataaaatgactcagttcatttttctgctatcccaataccagccttggagaatatgctttcaggtaatcatagagtcagagaaagaatagagatgaagacagagtcacatatgtgaagttaaaaaaatgtaaatttatcacaatatatatgattttccaacttactgttctcaatgagtttgtcttgaagagtgttacgtgtcaggatatataggtccacctcattcttcatagcagcagtgtggtactccagaccacagatgcaaaacgccataatttaggtaagccttccattatcgataaacataaggttattgccaatgttttacagttataaacagcaagttaatgaacatttttgtacatatatcttacagtatgtaggctgacattgccgtagtattaacacttagaaatggaactgatcattccatagttaggcatattttaaattttgatggatattctcaaattgcccctccccaaagacactatatgaaagtgctcatttcctccacatccccatcaatgcccagtcctttgcttgatggaaaaacagttttgggcatctttagtgttctggtccacagctcccatcctgaccacactcaccaaatagaatcttactttactcttggacagaacagaacaaattaaaacaaaataaaaataacaagaaacagctcaagagatgtggatcttttgagcagcttaaccaaaacctaaacaaggcaaataaagtgaccctttgttatcagcaaaggcctgtgcttcctctgtgctgctgagccacagtcagctaggctggatcatgtggagaactactcaacaaagctggatttccttgaccagtcagcaggtagaaggtttttcttcacttctttccccaaagtcccaactcgagtctaactacgattcgaagaaaatcaagagctccagtgtacaagtgacagagaccatttgttttaagacttagcagtcaccctgttcaggtcttcttaagggagacggcagctcctggacctggccacagagtgtgagaaagatggtggaagagagaaagctgtacatacacacgcacatacacacacgcacagggcgagacagaaaggcaggaggcaaattttttccaaagaaatccaaaacaataggtaaagaggatggaaaaaagagaatggtaactgggcattaccttaaccactgggaggagaacaaaagtaagtcttaaatctgatcagccatggcttattacttgataaggtgaggtgaggaggggaagatggtagaagaaacttgatcttccagtaggaatcaataaaaattgtattagatgttccccttatctttggggctcttgtcttactcgtacttcctttgtggtaactttaggattctcatgtttctcttccttgacgttgcaaaatttgatatatttccatttgttttgttatttcttttcagatctcaccgtttgctgtattttgctttgcgtaatattttcttttccttctctttctgcattatttgctttaaaacaacatatacactaaagaaatgtaacctcaaccttttcattcaagtgtgtatttctgaaaaaaaatcagatatttacagataatgaataacaccacaaaagttgttttatgctgcaactgtacttaggttcaatgtcatctttgccaccttctccctgtgttatgtaaatattccatttattgcaggcataaaaataccacctttcactgtactttatgaggaaatggaagccaaatgactttttttttatagtttaaaattcatttacttatatatgtggcaaattctaaggcaagccagctcaaatctgtgccaaattcaggaagaaaaggattatcacaagaaataataagtggattatcacaagaaagaaaaggattggtaaaatatctgttatttcacttacaggtggaaggccacccctttttgtcatttaaatgctaaattttcttctcctttttcatacctttcattttccctcttgctttgtttttgcatacaagcgagttgggacatatattgcttctatctatcacttttacataaaagatagaaatccgggaaattgcaaaaggtttacagtctttccatagactaaaatcacgagccagatgttttaaaacaattttatattaaacaattttaaaactagtatttgtataagccagtaaatctatttttttcataaatgtcctatcatgtttttccccccattgggcacttggattggaactacaaaccacaatcttcaaataattattaaatctgaaaaacctatgtcttgtagtttgtggtgactctgtaggtagccactgcaataaaatctatttggagaaggagctattatctatgcacaatgtgtatttgatgaaatgggtaggcaattacagttcacaaaaacacatactgtattagaatagttcacatatagcaaagataattagatttttcatacagtaaccagtcagccaataggagtaaaaatgctacaaatcttatttataaaaagtgccattaaaagataatcccttctaatgttgcttgagcatttttctggatatgagtgggcagatgagtaatagaaaaataacactgacataaaaattaagcctgggagattcctgagtttgttttgtgcaacttggagttttgaggctctgtcaggagaccgctggagacaagagtactggattagaagcaggaagatctggtgcttgacctgactgtactgtcagtcagtcatgtgactcatcccccaagtctcacacttctcattttcaaagagaagaaccctgtactgcagagtaagagatcaataaatgtttgttgaatgagtaaaagaatgaacaaagattttaaagattcctttccaagattctgaaattccactaggaacttgaacaagcaataaaaagacagcattgcaaattaagaacaaacaaacaaacaaaaaaaaactttagccaaacattctatttagtttaaatttgtagatatacagattttctaaatatcagttttcctcaaatggacttaagatgacttccagactcagggtacagtgtcacattagctggtttagcgagagtgttgtattctacagaaatgtgactctgaataatgccagtttgtcacagatggggatgaaatcagattttctccaaaacacccaaatgtgtgatgcataaagcaacattggcagccagtggggaagatcttatcaatgaagtacacaaagctctgaatgtttacttcgcagaggaaatggcttcacagaccggaaaatttaagttgtcatagaaacccccatgccatatattttgttttaatttgagtattggcagattaagaggactcagtgacaaaggagctatattaaaaatgttgaaattgagtgtgctggttttattttttaacttaattgatatctgttttcaaaaggacttttaatatctagaagggcaaaagtatttcatgcaaattgtgcatagatttctgttgaaaaacaatatggcattggaactttttgttataaaatggtgtgttttctcctgtttatttcttatcataaattatctttttaccgtggtatcatcaaaataacttcactggtatcaattagtaacataggaagctatatatcccaactgtctacatttttattccaactcttttacttaaggaatctgatagtagctgctattggtttaggaaggaaaattaataattagtttgacaatctacttgaagtcaaacatttaggaaaacaaacaaatactgaatcccttaactatctggagagctaatatttattgagggactgctctgggcctcgctgtgctagattctctatgtacatgatttcatttggtccttcaactactctgaaatataaattatttcatttcttgatatgtaaggtgagactaagaaacattacgtgatgctcagtaaaaaggaaaatctggaatttaaactttttcaacatccaaaatggcaccacactgcctcatgtcatataattaactagacacaaatgtctaaggagcagaacagacattttgtgatagataagacataactgattctgtagtaagaagaactaggaagatgtccaggcctcacatatgacggccccttctggaccaagttagaccttgagttagtcttcagtaactagcatcccagcttggtgtgaaaatttggaacacttaattatggacattaacatatttacacataattaacactaataccattttgataaatgattaaaaatattcctgcatatatcttcagcttttacaaagggaattatgtgattttgggttttcaattatgtgcaacctattgactggacattttctgatgtttccatggaggatttaagtgttattatgtataatatgttagctattaatttttaaataacaagtttaaattgcacaaaattactttattatagaagctgttgccaaaatcaactggcttgggaatgcacatcactgaggaatttgaaccaatcaaatcattagccagagaaatgtaattatttataactcagccaagctcttattatgggcaagttagttgcacttttctccgctcttttgtggttgatgtggtattttataatgaacgtagattagtgggaaaggagcaatatttataagcaaaagacagtgtaacagagtgaaaaattgaaatatgaaaaattatgaaagacggaaacattcagaaagcagattttctgaaattgtgtttaaagacagataaataaatatgtttgaagatggaattgagaaaaaaagatggaaaatggtcattgctcacagaaaaagattcactaagcttattcttttgatgtgatataatagtgatttgatggatgcagctaacaaaatgtctacaaaaagcccagtggtatccattaatattgatgcattgagtttcactaaccgtattcatggatgtattatttctagcaccttctgtgtttttctttttgtatttggtccataccagcgtgttgggtgctgtccatggtactggaccagcgttgcttgctagggcctgctgtttgggagattctagggatggtttcctcctcccaaccgcaatggccctgttcctttatcttacactgtgcttgaattgtaaatacaacttgtgaatttattagtaacatttctagttattgtagtttctaagtatgagatctcagtggagatctccaaacttaacctggctaaaactgagcttttatttttctccaaaccagttcctcctgcagtctcttccatctccgtcaatggcaactacatcctttgttactgaggctgaaatcttcttataatccttgactccactctttttttcacatcccacatctgtcaggtctgcctttaaaatatattcagaatccgaccagttttcaccacctcactgtggccatccttgtgtgagcccccatcatctctccctgtaatggacttctaactggccgtcctacttatgtccttctacttccccaggccaacttttaaagcctgttctctatatagtaaccagagtagtcttgtaaaacatgtcaggtcctattactcccttgctgaaaatcctctgatggctttctgctttagtcagatagtaaaagacaaagtccttataatggctcttacatcatctggccttcttgactcttcctcatgtaccctatttcagccacacaggcccttttgatgatccttgaacacacccaattatgtttttgctttaagacctttgtactcgcgattccctgtgccaatacagatcttccatcattatatgcatagctaatgtccttactttcttcaggtttttatttaaaaatatctttttcattgatatttttcctggtctttctatttaaacttgttaaaaagaaagaaatacccccccataacagcttatattttaaattaaatgtatctttgttgtttttttatccctctaagatgttggctcaatgaaagtaggaattttttctgttttgtctactgctatgcctagaataatgcctgcatagtaggagctcaataaatatctgtcagctgactaaatgaatggaattatgttaacagatgaatgattttagcggaaataaatgtcaatatttgatgatataaatatatatattagattataatcatttatcagattattattttagataataaaagcatttttagcattgcttgatttatggttaggattctgtatttggaggtgctaaaatgggtaagaagtccagccattgcagatgcagaggcctttagctgaagctctagagctgttggggtccccaggaaaaagctcacatgagatctcctgatgctacgcttctggccttcattattcacccccatttctaacatatatatgttggggggaagcttaaggttttcagtggtgtggggctacgacgggtgtcccttcacaccatttcaaatggataggggtaagttatatctagagtcttagttccagaaacaaggttgtgatacatactcctgttaaaaaatttttttttgattaatgtgcaccagccactaggggatgctagacactcatattcagagtagggtccactgtctcattgggcttggcaagaagtctggtctacctaccttcagaccatttcattatttgtattctttttagccttttgtgtaaaactaacatttatttaatatttcctccattcctccttttttcagcacattccccaattggagaggggtattttggatgcatctgggttcttgcttttaggaactgtgtttaatcatggaaacctcattcctattttccaagtggcagtgactcatgcggggagagtcaaggccctgggtctctgctagtgctttccccatcctttagcatttcttcactttgctaaaaagcgtaaaagtcttttcagtgattctgtctgtgggtgttggaaaaagattttaagaaaaatgattttcaaaatgactagtatttacacgtatgagtccctatcttttcaagtttttagtttcatgccactttaggaaaataatagcccatgcggtgccaccttattctttatatcttttacacgtgattgattgtaaaggcgatgaggataccagtatccattgccaggaggtaagcaggaatcagataaaagcaaagggtggaaggtggagatagaaatacatatatgaataacattcttcttctctccaacttcatatagcttatcaaatccttaatttagctttgggaggctggtggatcacttgaggtcaggagtttgagaccagcctggccaacatggtaaaaccccatctctactaaaaatacaaaaaatttagctgggcatggtggcatgtgcctgtaattccagctacttgggaagctgaggcatgagaatcacttaaacccaggaggtggaggttgcagtgagtcgagattgtgccactgcactccagcctgggcaacagagtgagactctgtcttaaaaaaaaaaaaaagcttaatttaaactttgatcttaggatgaaataccctcatagtgtgctctgctgttagagattcatgtgggaaaaacatatatcttggtttctttaaataaattagtagagggaaaagctgaatcgacatatgttatcatataaaggagttaaaatcatgttctttggtgtgaatagaccttggtttgaaactaaactctgctgcttattaggtgggtaacttcagagaaattactttttatctctcaatcctcagttttcttatcattaaatgagtttaataacttctatcccataaagttattgtgaagattcctgggaaatatgtatatacatatttaataaccatcagcacaaagaatggcatgcaatagttgctctatagaagttaattcctttccactttcatgtcaatatttttaacctagctgttagatgatctcagatctcagtcctagtggaggaatttgaactggactttttcctcccttaacatagtacaatgtgtatgtaaatcactagtaggaattctgtcattagaatttttaaagtgtaagttaaagttaatattttgctttatgaataagatatttttgttacttctgggtggatgtcaaggaagaaatcagtacaaggtaatcccttaatatttccttgaaatgtatgtttgtagtattatgcctgattgtaatagcatgggcaaaatcagttaaaatatagtgagctgcacacaaaaccttatatgaaattctttctttggcttgataaatgccaagacctaattctttgtgaagtgggtgccatagctttcagtgacgttaatatcattcatgtaaaatcattgttcctccagcatatttttatgggtctcagaggtcacgtgttcacagtttgtgtaagaaccagcattgtggtggagtggtgacagaattgcattgaaatcgtggctcttctactcaataattgtgtgatcttgaacaagtctgttaatctgtgtgagatacagctcttagacatataaagagtaggactatagtcattatgcctattgcatatcattgtattgatgcttaagtgaaagaatatacatgaaagcagtttatgagctctcaagtgttctccaaatgggagatggtttctcattgccacatttctggctgctgctttcacttgtcaaaccacattcctgaagcaacacagtttgctgttaaagggagaatatttaaggggcccgagatgctgtaggaaagccatctttctcttctttcttttctaaatggcagcagtaagaggtctgtgagatgggaaaataggggattaattagaagatgattctacatttgcctgagaagatgaatgatgtttaatgcgctttgagaattaggcagtgctcgggagtccattttatttttctacttgagtgttccagtgtattcgttgagtaagacctagacagattattttaccttatcccaacatgcctttctctttactttgggtaagcccaaagtgtaggttctgtcatcacagaccatcagccctctgttcttacagcagatgaactgccccgggactgcttcttgggtaataatggacatcacatgggccatccagccactctctgttggttcttatgtcatccttcctgctcagacagggatttcataccagatacttctcctgccatcattgtgatccagctgctgagataacgtttcttacattttatttcattactctagcatatttataagaaatggttaatttgacttgagtttatcagtgactgtactgtgagctcacttttagcttaagtatccactttgagcacaaaagtgtggatttttttaagttatttttttcacttttaatgagtataccataagctcttataaatattatatagaaatctgtctcttatggaaagtaagctagacccattcctcagtgactagcgtaaaaatctatttctgcctcactaagagtttaacatatgtgtaccttttataatgccttgtaacttggctaaatatgccattttgaactgatatttaaaactgtataaagatcctgtggttattgataaaagtacttgatagaaaatgctgtgacatttaaaattgtcaggctgtactggatgacttttccttgaggttgttgcagacactccacagtcgacatttagtttagttgctatttctggtggcacgtgtcttgcatgggcctcatgagtatgttgacacttgcgtattgtgcatttaagaagtacctggagaggactcctcccctgtcaaaaagttttctccatcagttttcctatagacatttgctacaattccaggttaatttcttttgattttctgtttttgaacaggttattttatgagtgaagtcactcaatgagtatttcttgtgttcctattatataacaagtcccgtgtagggtctatagtcaatcacttccacctgtggaaaaataattagcttgtttggatggggatagggagaaagaaaacaatttggggagggcactgggctcctcagtgtggtaacacaaggctgatggagaggaaaagagtgtatgaaactttgactgtaggagatgcttaatatgtatttattacataaaatgtattaaaataaacttgtggttctagcttcattaggttgtgataaggtggaagggccagtgtcctgagtgtcagaaaacatgggttttgcatggctagccctgccacccagccacttagctgtgaccctttgaacaagccatttcacttttctgggctgtgacttctttattagtagagtgatagagtgggactagatgatttctaaaattccagactcttctgatttttttcctgaagcatgccacttgcattttaatgaaaatattgattgttaatatttattgagaagtataaatgtagcgggctggtaccgtctttattcccatattacaaatgattccatttgtaagttaacaatccttaaatctgttctggtgtcagagccagggtttgaactgagatccaccagtttcaggtatgcacatgtttatgcaacacagcctccagaatgaaggctgatgaagacagggacgctcattccccaccccccaatcctctgtgtaagctttgaagatcactctggaagagtctacctgtcatgaaagaacgcagatgactttttaagaatatttatgtagtcttatatttcagggtacctgagaggccctttaaggtcctaaattattttttgttctatacaggaatcctttctgtaaaacccttgactaaaactgtctctgctaaaggatgggtattggcaggtgttggggtgagttgacgaaaaagcaaaacaatagtttctgtgaaaatgcatgttaaagagaattagcagtaaatgaacgtgtgtttccttaaataacccaacaccccaatccacctagaaccgatgacttttgctagtttttacccatcacctcaggagtcattctggtttcttggaaacgtgtaaagtatctgcttagggaaatattattttatgttgctgatgttgggaggtagcatctactttagttgaggaatagtcagctaatagttcttttctttgctgtgcttttgcttatgtatttgttcagacctgctgcttaatgatttcagctggccacctgccatgtcaaaatcactttcctctcaagatctgtggaaccaattttatctgaacacaatggaaaggaactcaccattttgagctacatatggtcttaaagataccatcttaaataaagagaaagtgaagaaaacatggtttcaatcattagtttctttcccagagccactttctccacctctaatatattgtttattttctgctaacactttaaacacttatactcagttaatatttcaactcttgtgtgaggaattggtttttatgctttctagcagacagattgcctgagactgacacttctgaccaagtaaaataagcatatttaaaatgctctgtagcttattttcgcaacgtatttgtgaacactagaacttccatatggaagggactgggggagaggatgcacacagtttgaaaaactattcaggaactggagagggtaatgaaaatgaaaaaatgtaacttatggcctccaatctatcttttcaaaaagtaattaaaaactgaaaagcaaaagaataattacttcttagtttaatacccccattctaacacctgatgtaatcattagggtttgatgcagctcaagataaacattgtataaaaagagtaatatacaaatggaatatattgtcattcacatgcataaatagattagcttactattttagagcactgattcactaatttatattcaaatttgtgtttcttacccaattcatgtttctagcctcacttccattcctgagtcatagtcaggatgaatagtcatagcctgaagatttaaatttagatgttctaccatttactacctcataattaatctcaagttttattcaccacccctccaattaagaggttcttctattagtcatttgatcttctatctcagtcttgcttacactcccttgaaaccacactttgatcttgtctcaaatctaagctccacctttgtcttactagttgtgggttcttgaggaaggtgtctagcagagtgtctggctcatagtaggagattttaaagtattgtttcttttttccttgtctcagagcctcatccttccccacccatccagatgatcctgttcattattcaaagactagatctgatcacttctcttacatggaccccatgggacttgcattcttctctgagccaaataaggaaacgtatttgtcccttaataaatactctgatttattattttctttttcatgttgtatcattggagtttttggatacaagcaatagaaaggatttggctgacatgggtaaagagaggaccttttgggagggctaaggtagctcactcgattcaccagtctagagaaccaagcttgggaatggatgggaagcaaagaggtatcacatgggtgagagacgaggaatctggtgaacagtctcataacaggagcagttgttgagcaagccaccaccaccgaggtgaatgagctctgactgcttcttccactgttgtggcaattgcttagggtgcaaataagaagagactgtgtgatgggttcagcccagctacaccagggcagttagtggaaggatctgccctttcgactgccctagtacgaggccaggcacctgaacttattatcaccaaagacttcacacagcaggagacacagaagtccctgaaaggaagtctggatgctgttaggaaggagaaactgaattgcagtgaccagaccaccaaaacgttccctaccatttttacccttcaaactctggaaattttcatttcctgaagagcatagattgtaattatgctaggttttggagttcctaaagtttgtatattcatgacatatttattaaccctttaatatacatgtaccaacatttatctgaggtgccgtgtatatagcagtgtatacataaacattcctgtcttcctggagcttgtattttggtggcaaggtgaggcagtcaatgagcaagattagaaaaatgcagcttgtattagtgatgtgtgatggaggaaaagatgacatggcagggcaatagaaaatgctatggtatatgacttgaagttttaaaaagtgattggagaaggtctcactaactaaggaggggacatttgaacaaaaactgatggatgtgaggaagctagcaatgcagatatatgagggaagagtgatccaggcaaagggaatggcaagtgcaaacacaggtgcatgtgttcccctggcacgttaaggaccagcctagaggtcattgcagctggagtggaatgaaggagaaggaaagtagtgggagatgagatcagaaatgtaggagggaaccagactaccatagatgcgacacatgaacaagatgtggcctctgcttccaatggccttgtggtctaagaggaggcacagatgtgaaaggacgtacttcagtacattgcagcaagcaccaaaattaggcagagggtgcaggctaactgcacccaggcaggaggatgggcctggttagatctctgcttgtctgtgagctctttgagggagtgatgtatcttattcattttgcatcctgggtggcttgtagagtgcctgacaaataccttttgtatatatttttgaattcattttgagtggttgaattacagatacaatgggcataatgtgtgagaaggagcaggattttccttaatcacagacagaggaggcttagggaaagagattaaggaaaataggaaagccacagacggttgaagagccaagagttgaatctctgcagtcttctctctactcggtactttttctgtccttggcatcattgctttgatgttgtaaagtattgaccacataaactactataaaagttttttgagaggtaagcataatgtctatattagttgcatgatctgcaacatcaaggtagttgattattttactgcaatttaggggtttgatttactggcttatttgtgctgttttttccccatgtggacggttttgtgcttgtctttatactttttctctacagggcactcaaggaacaccaaaatgtaaaatagaaccacaccattgtatagcagctgtagacagatatcagtgaggctgataatttggatttttctattgcaactgctactgccatctagtattatctaatactgagtggcttcttccatgatgacttcttgaattgtgaagtggaaatttggtagccttatgtaaccaagcacttacattatttaattaagcaaggtgctacatgaatcaacaaagcaacacaagctgaatatcaggaaaacacatttcaattagtgacagcaggaccagtgcctgaaggccctattcattgggtagaaaatatgacaatgccagggaaaaatgcaaattcatttcttataatattctgtgtgctgaactgctaaactaatatttattagtaatcttagagtcagtagtctttgcatatacgttttacttcctttcctttatatttcatttatcaataagtttttggagtccccgtgggtgaaaatgttgatctgttagggatttagaaaatctagtaaaagtttgcctgggctcagaagcttattaatctatttgaaaaatatgtgtctgccactgtactaggcattaagcatacaaaaatgaataaaatatgaagtctttttatatatatatttttattatactgtaagttctagggtacatgtgcacaacatgcaggtttgttacatatgtatacatgtgccatgttggtctgctgcacccattaactcgtcatttacattaggtatatctcctaatgctatccctcccccctccccccatcccacaacaggccctggtatgtgatgttccccttcctgtgtctttaagctctttctgaacaggagagaagccacaaactatcatatagtgtgatacgggctgtgatatagaatatctgggagtgctttgagaacctacaggaaagaggaggtcttctaatgaggtcataggcaatgcttccaagggagtttttcttcaaatggaggaaaaggaaaagggattctaggtgaagggaataggatgacccaaggtctaggagtttgaaaatgatggcacttgaagagatgcatacaagaatgctgggctgagggatttgcatttgccccataggtagtgaggagccaggagagatatgtgatattccaggttcctgtggatgaaccatccaggtgaagacatcagaatacagtaagagtcttaactttgactgcaggtctagaactcacaagggaagctggcttgataacatccccaaaggagagaatttacattgaaagaggaaggctgatgacaagacattagagaaaagcaatattttaataggtaggttgaagaaatgatatcagagaagccaggctttgccttgtgtttggaacaggcctgccagtagatgcctttatagtaaaagataaataacaataaatgaaatgcttttattgttaataaaaatgttgatgatgatgacaatgatagtagtagctaatacctattgagcacctactctgtactgggcacagctctaagaatttttcatttaatcctacaacaaccatatgagataaatagtactgttataatatcattttcgtttggcagataaggaaaccaagatgcagaggctttaaagtcagttgtccaaggtcacacggctaataagcaatgggtttaggacttcaacagtcttgcttcagagtttacactccctatctgctatcgtatcttttaaatagtctaacaactgtttgggagatgtcttatcaaaattgctctctcgaccgggtgcagtggttcacacctgtaatcccagcacgttgggaggccgaggcaggaggattgcttgagcccaggaatttgagaccagcctgggcaacatagtgagaccacttctgttaaaacaaattaaataaaaaagtgctctctccctgggagttcaagatttcagtgagctatgattggaccactgcactccagtctgggtggctgagggagaccttgtctctaaaaaaaaaaaaaaaaaaagctcgctcatacccaaagtcagggcaataaaggtttgagtggtcaaataaagggttgagtggtcaaagtcacataaaggtagagcttcaacagattatttttctttagattttcaagtcagcatgaggttgtctgatacaaacatcatagatgccatggttaaatggttctgtttctcagaaagccccctttcttcttataactgccccttcctttttaacagaccagcttagcctgctcagcatgagtgagccttgactattcaatattccacaggcccctatagggcctgttggtggccatggtagggggcatagtggacttgctgatccttgtgattattgagtatgaatttaagatgcacatggctgaggctggtggtggtgaaggtgcgaagatacagcagcatgaatccaggaggtggaggatgcagtgagccgagatcgcttcattacactccagcctggatgacagagtgagactccgtctcaaaaaaaaaaaaaaaaaaaaaagatttgcaagagttaccacctgctgctataagactgtaaagagcatggactaaaactgaatgggggtatggggtgccaccttggcaggagttgactgagcctcaaggtttgtttggtttttgatgattctaagctgacaatcatagggaaaaagaataagagtgcacattcagtttaaaaccaaaatatactcactatcagcatagcaggaatacagaataagaagtccacagggcctggaaaagtcagaaaagactttgtcaagggaaagagattacagctgaataggtggaggagaaggtagcttgatcaaaaatgtgctgttgggaatacatatggtaaaaacaaaagataaagagactggcccaagcatcaggtcagatgtgtggagaggaaggtggaaaataaagtttcataaataaagtgaggtcagattttatggggccttcaaaggagttcgatgttttagccatgggaaaaatggggcaggtgggaatgcttgaactaggaattaatgatgaaagaggtatttgaaggtcattaatcctaatatgttggattgcagagagactgcaggtaggaagggcagttagaaaactgtaattatcaagtgtttgagatgggttaaagcctgaaggaagatgtggatggaggactgagaagcaaggagcaagtccaatgggcagtatagttagatgaaacagaagggagactaaaagcaggttccctatcttgccttgaggattagaagactgaggacatcaccaatgaggtacttaggaagataagcctattttcattattagttagaaaactattttttttttctgaattgattctcctaagaattttatactgtattgttttcaagatggacatcattctgtctttgggatgtgtcttatacttctgctggccaggccgtaattgtgatatcattgcttttgattgtggatttgtaccagaacttgcagaatgggggccagtggctcagaagaaaatctcggagataatatgtgatctctctttgaggagatgctgtagtacctccctcttgatggcagagagaatgattttgtgtggagaagcacagaaactgaaaacaccaagtcacaatttatttagtagattccaactgcaaataaagaaagtttagggataccttaaccagtttatttctttgtaatgtaggtacaagaatatatattacaaaaaacaatctgggcaagtttaaaagcacattttaataaagataaaaaaattttaagtgataaagtattctttcatagtttaattggcctttttttcattcccagtacatatggcaatggggtatcttacaatcagtggcattttcaaataaataaggtaaaatatccaggacccactgcttgtttgaaatttgcttgctggagttaagagaagtgaacattttaaagattttttttttcctttagacagaaccttatttcatttgtgaaggctgactggacttggatgctgcccactagttaatttagtgtggcaaaaaataagaattctgtgtctgggcttcactgtctgcaaaaatgaatgcattattgtaaaatgtgcactaatctaaaaagtgtattgccttcctagaagtctgagtaatgtcttacacacataatcacactgcccgtcttcatatggacatgagtcctatagtgcttgagaaatggaaattatttgactgcatcagctagtgcatcgtacttctggttattttgaatttttgtaatcagatgctgctgaggctgtggccttttccccacctcctctctcatacatatatatgagtggtgtgttcagtgaaattttctgacatgaaaaagaagtccttaaaccaaaaataataataataataataacaataaagggaccactgtcttagaaaacattagttacccgttctctttccttctcaaggaggaatgacttcagtgcaattaacaatccgtgtctttgtgtcccagtttgatcttgcccagtttgaaacagcttgcactactagattggttcttgtaagtgttgaaagttcttaattacaaattaaatcttgatcctgtaacttggtagtaatcctaccatctatatataactttacgattttcagaggactttctttattgaaggcagtatgaagcaggaagggcaggcattgtgccactttacggttggggaaactgagacacagagagagtaaatgacttgtttgggtcatagcagttagtagtaaatgtcagaggagggatggaacctagattgggtgactccttgttcagtgctcttttatttttacttctcctgttcatattgaattgtttcagaggttggaattaggaacaaaataaacctatatcccattttctgagtcacagtccctcagacatgtgaaggcagcaatcatgagttgttgtttgttttccagccaaacatatctcttttccagactgtagtaacatagagaccccctcaaagatccctgatgtgacagaggtaaagacatttactagagtcagaggtcagctttcttacctgtgaattggccaaaggcatctattaggctatggaatgttaattatttcctgcatttgtctttggctagccttctctaaatgcaccataactcacctgaaaaactaccagatcatgttgtttttgagttaggtcaccagccctcatcaggatcttttaggcatgcctggaacgttggttgacaaaatccaatgaaatgaccacctatttttctctagccagtgagtcttaataggaggtgagcaatgggaacacctttaaaaaaaagatgcctgtgcctcatcatatagttactgaaccagaaatgaggggagaagatctcaaagatggatattatgatggtaaatacacttgggaaattctaatgtatccctgagataccactgtcatactactaaagcctaaaatgacatttaaaaaaatgctaccacctatttttattggctcatacaaatcttgtcatcatttgatattgtcatgacatccgccaaaattataactgacccaggtctccctactcatgtacatattcattcattcaacaagtattcattgagtacctggtacggtggataaggtagtgaataagacaaagtctatatcccacagagctcgtattctaatgggtaagaaggcagcaaataaataagcagaaacatctcttaggtagtggtaaatgctacaaagaaagatgaagctgggtgaggagatatagaataatgaatagggggttgcaagctaccaaaacagaatggtcaggaaggctgaggtggtgacatttgacagtcctaaataaagtgagggagcataggaagatccagggtgaacggtagtccaggcagagggaacagcaagtgtcaaagtcctgaggacaaatttggactgctagccttcatattagtttaaaatcattgtttgattttataagacatactagcctttcagaaatataggatataattgatcagggcctgaaggatgaactcattttcttctgttagctccaggtacttcttaacaatacttaatctacttttgctgtttgctctttgtagacaacaatgcagaagttggatgcatcttctatgacatttttggacttgtgttttaagagaggtacattgcctctttggggatctggaatcttcctgatagcgagtcagcaagattggtgggcccaacactggcacatgtctcagccaaattctctgtgtagcttctgacaaatgccaaactactggtaaatatccaccccccccccccccccactgaaagccaaggacaataatattctttattcattttctggctctgagtatcttttctttttgtttttgcagcctaacctttttgtcatctttggcatttttcacaggctccagctcattcctggctttagttgaacttttctgacattcttcatataggtcagtgctactcttatatttcattctttgttatatgattctccttccatcttttatgtggttgttttgaagcctgaacccctcagaaagtttcctctgtgaccacattattttctctggaagcctgctcttttatctcccctccgcagctgtttgcaagtgtgtgtatgtgtatgtgtgtgtgtgtgtgtgcctgtctgaaatgttttttagaggctcattcctttctgaggtaggtaggttcctatttagaacttctgagcctaacatcatgcttagtttacttctaattttaatgaacacttttattaagatcctgtcttagttcatgtgcactgctataacaaaataccttagactgggtaatataaagataatagaaatttgtttctcccagttctcaaggctcagaagttcaagatcaagatatgagcagattcagtgtctggtgagggctgttctctgcttccaaaatggtgccttgttgttttgtccttacatggtagaaggtggaagggtaaaggggcctacctcgatccctttagcccttttataaggcacgaattccatccaaaagagtagagcccccatggcttaaccacctcctaaaggccccacctcttaatactgttgcacggaggattaagtttcaacaagacttttggaggggacacaaactttcaaaccatggtatattctaaatttgtgtcttagttcatcctttctctttcacaaactccaggatgacataatttatttcctccaaaatttctgtcacaccagcatcaccttccagtgacttcttcttcttagaattatgatagaggagctgttaatcttcttttatagcatagcaattgagaccatgggaaaatctgggttcaagtccaacaccaccgcttactctctgggttggctgtaggcaaattgttatgaagactgaaatagtgcacaccaagtgctttaggaatgtgcttggtatatttttagtcctcaataattgctagtggttaccataatcattatcagcatcaatatcatgattctgagataagaaattattgtcaagctaagtcaagaatgaatagattcactaaacaagtatctggactgtcgacattcccctaactataatattgtaactctgtaaaaatatttctaatctatactcagaaaatatccttcacaccttctgttcctgagagcttcaatgtctttttatacagcagtttaactgtcctcaacttctcgccccaaacttacatattcaaacattcatcaagatgttcaacagaataaagggccttaccaatatcaaacaagcaccctttaaaagtgctctgtaaaattatcctgtaatttagaagacaggtagacgacgacatgaccacataaaatcctgttattgttaggaatgattactactccttcaaatacatacaaagtcacttttaagttggttaggcttttgaataaggagagaggaatggctcaaccagtcattttagaataaataattatcccatgctgatagagtggaatggaataatctgagagtgattgtgggagtttggacttcaatttgaaatatacaatgagttgttcatgttgaaaaactgaccaggatgaaagactgttggagttattagataattctcttccgatagaagctgagctaaaaataaacttcctgtttacttcctttcctttcatctaaagtcaagacgatgcatgtcaaagatggctgtgcttcattcattcattcattcattcattcattcagcagttatttattgagtatccactgtatatcaggtactgttctgggcattagaattacagaggtaaatgcaaggtgcctgccttcatggagtgtacactgtacaggaggggattagatttaagcaagagaataagccagaaagataatttcagatagtgttaaggcctgtgaagaaaagagaacaggccaatggaatgggtagtgcaaagagggaggaaatgagatacttagagacaagaatgatgataagtttcagatctggggagcattctctgaggggaaactggattttatattctatccagtgtggattgagaagccatttagaggttgcaagcaggagagtaacatgttctggatttcatctcacagcaattcccctgtgttcttaggataatgtattggaaataaatctgactggatgtgaggatgccagttaagagtctggtccaggagaaaaagggtggtggattggatgagagttggggaagtggggatggagaagagtgactagagtcaagatttattttgggttctgaagtgacaggaactcccaacagacacagctctgtggggtggtaaggtagagggatgtttctgacctgcctgtctggtggagggtggaaccctttgttgaaattagaaaggtagaggagctggctttttggagaggatagatatagagagtgaggaatgaaaaattaaagtcagggctttaaaagcctatgaggcatccacgtggaggtataaaatagtcagccggagggatagtcaaagcaagagggaaattggggaacattagcatgttcataatattaatactatgggaataggggagatcaacaaggaagaacgtagagagagaagaaaagaggacccaggacaaagccctggagaaattaattagtgggtagagaaagaggatgttgaagactgaaaaggaacagcagaggagttgggaaaaccaggcagatattttattgctaaatccaagagaagagctttcagaagttctgaaagttgtccaccatgtgaagttctactgggagattaagaaccggagagcaggaaaggcccatcatagtggccagatggaagtcattgtgctgtaagcaaaagtgttttgagtggggtgtaggtgggtggagaaaagattacagggagtgagagagtgaatgggacgtgaggaagcagatggagatggtgagtgcacatagtttttcaaagaagctgtgaatgggcggaacctggaggggatatgagtcatcacagaaatattagacatttctgagatggcacctgaaagaaaagttgacctgggagaggactggctggcatatagtaattactctggggtttaaagggtaggaatggcttgaggttaaggtctctgacctctttttagcttaggacaatctctcttcctcttttgttcctcccaagaggacgttgtttgagcatccatccatgactgaaacttgcctgtccttgtacattttagtaacatgagccaataaatttgcttatatttttatagcttaagatgtttgcaatagagtctttttattgtctatatggtacatatgtctgtatctatgtgatacatggctacataatcatataaatatattgtctacatggagtttctcagaattaagaaaaagcacaattactctgtagttcaccctaatagttatctaaactaaggaaagggggaataaatgaaaaaaagtaacattttatcataatgttgtttttagatagcatatatagcatttactttaccagttcattgtaagttggcaaacatttagaacttgaaatgaaatcagagctcatctggtttagtttcattgagtagaggaaatggaagcctaaagggagtgaatgacccatggaaggaaagaacctaggacctggctttcaacctaggaaccagagctttggagtaacacagacctgggtttgagttctgcctctgccacccatacccttgaaactctgggtgaattatttagctgctctgtgtttattttctaatccataaaatgaaattataagacattgatcttgtagttatgaggcatatatgagattgcaaattaactagcaaggcgtctagcacatagaaatcccttgatcagtgttaaatctgtagtgtcccaaaaccttgaatgaattagtagtaagctgaaaaacatgaagatcatcctagtatataaaaatcatactttcctctcttgtcttcttactgttagtttttgggtaaaccagtaattccatttttcaacaaattatttggataattattgattcatataaagttataagaaataacagaaagaacttgtgtacagtttcccccaatggtaacattttgaaaaacttaataaaatatcactcaataatttgatgttatgaacaacaaatattttactggtgctaatatctattaaaacatcagaaaattcaattttatgtaatttgggactaaagcaatatcctgaatttcagtatctgttggaaccattagacaaatggatctagtgccacagacagctgactttgctctgacttggtgaccttggccaaggcacttaatttttatgctctagagctaattataaattgggacaaaagtactcatctctgcttaattcaggggagtgttccagattaattcgatactgtgcataggtatcccctggctatctctcctgccacctttctttatatactgtctatgttttccttttccttctttgccaacccataatgattttctcagttttcaaagcacaccatgttttatctcgtttctatacattttctaatgctgttcctccatgtctatcttattcccttcctaccctgcctcccaatctatacatacacttattcttcctcctcttctttccttccacacccccccccaacttctacttaatttttgaaatcacaacttttacaaaatcttcaggggaagctctgcataacccccagaccagattaggtcccagtggtgtgttcccttagcatcctgggcctccattcacagcactttaccccatgtccttattgtgctttgtctagtgtttgtttttaccagtatgtgaagtgagggcagggagaagattgccttattcaccacttcattgtacttatcacagtgtctgccacagagtggatgcccagtaaatactcattgaatgagtgaatgaatacatttaataaacatacacttgcttttttggaaggaaacgctgtgcagatcaggtggaactgtgggtggtatttctatttagtatgtgactcatctatattgaaggctgttaaatgtttaaagtgtatctttgtatggtagtttggttttccttatttctttcttttgttttcatgtcagaattactgtgtaattatgtcttgcaaaacacctcaaatggtggccaagataattttttttttttttgaggtggagtctcactctgtcactcaggctggagcgcagtggtgcaatctcggctcactgcaagctccgcctcccgggttcacgccattctcctgactcagcctcccgagtagctgggactacaggtgcccaccaccacgcctggctaattttttgtatttttagtagagacggggtttcaccgtgttagccaggatggtctcgatctcctgacctcatgatccgcctgcctcggcctcccaaagtgctgggattacaggcgtgagccaagatgaattttaatagggaagacaaacccaaaatagagatgaatgtttactgtggtgcattaaagcattaaagagttgtgaatgtgaagctctccccagtctttagtaacatcaagttatcttggtacaggaagcaaatagccacttctcattttgcctcaggtggtgaaaaacttcccattttaggccagttgagattgtatgtgctgtatggctatgaatgccaaatatgagtcttaaactccaaatatgtggctgagctaaaagtaatgttaaattgtactgtctgctttggtgtcttataatgacttaaaataatcaaagtaagaagaaatttttgtacctatgtcaactgagatttcatttgttttttttctttttcttcctgtagattaggacttataaatgttccccttcagagtactagccttgatttatcccattgttcctgccttttgctttctctgtctctggtgttgggatagcccaataaaaccaactttcttctatactcagcaattgcattgggagggaggagcagagacttttccttgtttcatttctagtcactaagagggtattttgagccttgaggtgtatatatcagagatcctagatacctagatcctatagttggtttactatcagaatcaccaggcaaacttttaaaaaaagtgcagattctgggacccatgcccaaaaattcttattcaataagtttagggtgggactgaaaatcaaactcttttgatgatactgatgtataaccaagtttggaaactactgtttgggaatcccaaatgcttgaaaccctttgtgagtctttggtgtctttgggctaaaattccaaaccttgagcatggtcctttgtggtctgacttctcctggtccattgctccagcttcttttctgcacgcgaccccctcacactcttctactgagccatggtaactacctgtaggttactgattgctcaatggattttcttaacttttggacatggtggaacatgttttgccccctccatgtcctgggtaattcctgttgtcttttggacttctctcacctactctgatagagctgggcttgtctgggctctcctggtgccttatctcttccctttcttttcctacttatcacactgtattgatttgtcctgcacatagtgggaataaatagatagttatgaatggaataagttgcttgctcagttttctgtctttcctactgtattatgagctcctttaaataagacctgcatcttttccactttgtaggcctcgtgcacgtgttagcatgtggagagcacttaacaaatcatagttaaacatgtaaattaataactgatattgaaaataaaagaatcctgtcctttgggtaaaagatcctgcagtagttaatgttctgagctggaaaacatttgcctattacaatagacatgtattttactagaatagaaaagaacctgggccataaacagtaattgagattgggaatattaatagaaaaacagagaaacatacagttaaattgttctgtatgtattttcaagtgttttattttattttcatataggtaataccatcgtatgttacaaattttaaagataaaatagtatacagggaagaaagagtctccttcctgcctcatttctcagccaccaatttctccaacccagaggcagtcaacgttttagttttatacctttcacaagacgaatggtaacataggctgcaggctgtctgtttgcttttttacttactggtttgtcttactggcaaacatctatataaatgagtgagtacacaaggagattctttttatctctttcattgtttcaaagtattccactctatggatatattccaattcattttactagtccattattgatggatttttaggtgaccgttttaaattccatatctgtgaattcattttttcacccatgtcattttgcgcatgcacatgtatatgtaggaaaatttttagagctatattttctaggtcattgaatgtgtgctttgtaatattaccaaactgccaaaatggggattatatcaattgttctgttaattgtcaccaccaacctcaaatacctgggaccttgtgggctccggatcaattgttctgttaattgtcaccaccagcctcaaatacctgggaccttgtgggctcgggccatcaagcagatggtctttcagactgtgcaatgtattctgtaatgtgtacatttggttgagatgagttgaaagtatttgagagtacctggaactctgaagctacctcagctacctgaagcaaccattgaggctgaattttcagaatgttagtgtttatctattaaattaatcgtttatttagggatatttagttaataaataaaataataaaatgtaaacattttctcattggagttttatcagtatttctgccattgatccttggaaaggggacttatatatgattagagtcaggaatttggaaatcataggaagtaacagcaaagttgacagttgactgaaataattaaaagaaggtctaggaggacatggttcttccttgtacacctactggtcatgcccaatgaggagagtcattcctcctatgctttccattttgttgaaggatcataacaggctgcactttctgatagaatttcacatagtgctggagccaggttcaccatcattttctttattttggtttgcatttctgtcttgaggatctaaatttttttcttaggtaacttttctggcatcagaaaattttctcaggcatacattttacctgaaatacttattatgaacaatgaatattaatcattctattgagactggcagaacctaggatcatgaacaccacactttaaatgtgcttttattttaagtaagagtcatttttttctgggatttttaaaattgttgataaaaatttaggaaattcagaactatattttgaaaaggaaagaaaatgtttctacctttatcatatgaatgcagaaattattgatatttggtatgttttctttgatcttgattatatagatttcttcacattcttaaacacttatactgtgcaatgtatgtagcatcctgaattttcaactatatgaaaattacatattttttcaggttaaaaattattttaaatgattttaatgagatattaatattctatattatgcatataacataacatatttaaccattctcatattgtgggatatttgtgtttctatttttagctcttttaaaatgtgctgcagctaataacttttctgtgaatgttagtctatgactatcttgctatgcatattgcaagtggaaataccagatcaaagggtatcaatattttttaaactctagatacaaaaatgccaagatgcttccagagtaagactctaatttatacctccatcatcaatttatgaagttgtccatatcatatattcttttaactttgtcccccattttttaaaaacatgcacaattatatcttcttgtttacattttaaacattattattagtgaagtagagtattttaaaagtttgttactcatttttctttccctttttgttaaatatctatccctgcctatccttttgtatttctgtctttaggagacttgctgctttttcccagagattttaatgttctttctatataaactatatttcaatggtcacagatattttctccaggaaattccagcttttttgccttttaattttctcagactgggtaaatttaagaatttatttatatgaagtctactaatcttttactttgtgaattctttctttgcttttgtgttgggaaatcctttctatattcaaagtgatgacaaatattcatccatattttctcctattttaaaaataatttcattaaaggataagttcttaaaggagtaattctataatgtatcaggtggtgggaaatgcagagaagcaaagtgaatcaagtagggggtatgtgaagtgtgggctgtgaaggaaggcctcgcttaccagatgcacctgaccagagacctgtggggggaggggagggagacaagccaacgtacctgatgctccaagcagagggatcagcaaatgtaaaggtccttagtgggagtatgctcagctcaagggctatcaggaaggcctgtgttgggggagcagaatgagtgcttgggagagagcaggtggaaatgaggcctgaatttcagaataggccgggggcaggagcattctagcctctcataaaccattttgggtgcttgggtttttactcttaatgacacaggaatcattgcaaagacttaaataggggagtgacctgacatgacttacttttaaaaaggattactttaactgcttgagaaagcatagatatctaaaagaaaatgtccaggcacagggatcctatgtataccctccttccttttgaaatttgtgctttcttgcttataaacttgctataatctatacctaatctattaaaaacatatttcaaataaataagaaagagatggatgtagcagttcagttgtgttcagatgtatgtaacaaaccctgctgcagaggttgaatccagtggggctttatttttctctcatcacaggaaacctggaggaagacaattcaggactagttcagcagctcaaggaaggcctccaggatacaggcttcttctactgtcctaaacatgtatgtggctatcatcctcatgttgacaagattgatgctttcctccagacaccacattctgcatcctaggcaggaggaaggagatggtcagaagacagctgaaactgtcttttcactaggaaacaaaccattttcctggatcctcagtagtaggcttctgattacttcatggccagaactgggtcataccactattccttgtgggcacgttgctgccttgaataccagctataccttcttactaaggaagatggaactaacagtgtttgtgataatggatagcctgtagaaaaatggatatagatgagtctcaaaataaaaatatacaaatatacatgtcctagtcaatatacataaaaattacaaaatctgtaatattccaaaacgcaaactaaaactgtcagttaccactttgtccgtcatgttggcaatttaaataaatcgataacactcaaagttagcaagaataggtaaaatgggaatgttttatggcgccagaggtataaccttcctgggaacaatttaatcattcatgtggtgtgtatgtaagtgtatcttattgagggtttgctttgcatttccctgatgactaatgaagtagaggacctttgtacaactttctaaccatttgaatttcccctttgatgagctgcctgttcaagtctcttgaccatttttctacttaattataatctttttatataaatatgaagaggttgtttatattttctagatacaagccatttgtctggaatatgcacggcaaacatcttctcctaataagtagcttgccttttcaaagctctcttaataatttattttgtgaacagaagtttttaatattatataatttaccattcttttattgttaagtacattgtatgtcctgtttaagaaatatttccttactccaacttcatgaagatattttctaatataatgttctagagatttgtttttaccttcatatttattaaaaagactgtcctctacaattacttagtaatattacctttgccctaatttgaatgttttcatatgcattggtttctttttgagcttttgcttctgttctattggtctatttgtcaatcactgcacctgtaccactctctcttagttaccatagtttttaaataacttttggtatccaaaatttagcaggttcttccccatttttttcctgttcagaacctataaagtctttcatttacctttactttagaaattacagcatacttccgtgacctattaacttccaatgttgactgaagtatgcataaatgttttacgtgtatatttatcaaaggctaaaggtagtatctctgtcctcttcccaaataacgcaaggatctaaataccatttaactacaatcttcccattcttacatataatattacaattgttcagtattttacttatacctgctttttgatactccccaaataaaccattattactattttgttgttgtttttgtagccagtcagtagttctaggtagacttaccaacatgacaaccagtttatttatgtattattgtttttgcattttccatgttccttccggattctgtctggcttctaagaaggagcatcttttatggacagttctgagtgataaaatctctctggcttactttctgaaaaatatctttattttgcttcattcatgaatatagtgttgctaagtatagaattctaaagtgatagttattttttcttagttcttagaagataatctttttggatgtccttaggagatattttttcatcgctttctgtcatcttctgtagctgatgaaagaagtctgtcaatgtaattatggtttccttgtcaataattgttttctctgtttgctttagctgtttcctcttttctttggaagagtgcagttttacttgttgtgttagctgtggtatgtttagaaatactagagacccgtgttttccttctattatggaaagttttcaaccattactttgaatattctctcccttattctctcctcttttatttttagaatttatgtatacacagcattgagtattctgtgcctcatgtttcttaatgaatctttcatattttttatttcttcatttctccatgctgcattctgcatgattttcccaggtgtatcacctcccttattacctccctctttagttggtgtcttttttgttccttttcaaagcaaccttttattcccacagagttataaactagtcctttctactcattcactgtatttatctaatagtccattttagattttcctttcttcagttgtggggatacaaattattgtctatttttatctgcttaatcttcctcatcatgttccatttccttttgtgtttcatagcttttctttgtgagttcctcttctgcagaagttttgatagttgttgtttgtatgtacatttttgaggaggggattccatgtgtcctggcttctcatggactgggtggcattttgaggtctgtggcttcgtgtagggagactgaatgctagctttcacctcatgtggtcccaagttcatttttttttctcctcatacgctttatggcccaaacccctaagttctaaagtctaaatctaaagtccatttgaagtgcatcaattcctgcctcttggtcaggaatcaaatgccttctttgtttctatagctggggcattccatttcttagtttcaagcttggctttgtaatgctttctttgttgtatttgcatgcatcatttaagtgtgttagtaatgtcattttggtccatcgtatccttttttctcccctttatttgttttattgtcaataacttctactttctgcctttagctttaattattagttactaaaacaactttatgctaacatcagaggcttataaaaaatagaaaaatttccccataatcccatattgagtcaaaatgatctatttttattctctagatatccttcaaatctttattcatagggtgctgttgttacaatcatgccatatatttaattttgtgttataactctcttctggtttacattttgcccgtatttctttgtaatcttcaaattaccattttaatggctctatgatagcctcttgaattggtgtactctatcatacttacagagtttgttttctgtttttccttgtttatacaaatttccccagaatatttttgcatttgtagtgtttgcattattttctgcggctaaaatctcagaagagaggatgttaaattaaaaattcttaaccatgcattgccaatttgacctttgaatggcttttctcattttacagtgacattaggaataaattcacataccgacataaatttaatacctactgtgtgggaagttctgtgcattttgagtggcatagtgacaaataggacctgcttcaagtttcaaggaatttacagtgaaatcaaggatatagatatactatcaacttttataatattaggataaatggagcaagtggtacagtcaaaatctaatcaaagaaggaattttatagaagaacttgtatttcagccagggatagaggaaggggtggagtttccctgtacaaagggaggctggataatattccaggctgagagaacttaacggagaaacagccagaggtatgaaaaagtctacagtgcatttggaaactattgaaatcgatggtgtggctggaacaatgggtgagagaaaggagcttgtaggagacttgaagtactttgccgaaggattttggttataatcagccagaattttcatttctgccactaattgcaaatgctggtttgagaaaagcatgcactgtagattcatggtagcctgtgattggcagaacccaccagtctcctattttatagatgaaaacaatttctacggaaattaagaaaattttccaagtttacactaggagtgtatctgaaggcacacttgctccctttttcaagaaaaatttgtttagcatctgtttgtaactcagtagtaagtgcttggaggatagaaagtaaatacagtatagggtcaacttctgtagccagctgggggaaaaacaaatcaatatttgtaaaatggcaggataagacaatgatagaaatgagtaaagggtattttgagaacacagaagaggggaagctatttcagcttggcaagaaggatgaagagtggaagatggtggctctattaaatcataaaggatggataggaagaagcttgccaggtatacctcacccatggtgagggaagggagtttcagcctgagcaaaggcacggggtaggaatcagcatggtggatgtgggaatcagagcagcttcgcattgtggaagaatcacatgtgaggcagagagtggcaggatataaaaccagggctagatggtgtttgctatggtaagtagtatgggcttgatttttttagggctgctgaggatcttaaaatatttaagagggaaacttggcaggactttctgattgactggatgtgggagtaaggatgtgagggagagaagagcaaaatatgattctctggtagacttcttctttcttctctagttagtgagtttatcaagatttaagatggtagtggttttgtttcagcagaagccatgcagtgtggtgtcatgtggcagtggaaaaaccatcatggggcgtatggagactcaaatgttcctgaaatgcctgagagaacatccagggacatttggaggtcactgccagaggccatgcacattgtccagttttcagtggtttctcttcgttgctaagaagcttgaacatatacagaatgcatttaataatgttcagaaaaccttcttaagtggacaatctcaaatgtacaacagacaaagcagaatcagatatttttttggatggtatacctcattagtacagaataattacaacattaggtgataataatagcaactgatatttatggagtactcactgttttccatgtaggatgttaaatgctttacattcgtgatctgacttaatccttaccataatccctactcaaggaaacaaaggcacagagcatgtaattacttgcacacggtcactaactccaatgcaaaccctgaggcatgccaactccaaagccctcatttataaactccaggccatattgcctccccatgaagctgatacgcagacaagtgtggtgccactttgagattctctgggttcagctgtcaaacaatgacatcattaaattatccatgtaaaataagaagttgagtcctctatatccgctgtgtttgaggagtggcaggatgtgggatgaaagaaagaaattggattgcctctgaagccctctgaatttgtaatagaactacagcctcctcaaaccaaaattataaaataacctacatcactctgaaagaattttcttactaaatacgttaatgtgagaagacaaaaccaaaccaccaaagataatatttgaatattgataatattcaaacctcatttgaaatcaaaccactagaaccagaaaagaaaatgaaatgtgactatttaattcctcagcagagatatatgtatgaaaacataatttctatcactggtgataggagaatttgatattgaggacttcatgagttgggaagagcgatttcttaaatgaaggtgataaaagcctgtataaataatacagtcatgtattgcttaatgatggtgatatgtctgagaaatgcattgttagctgatttcatcactgtgggtacatgaaagactgcacttacacaagcttagctagtatagcccactacatagctagggtacatggtatggcctgttgctcctaggctgtaaacctgtacatgttactgtattgaatactgtaaaaaactttaacacagtggtatttttgtgtctaaacctagaaaatgtacagtaaaaatatgatattataattttatgggaccgccatcatatatgtggtccgtcattatgaggctcatgactgtctaagataaaactgtaggcctcataccaaatagagaagattggcaatatctatatgtatatgggtgtggattgtataattaatttctacttagtatcctttgcttcttagaaactttaagttccctcaatttaaaaaaatccttcttgatttcttttgctttttaaagatattttgatgtaaaagagcttttgtttttattttctttgcctggttctccactcaaaaatttaatgcctgtgtgacttagaattctcataagatttagctttctgtctttttacagatatgaagtggcatagtaggatttggggtccattttccctcagcttcctatttcttgccagtagcttcattgcaaaaccactctaccatctgccctgcttctttttctgcttccacccccagttccctcattttctaattactcccaacaggagtgactcaaacatatattggaagcaagattcccacagttgccaaataggagcagggaagtgccacgtactaggttttcacaaaagaagtcattatgtatctggatttttatctgccagagaagaagaggaatgcttgaggaagtcaagtctcagggcaaaaaagtaacataataaacaaattagagaatggcactttcacattaccatttctgttacattttgtggtagtctttcaggctgttcacaagtatatggctcccttccttttttgggctatagtacagtatcgttccgtgctagtatagttcggtccaggctcttctgcactccactgaactcggatatggccatatgacttgacttgttttagccagttaaatgtgagtggcagtgacaggtgtcacttctgagaagaagctttaaaagccagtggctttaagagcatattttgatgtcttatttttgacagtagttgctctatcaacttgagtctttaagtgacagtgtgaacagagcaccctccccataccagctgactcataatggccaggtgacatgggcaagaaagaagcctttgttgttttaagtcactgagatttggggagtaatgttatggtggcagaatctagtctgtcctgactaatacactgaaacagttttagcatgtataatctcatgtagttaagagattcaaatcataattcctccgatacatggatcaaagataatagaagacaaacatttaaagtgtttttaaagcattcactcaaaaagaatgtattttgtttgcatccatatagtagcatctaacctatcgcacaatagttttgtgttatataatagatctgccactgcttcagagcctctgtgagggcagagataaggtctcgttcttttttaatcctggcacctggcactaggtgtggcatttagtgggtacttaatactattagattagtgaagaggactgaaaactgcctggcacatgagaggtactgaataaatatttgtacagatattaatgttgttaatatctgtaccaaatattcagcacctgtcattaaaattcatccatcacctatcataaaattaattagcattggaaattctctttgtacaatcacaaataattgtacaaagtgcattttcaacatttcaaccccttggtagctactgggctaatttttcaggcacaaagaagcagtttaatgtggaccctcaagttgtattttttcctgccaccagggcctttaaagccttacttaaggaagtaccattatttcaactttggcaggagggatgatacatttgcatgtaaactggtttggagtttgatgctgagcttgcatcgtgaccacctttccactggacattataattagggggaaattctgatgctaaagcttggccagtgtatagttattaattcaaagttgattatctcaccagggattgtgaagagtttcatttggttttaaaactgcctaatacatgttattctaaggtgttgggaaattatcagtgtggctgctttgtgtgctctccttggtccagtgaaagcttcaccttactccttggcccctgccagctcctattttatctgtttcttcccaggaaggatttcaggcatctgggaacatacatgtacacaaggttgttgtcatcaggtccctgcttgcctacttccttcttcctaaatttagattctctaaatggagcttactttcctatgtctctgtcctgtctaagcagtttctccattacccaaaatgcaattccccaggttcattaattcattctcaaatatctcttaagagcctcctctataccaggcattgttcaaagccttgtgagtacagctttcctggaacttctatttcattggaagagacagatgataaataaaaaagtaaatacagtcatgcatcacttaacgatgagaatattttctgagaaatgcattgttaagtgattttatcattgtatgactatcacagtgtgtccagagttcgttccttctggtgcatttgtgttctcgctgacttcaagaatggggccgcggaccttcgcggtgagtgttacagctcttaaagatggcacagacccaaagagtgagcaacagcaagatttattgtgaagagcgaaagaacaaagcttccacagcatggaaggggacctgagagagttgccgctgctggcttgggtggccagcttttattcccttatttatcaccacccatgtcctgctgattggtccgttttagagagcactgattggttgattttacagagcattgattggcccattttacaaacctctagctagctacagagcactgattggtgcattttacaaacctcttgtaagacaggaaagttctccaagtccccattcgaccaggatgtccagctggcttcacctctcaacagtgtgtacttaaacctagatggtatagcctactatgcaccttgggtatgtgatatggtctattgctcctaggctgcaaacctgtacagcatgttactgtactgaatagtgtaggcaattgtaacacagtgataagtatttgtgtatctaaacatatctaaacatagaaaaggtacagtaaaaatacagtataaaagataaaaaatggtacacttgtataggacatttaccatgaatgaagcctgcggaactggaaattgctcttgatgaatcagtttgtgagtagtaaatgaatatgaaggcctaggacattaccatatactactgtagactttataaacatcctacatttagtctacactaaggttaaatttttttgtttcttcactgttaaattaaccttagcttactctttttgctgtataaacttatttaaaaaatgtttttgactcttttgtaataatatttcacttaaacacacattgcacaggtgtacaaaagtatttcctttcattgcattcttattctataagtttttttctattttgaatttttgttctttaaactttctttgttaagaactaagatacaaactcacacattagcgtaggcctacacagggtgaggaacattagtatcactgtcttccatctccacatcttgtcccactggaaggtcttcaggggcaataacatgcatggagctgtcatccatgataacaatgccttctggaatacttcttgaaggacctgcctgaagctgctttctagttaacttttaaatttaatttaattttaatttttaaatttgtattcttttagagccacggggtctcattatgttgcccaagctggcctcaaacacctgggctcaagcgatcctctcacctcagcctctggagtagcagctggaactataggcatgtgccactgcacccagttaaatttttaaataaatagaaggagtatactctaaaataacaataaaaagtgtagtacagtaaatacataaaccagtaacatagttttttattatccttattattattatttgagacggattttgctttgttgcccaggctggagtgcagtggtgcaatctcagctcactgcaatctccgcctcccaggttcaagtgattctcttgcctcagcctcataagtagctaggattacaggcgcctgccaccatgcccagctaatttttgtatttttagtagagatgggatttcgccatgttgaccaggctggtctcaaactcctgacctcaggtgatttgcccacctcagcctcccaaagtgctgggattacaggcgtgagccactgtgcctggcctttattatcattattaagtattatatactggacataattgtgtgtgctacacttttatgcaactggcagcacagtaggtttgttcacatcagtatcactgcaaacatgtgagtaatgcattgccctatgacattataatggctatgacatcactaggtaataggaattttccacttcggtataatgtcatgggatcaccatcatatatgttgtccatcattgactgaaacgtcattatgcagtgcatgactgtatacggtaagtcaggcagctgtaagtgctacagtgaataataaagagggaagaggtattatgtttgtggaagtagggtgggacagtgttactaatcatttcaggacaggaaaagcctaactgataaggtgttaggtaaacagctgaaaccttaaggaagtgatgaagaaagccacgagcacatggggtgaagaggagctagaaaggttcccaacagaggggacagcaggagctgaggcaggagcatgcttggcaacttcaaagaagaggaagcaggccagagtaattggggatcagagcaggatgggctgaagtggattatacagatcttgtagggctttttggtcagtgttatttagtctttagcctgagtaaggtaggaagctgttgtgagtttttgagcagagggtgccttaagaggatctggctgatacggtaagaactggtcaccagaacagaaaaagggtgaccagttagacatctgttagataataattcaggcatgaaatgaaggcattgactttcaatactcagctcaagtgttaactctaactaggaagcctctcctaactcccctaggctgagttgagtctacctcttttgagtttctgtaacaatcttactcttgaaatgaaggctttcggctgagttcacttatatttggaagctgactatatagttgagaggtctctgaattaatttacaattagaataaagtttatttatagataagtaaaagggctaacttagtatattatgtattatatattcattatgtacaaatatacgtgcattatattattaaaacttaacaataattgtggcaattacttaaaactttgtccattacaaagatttttgggacaggattattttgataaggtttaaaattgccagaaatggtaaaataaaaagcagagtgactcatgatgggttttattattgttttcaaattctttataaactaccccgtaatgcctatacccacagtggactgatctcactgccttgtcttgatatatcactgatggtaagatcttttattcaaagtgccttgagcaaaagaaaattccttcaggcacggtttgatccagggagctcgaacagtgtcatcagagctcctccaaattattccaatctgttttccatctgttttcctctgggttggcttccttctacagcaggctgtctacttttagttgcaagatgactgacagtgactccagccatccaaatgcctttctccaggtcactgcagcagaagtcccaaaatatgactctaacaatgtcgtatgcccgtacttgaaccaatcacagtggccacaggaatgcaatattctaattggcctttgaaagtcaatattctaattctgacaggcttgggtcacttgcccccatttggagctgggtatggggtaggtccattttacacgaattacatggaagtagaggaggaaaggcaggcccccaagaaaaattaagattgctgttagcagaaaaagaggagatagatatgggatattcaagctacatccatgtactacaagcaattatttctgattcctatccagaattctgtcctaaaagtgttcccacttggtaaatcaggtacatagatatgaagttctcacccccgcattgattgccactgtagcttcctcttcctttcgtaggattctcagcaggaatcccctcttcagcctctcactcacacacccacacacagacacctttcatcataagccctgcttttgcctcaaggagctttcatattgtgtgcgttcagtaaagcaaaaaataattcctcacaaaatcggcattttttattatactttaagttctgagatacatgtgcagaacgtgcaggtttgttacatagatatacatgcgccatggtggtttgctgcacccatcaacccgtcatctacattttaggtatttctcctaatgctatccctcccctaacccccgacaccctgacaggccccagtgtgtgatgttcccctccttgtgtccatgtgtcctcattgttcaactcccacttatgagtgagaacatgcagtgtttggttttctgttcctgtgttagtttgctgagaatggttttcagcttcatccatggtgtatatgtgccacattttctttatccaggctatcattgatgggcatttgggttagttccaagtctttgctatcgtgaatagtgctgcaataaacatatgtgtgcatgtgtctttatagtagaatgatttataatcctttaggtacatacccagtaatgggattgctgggtcaaatggtatttctgattctagatccttgaggaatcgccacactgtcttccacaatggttgaactaatttacactcctgccaacagtgtaaaagtgtctatatttctccgaaaagcaatgacaacaaaagccaaagttgacaaatgggatctaattaaaccaaagaacttctgcacagctaaagaaactatcatcagagtgagcaggcaacctacagaatggaagaaaatttttgcaatctatccatctgacaaagggctaatatctataatctacaagaaacttaaacaaatttatgagaaaaaaacaaccccatcaaaaagtgggcgaaggatatgaacagacacatctcaaaaggacatttatgcggccaacaaacatatgaaaaaaagctcatcatcactggtcattagagaaatgcaaatcaaaagcacaatgagatatcatctcatgccagttagaatggtgatcattaaaaagtcaggaaacaaaatttgcattttattttaccctgttgatgctgtataaatccaggtctcagcaggaaacagatggaacactcaaattaggataattcaagaagagtataataaagggactatttgcaaaggtgtgggtatcgtgtaagaaaagcacagggacattacagcgctgtgggactagtaaatgaagctctgtttatctcccccaggtctgaaaaaggttgggggaggagatagccattgccagagctaccagacttggtggggagacacagccagctgtggatgatttcataggaaagccactggggtagtaatactctgacatctctctcccttagctttcctgtcttctacaagtgcctttcattggcagaagccacacggcaggggagcccattgacagagtccattccagtcagcctctagagtggagggcagggttgacaagagaggagagaggatacggaggggaagtggatgttatccagaagagtccatctctttgtcctctcagtatatgtgcttatctttaagtgaaaagttcctgttcccttcacagaggacacaggaagtctcatcgctatggctctatgttggataattttactttaatcatactgcctcttcaaagcagtggcaggggaataaaggaataatggaaggcatagcacctgcagttcttgattctgaagcataaggtgtctactctcaccatgactccacgttccccttaccttctccagctcctcagctggatgtggctggatggcggtgacccaaaccttcgttctgcagaatctcagtgccacccctgcccccacctttttggatagcttcagtgttatttggttccaagcatggtcctcaatgttgtatcagcaacccagctgctccctggtagttgggcttactctgtaagtccttttctctgtgttagttcagtaggatgatgaatccaaactacctaggggctgtctttgcttccaacttaatggaattgtggctgtgtttcctgatagaagcatttctacattaaacatgaggacttccaaggtcatgtggtcaagctcaaggtcatagagatgagaagcaaaaattctgtaagtggatagttagtgattagggttagagttaggataagaacactgatacctctccttgttcctggtcctgtgcattctggctgaggaggagatacgttatacaaaatactgtttatgtaaaatgctttttgaatgcatatactaaattctgtgggacagcagcccaactttgtagaagttgtctcctctcctagctcccactgtaattgagcctttgctctagacactaacaagacagagaggcctgatacagtaaaggtgtactgttatccgcagtaagcaaatggatcccgattttctttactgatggggctggaggtgggaggtgagggcatgagtacattagtctggtcagtagctacataccaggcaccacactctgtgttgattgctgcaataaaaatatcacttctggagccatagttgtgattggcaatatcacttggttcagtttatgactcttgcttaacggtcttcatgtcttcagaccatcttgtatcagtcaaggttctccagagaaccagaatcagtatattgcccagatgagcattaagcaaactggagacccaggagagccaccagtggtatattttcagttcatgtccaaaggcctgagcagtaggcgagccaatggaataaggtctagcctgagtctgagtccaaaggcaggagaaaactgatgccccagctcaaagacagtcgggtgtagagagttagttcttcattattcagtccctttggtctattcagtgtttcagtgggttaaagaaggcctgtagaggacaaactgctttactcggtctacccattccaatgttagtctcatccagaaaaactctctctctgtctctctctctctcacacacacacacacacacacactcagaatgacgtttaaccaaatatatggacaccccatggcccagtcaggttgacacataaaattaaccagcacacatctgtctgactgttgctgaattaaatgaagataacataggaattatgcctacattctttgagtcctggatagtagcaccaagctctgcaattcctccaggtgtgtggctttgttcttagtttattctacagggaggggcagttttaggagtgtcattttgcactctttcattgccctcatgcaatgaatcagtaaaccaatgtagtgttttgccagttgataaatatatctgcttctactatacaatatggtactggggaaataacatcaggatggatctctggtgccgttggacccactctgagatggactcaggccaagactctgtcacctgtctccacaagcctcccatttgaatggtgtaccacagcaatatttcagagagcaacttaagtctagacccacagctaacctggggaaagcctgagcctttctttcttcagtgcacagtcaccctggaaacagccataggatgctatgtgggaggcttgaagggcgagtcacagcatgcacctgaggcagcattgttgggtccctctcaaagacacccagccactttctctattgagaggctctaggtcagtggaacttggtgagaggctaaaatccttactatggtgactgcattaggtcccagcccacgagagtagaattttgtctcttctatatgccaagtagcaccttagtaggtggtccatctatttttgtttctatttctgagattatttagtcaccaccacagatccctgtggaataagattttgattaccactcatccctgtggtttgtttcatttaccttatttctgatagttaaatgccgccaaccagttggtctcccttactcttgggttcctttatctccattgataacaaagacactgattccatttcagccacccccatcccattttccaggctgcagaagaaagccaccacacccagggcagccaccacaagctttccaagaatactcctcctcccccttgtgggagttgtggttagagaatggctgttgctcatcctaggtccacttcaccactcccatttctgagacttcagatttcttcctctccagcagggatcagctcaggaccagatcataaatattttaggctttgtgagccaagaggcaaaattcaacaggtattcttgccaaaggctgatagttttgtttgtttgtttaacatttaaaaattgtaaaaaccattcttacctttcaggccatacagaaacagacagcaggccagatgtggcccacagtctgtagtttgccaacccccttctccacaggatgccacagaagttcagttgaaccacataaacacagactacccttgagtccaggctttaattgtccaattaggtagattactgatgccactccctggtactcaacctgaaacactgaatcctaaatccggggtgagtatatcccatgagtgaatttaatgagatcaagccttatgttttgtcctcattgatccaatgcctttcgaaactcataccttctctcctggctcctgccaatatagactggtgtgaggttctataaatcttatgaaagatttcttatgtaagggatgtaggctgtctcatatttctccctctgagctgtgcttggacctgagtcttagatcaagaggcagtgagaggtgataggaatgagtcctgagggaatgaccagcaggttattatgcatggaaaagctgttcttcttagacagggaggacaaatctgtccccatgggcaagaagattttgtgggttcgaagttttcatatttgtccgtgtctgcccaaatgatcgcaatccagttatcagggtcacattcccttgatatgagacccctcgtatgagctgatcatgtacttggtgctgcagctctgcaacttttgttaggctctgagctttgtcctcagccatatctgccgtgggactctggaaaatgaggggttgctgcagttataccatctgaatagctacagggactttctgattttttctatgcgtgctctcaattgtacattcagagatttcagtttctcattttccttttgtacaccttctaaggctgtgagaagaagccaagagactcaacagtctttatagtcactgctgtaaccatagcaattaagtgcctctgccactgacctcccagcatctccccttccacctgcatttcatctcctaccactgctagagacaacttgaataactgatgtcaccacttgtcctggattatttgttttctgttttttcctggcaaagtggttctacctgtgtttctcaacaacatgatcaatctaatcctggaatcccacttcaggatctcaatagaaaacagaatgctcaaattgggatagttgaggaaaaattcatgaagggttatagaggcctaacccagtgatgatgaggagcagttactgggacttggagacaggcataactgtggaaagggttgctggaaagaagctgggatcctaagttaagcaacacagtcatcacttttgacattttcctctaatattttgtgcagttatgcagcaaattgtatttcaaaggtaaaccttatttaaaaccccatagcatcatatgactcctatttttaaaagtctgcaaaataattacatccctttctttagttatccttatcatattctacagctgatggaattcagttaagcagcattggttgtctattcaaaactaaattaatatagtgaggatttattttaagttttcattatttttttttacatcatagcccttgaaacatgacagtttgtcattccatgtatttgcaggatttttttttaagaaaaccatcctgattctctattttcttactttcaaataccatcacagtataatttattttaatcccttatcctgtgggtcacttttatctgatgattgctttcatttaaattttaattggggtttgaaaactctttttatggactggaggacaataagtaaacttttgtagtatggcagggtgatctatagtccaggaaatcaatatctaggcttctatatgcaggagctgttcaaggcaggaactattttcttatttatttttgaagtcacattagagttccaaatgtataattatacaggattccataagttaatagtataggcttattggttttaaagaagtcttcttcttcacagtgatattttttcaggtattattgagatgtgtccttatttatctggagaatagatatacttattctctgccttcatttcgttattgctacctagtggtaggagatgacaaaaaacctcatctaataggtgtcacttatacctcttaacatcactatttccaaatattaattgttccttggaaatccttttactagggctgttcttgatggtctgtctgcattcatcactttgtgattactgagttttcatatcaccttaaatctttgatgagctgttcctcaaagaaagaaggtcatttatcatgtctgttttactgaaagaaggacaagatgagacaaagaggtattacataattcagtgtgcctatgaagctttctaggccgtattccaaaatagatagcagtttcttcaatcaaactctgtataagataaatgagatattgtttggtaagaaccccccaccccactttgtgccaaacttgttggcaccctgcagtttacagcatgaaagtcagcttctctgcacagtgatttttaagactgctaaaggcaatcagctgttcttagagctgtgccccaatgcactttatatgcccttctgttatagcactgagcacctggtggtttgtaaccttttacaagtctttttccttctgtagactgaatgccctgacagcaaggactgttaattattcaccattctgcatacactctgattgggtggcttacaaacaacagaaatttatctcttgcagttttggaggctgggaggtccaatatccaagcactgacagatttggtgtctggtgagggccagcttcctggttcatacatagccatcttctcactgcattctcacatggtgcaaaggatgagggagctctctggagtctcttttataagagcactaattccattcttggtttggggtgggggctctgcactcatgacctaatcacctcccaaaggtcctacctcctaatgtcatcacattgaggattaaactttcaacatatgaattttggagggtcataaacatttagtttataaaaaagggctgcttggtgtatcatggccactgaataaattttgagtagcaatcttacctggtatgccattgcatttatatatgattgccactaataactcaaattactgaatttatgttgtatcgatgatgctgttttcctagtcttagtattagtagccaaatggccttggattaactttctcaatattattcattcattcattcattcaacatttattgaataccttactaaatggcaagctctgaattaagctttgagaatccaagaagactaagactttgttcccacctttcccttcagcttccctttcctaagatagacataataaaacaattgcatcacaacatgatggatcctgtcatagtcagagtggaaatagaaggagattgagtgggacaggggagttgaaagatgcccagcagcccccagggagagtgaaaacgtgatctcaagatcagctttattttctgaccaattctcatataccaagtgtggtcaggaacatatatttatgtgtctaggtagccagttgcatttcattttatgaagctaagtgattatgatgattagctatgggattaacatacgttttcagctaagcaagtcattaaaaacaaatgcaagtacaattatctcctcctttagcttcagtaaattaacatgttatagtaagaaccttgttcatttgtatgatgctaggaaaaagccacacaaatgacctgctttttactttatatttcggcagctataattttgtaaaaatgggacatgttggccatctgaaaagcacttagttgtataacttctacaagtcattgaaagtaattatcacatcataatccaatgttttcctgaggttcccatgggaagtaaagtatattctatcctgatgtggtttggatgtatgtccctgtccaaatctcatgtagaattgtaatcccagtgttggaggaggggcctagtgggaggtgatttgatcatgggggcggatttcctccttgctgttcttgtgatagtgagttctcacaagatctggttgtttaaaagtgtgcagcacctccctcttgtctttcttcctccttctttggccacataagaccatgcctgcttcccttttgccttctgccatggttttaagtttcttgaggcctccccagccatgcttcctgtacaacctgtggaattgtgagtcaattaaaccttttttctttataaagtacctagtctcagttagttctttatagcaatgtgagaatagactaatacagcaaattggtactgggagtgggcatttctgcaaagatacctgaaaatgtggaagtgcctttggaactgggtaatgggcagaagttgaaagagtatggagggctcagaggaagacaactgggggaaagtttggaatttcctagaaacttgttaagttgttgtaaccaaaatgctgatagcaatatggtcaatgaggtccaggctggggaggtctcagatggaaatgagtaacttattgggaactggagcaaaggtcacttttgttatacactaggaaagaggttggaggtatcatgcccctgccctagagatctgtggaactttgaatttaagagtggtgatttagggtttctggttaaagaaatgtctaagcagcaaaacattgaagatgtggtgtggctgcttctagcagcccatatttatatttgtgagccaagaaatgacctggtactggaacttatatttaaaagggaagtagagtgtaaaaattttgaaaatatgccagcccagctatgtggtagagaagaaaaatccattttctggggaagaattcaagctggctgcagaaatttgcataagtgaaaaggagctgaatgttaatagccaagacaatggggaaaatgcctcaaaggcatttcagagcagctcctcccatcatagggtcagaggcctaggagggaagagtggttttgcggactgggcccagggccccgctgacctgcgctacctcaggacactgctccctgtgtcctagctgctccagctccagctgtggctaaaagggccctagatacatcttaggccactgctacggaaggtgccagccataagcgttggtagcttccacatggtgttaagccttcttgtgcacagagggcaagagttgaggcttgggaacctctgcctagatttcagaggatgtatggaaatggctggatgtccagccagcagtctgctgcaggggtggagtcctcatggagaacctctactagggcagtgtggagggaaaatgtgaggttggagtcccccacacagagtccttcactggggcactgccttgtggagctgtgagaagagggccactgtcctctggaacccagaatggtagatccactggcaacttgtaccatgtgcctggaaaagctgcaggcaatctataccaatccttggtagcagccatgggagctgatccctgtatagccacaggggcagagctgcctaaggccttgggagcctagcccttgcatcaggtggccaggatatgagacatgaagtcaaaggagattattttggagttttaagtttttttattttttatttttatttttttgagacagagtctcactctgctgcccaggctggaatgcagtggcatgatcttggctcactgcaacctctacctcctgggttcaagtgatgctcctgcctcaacctcccaagtagatggaattacaggtatgcaccaacctgcctggctaattttcatatttttagtagagacagggttttgccatgttggtcaggctggtctcaaactcctggcctcaagtcatctgcccgcctcagcctcccaaagttctgggattccatgcgtgagccaccacacccagccaggagttttaagctgccctgcttggttttgaacttgtatgggtcctgtagccccttagttttggctgatttctccttttgattgggtgtatttccccaatgcctgtaccctcattgtatcttgaaagtaactaacttgtttttgattttacaggctcctaggcagaagggacttgccttgtctcagatgagactttggaccatggagttttgaattaatgatgaaatgagtcaaggctttgaggaactgttgagaagggatgattgtattttgcaatgtgagaaggacatgagatttgggaggggccagaggtggaatatgtggtttgggttttgtgcctgcccacctcatgtcgaattgtaatcctcagtgttggaggagggacctggtgggaggtgactggatcatggcggtggattttccccttactgttcttgtgatagtgagtgagttctcgtgagatctggttgtttaaaagtgaaacccggggtacaccatccagacaggaagccatgaagagaaagggtaggtgatttcacgcaggaatgttctatgagccagggcagcatacatcacttctgaccagaactcagacacgtactacaagggagcctagaaatgtcgtctagctgtgtgtccagaggaaaagaaggaactgggtttggtgaataactaaccacaatgatgataaacttttaaaaattaatcacattatctataactgcccctaaactgcttcaaaattttcacaacagcctcattcacccaatttcctattgacaaatatttattgttctcctgtaatgtgtcagagacattgagccagagtggagacagtagacgtggtaaaaagttgatcagattactgatatattttaaaggtaaagtcaataggatttgctgatggactgaatctgggatataagagcaacagaggattcaagaatgactttcagattttgggcatgagcaactgggaggataaaggatgccatttattgaaatcagagcactgaggtagagaggtcattttgtgggttggggggtggggataacttaacagtttgctctggccatgtcaagtttgaaatacctcttagacatcctagtggagatgccaaagagtcagttgaataaacaaatcttaatttttaaacaaagtacaaccagagccagcttcatgagtgggcaacccatgcagtcccacagggctctcctacatggaaaggtcccatacttgatgtaatggtttactgttgcagtcttgaaatttttaataaattacttagtaagtgctccgtatttttatttttcgccaggccctacaaattatgtagcttgtcctgggaggaattctttttgaggcagtggaaacttgtaagtgtggggttctgaaggcaaggaaaagaaaaccttttgagaagaaagagattgtgagagatcaaggaatataaagaccaaaaaaaaaaaaaaaaaacagtgggaattatcaagatggaattgctagtgatgtcgacaagagccatgtccaagggtggagtgggggaggataaaaatcctgttggaatgagctgaaaagaggagagctgcctatggccacagtttccccctgcagggagcagggaaatgggatgatagctggaaggttgtgctgagtcaaagcatgtttttgaaaaatgagagaaattaaaaatgtttgtctgctgatgtgagggattcaggagagagggagaaactgatgatgcagtggagaaagggaagaattacagggaaagtacgtaagtcaaggacaatggaggacatgtggaggagctggctgtaagaatagtcatgtgattccatttcaaaagcagagaaggcagatttctcaagaccatgtattgaagagactatcctttctccacatatgttcttggaacctttgttggaaatcagttgaccataaatgcatgggtttatcactggattttctattcccttccattggttgatgtgcctgtttttatgccagtaccatactattttgattactttagctatgtaatatgttttgaaatcaaataatgtgatgcttctagctttgttctttttgcgcaagattgccttggttgttcgggatctaaaaaagtaagaaattttgtcatttgtgacaaaatggatgaacctggaggatattatgctaaatgaaataagccaggtactgaaagacaaatactgcatgatctcacttatatgtggaatattaaaaaataaaactcatagaagcagagagtagaatgatgattgccaggggctgagggtaggggacggataaaggagagctgttgttcaacgggcacaaagttttggtgagacaggaaggctaagttctggagatctattgtacagcatgatgactatagttaataataatatatggtatatttgaaaattgccaagagattagattttaaatgttataatcacaaaaaaagataagtgtatgaggtgctggatatactaattagcttgatttaatcattctataatatatgatattatatatatatatcaaatcatcacattttatagcataaatatatataatttttattttccaaatataccttaatttttaagaaacagagaaagcagagtctatgggttccagaaggttggcaatttggggttggttctagaccacgtgcttttttttttttcttaatggaatatgaggtgaggtcagcagctgaggtggtgggaggagtcatgagtttggtaagagtaacttcagagaactgaaaggttaatttactagaagatggtaagattgctgggcaatcctgtgctgagttgccatttgagattttgtgaatatccatttgctgtcaacatcgtcgagtgatgtttttttctccagcatctttcagctgctcaggtgcaagtacagagtagagggatagttgagtttagacatgattggttctgttatggctcttattttacagatgaagggactagggttcagagaagaaagtaacttgctagtaatggacagagtttgcacataaatcttctctgaccctcgactccaggctcttaagcagtatgtcatatttcagagctgttcttaatatcatggaataaaaagtgtagattctgcaaacttctatcccttcccctagtggcgagcaggtgaataagcaatactgtaatttgtatctcaactttttttttcctactagcattatctaaaaagggtatctcagctagttaccaaatcccagccttgggaatcacaaagcaatattgtgcattgaagatatgctcatgggatagaaaaagtatcactgagtttgatcaccatctctcctgcctgctggccatgtgacttgcagcatggttgtaagaatctgttcagcattaactgagcacctatggtatgccaagcagtaaggaagatactgagaagatattgatgaaactgaattttgtcctcctaagaattatagtccagggaattcagtgagatagtatatgcacaatgttgtgtccaacacagggtgggcacttaataggtgttaattctctttgccttctctatccatttgtcctcaagtacctgatgacacctcttggtgaaaatatcaacactcactgagatactaaatgagggccccactcatgtgtaaatatccaatgatgttaatatttaaaaattagttcccatccactgaatcagaatctcagcaactttgagtgaaggcaggacccttaactgagttgagtcttcctctacccataaaaatatactgtatataactttttcctgaagctattggaatgaatacaagttagcatgattgtctactggcaatactagaataatctccctaaggcgtgctgttttctggctggaagttattttattctgttgaaatgtatttttttaaatgaaaggggcatttccttttcctatattatttgctttcaaaaagcgaagagaattctttaaacatggcaaattaaccactggtgaatcttaaattttaccttctcaatgatgcatgttctgattcaccagtcaatatttatttctaagccttcagatctcaaaaaggtctatatggtacctgagttagtgcatctcaagtaaccaacccctgggaaggtgttttatttctgtaacacaaatgaggcaggattttatgcccctggaggggagatgtttgtcttttatctctatattggggtacctaatacaggaaagagtgttaaatgaataaaggaatggacccacagtggggaaaaggagcttgcttgatatcagtgtgtttgaatttattaccatgaatctcactttctaaaattgctagcactattaaagtttctgacagtgaagcaagccattggaacatgtttgtggtgtgaatattaggtgtattattatgcactcaatttagcttttttattttatataatttctctccaagtggaaatcatgttctaggtaaaggaacaagaaattaagcagtgtggaggttagattcaacttccactaatggagaagatgactttggataactattggctccagtttcatttggggattagggattggattagaatttgtaaatctaattgttgtttctctgtaaaattgggagaccctcagggttgagagcagatcttcctcttttgcatctatttcagcacctagcccagtgcattgtaaatgcttaataaatactagatgaattaaaagtgaagtattctatttattctttagagaaagatacacagacgtttttgccaaccagcagaaatgaaggcagcaaccacttctagtttatcttgtattcctagcatcaggcaaaatgatagggacatggtaggcatccaacaactgttaattggctcctccaatcacccttttttgtcatccttccacaggaatttattgaatgccttctaagtgtcagaaacttggtttatattaatgaaagaacacattccagaggagtagttttatttgtataggcaattacaaagtaatgggatacaggttataatagaagtatgtaaaatttcactgaagttcacagggaggagaacctcatctgctcgggagttggggaagacactccaggatgatgagggttgagctattgaaagaggaatgggatttgttaaagtggaccagggtttgagggtattagaacacactccagttagagaagatggcacacacatgttcttggagctgtgatatagcacagtacacattgtaggggtagtttagcatggctataggaagaagtgggtaacataggggaaggaggtatggacagaattgagaaacagggatgattctgggaggttattagaggtcagagtttgaagaacatctcaaaacaggaaatactgactggtatctgagcttctctagaaggctgaagttaaattctataggtcatgtctcagtaatagcagtggtagtaatagcaatggctaatatttattgagcatttgttagagacaggtgcctttctaagcatttcatcttcttaataacttataaggtagatattgtctttatcctcatttgacagatgaggagattgaagcgtagaggtgcctcattcaaggtcaccgagcaagtccagactttaactcagagggtctggctgcagaatctgttcttaatcactatattatattacaacgcagaaaatatagtgttgtaatgctccaaagttaatttatacaataatacaatcacaaggattagaacttcattctcactttaaatccaaacagcagcatgaatcactgcttctgcctttcatatgttttttaatggcttgatcattgtcttcctgatgatttgattatgtgaggagggcaagttaaggtcactgccactaggtgctcactgttgttgcccatatgcaagacctcagtaaaagatgtctatatggcgaatgtaacttttagccaggtctttgcgctatgagagtatttagtctgtctgatctttgaagatatctatgcatggaccattggctctaaaatccccctctttgtatccccacaacaatgcatattttcatctagtgtactcttaaaaggggccagattttgtgaacatagatgcctgtccttcagagtttatttatagaatatgctccaagctcaattcccacctatgagtgagaacatgcggtgtttggttttttgtccttgcgatagtttgctgagtatgatggtttccagtttcatccatgtccctacatggacacaggaaggggaacatcacacaccagggactgttttggggtggggggaggcgggagggatagcattaggagatatacctaatgctaaatgacgagttaatgggtacagcacaccaacatggcacatgtatacatatgtaacaaacctgcacgttgtgcacatgtaccctaaaacttaaagtataataataataaaataaaataaaaaaagaagaaaggcaggaagaaatggaagaagaaaaaaacccattcctttatattataatacaaatgcatattcatattctgaattttaacattaacattataataaaactgtttttatctttaggaaaaaaaaaaaaaagaatatgctccaagcatttgcttctcaaattctccactattggataacaaataagccataatgtaacaggattttcatttaggtttttccattaagccttagccatggattgtgatggtatctggttgaggccagatctgagtttagtttttactctgctgccgaaattgttgtgtgatcttgagccagtcattgcactgttctcaacctcagtttcctcatctggaaaatgagggtgttggagcagacgatcagtgagctttctcccaactcttaacattctctacttgtagagtttttataatcaaacacaattatgtaaaagagagaaaagcagttgtcatggaaactgttatttaatacataacactgtttcttaatcagcctgttttccttgaagaaatttgcttctcttgtgatacaggcccaaaggtctcctaattctgcctttagaaaggctcagatttcagttccatcacttaagaattcaatgcatggaaccagttacttaaccaccctgtgcctaaattgctttattctaaaagtggtattgacaagaatactgacctcatagtgtggagcatcaggcctgatgcacaacaacaaaaatgttaatgataataataccaatacagataatattaaaaatatctaatgtttattgagttacttattgctactctgtgctaggcattagtaaatgtattaactcatggaatcttcaaaccaaccctgtggggtaaatgttactattaatctcataattagatcaagttacgtacttgtcccaagtcacacaacttgaacggggtggaaccagaatacttgtcgagctacataggccaatttcagagcctacactctgaaccattaacgtttctcaataataacactgttaatacataattgtgaataaccagcatcttttatggcctttgctatatgcccaaatctgttctatcctatgaggtagatgatatcatcatctctatttcgtagataagaaaactgagacctctagaggttaattaaaaacacatagttggtagtagtggaggcaggacttgaactcttgcagtctggctcctgagttcatatttttaacgatgatatctcagtatgagctattattaccctacatccagttcagttttgtgtccatgaatgatgtaagatgattatagctccacccactagatgatgtgagcctttggcagtcttctggaactctgttttttttgtttgttttttgtttttttgtttgtttgtttttgagacagagtctctctctgttccccaggctggagtgcagtggcatgatcttggctctctgcaacctctgcctcccgggttcaagcagttctcccttcctcagcctcctgagtagctaggattataggcacccgccactgtgcctggctaagttttgtattttttagtagagacgaggtttctccatgttggccaggctggtcttgaactcctgacctcaggtgatctgtccgtcttggcctcccaaattgctgggattacaggtgtgagccaccgcacccagctggagctctgtttatgctctttgttgattccctattgtgctcctaactaccacaatcgtttatggaaaagccaagctgcgacacaagtatcttgccatgtcttataaaataaaacaagaggagataagtacaaaagtctatgaatttcaggccagtaagctctaaaatttcaaacagcaaatacagtccgtaaaacatttgagagagagtttacttcagtagctccaattatctgagcaatgttttccaaataccttagcacctattgatctaagagtgaagtaggagaacttctttaaagatcagatagtaaatattttcagccttaagggccataaggtctctgtcatgactgtttaactctgttaaagtgcaaaagcagccatagatgatagtaaacaaatgtatctgtgtttcaataaaactttatttacaaaaacagatggtaggccagatggcccagaagccattgcttactgacctctaatctaagagagagatagcctactgataaagtatttaatgccaatgggttttgggataagtggcctcttgtacgtgcataaaagcaatagtaatgacatgtttattttttccttccctcctcatttttaatgagtcctgatcttgctgttccacatttactaaattaggtactggcaaaatgtgatagtgtaggcttacactattcacattactatctgctacttgactcaatatattgaaatttgactttaaggacagactttcagcagtaggaagcaatgttgacaaaacaacttttaaaaaagatcatatagaatgaaaacgtggatatgtgccttgttttgagctatctcaaatccttttgctaaataagtagggggtaaattattttaaatggggaaaatggaacacaatttttaaatattttaaggcatttcaaatgggccttaaaatacaacggttgtcctctggagggattttcattaattattaaccatatcagaaatgtaattaagtcagtgctgaaattagtcaagatcagctttataactcaaatcacataaataacatatatgggttctatgaattaatcattgtagatttgattaaaaagttccatttcaaagttcatgcaatttaatgtcatgttgtttctgtttttcaaacatttgttaaaccaactgtctatagaggcacattatatggctaaagatctaattgcaccattgttagcatagaactgtagtcagtaaataattagtggcttgcattgtgaagttttgataaatttttaggcttctctgaattaacatttgtcttatggtcagttaaggaaattaaatatcgattaaggaaattcagacagggcagcttcacagtctccctcctccacagggccccccatgaccactgccttggaggctgtgctgactttggggaaggcctatcagtggctgtgacctgggttaagctgatggaccaggggcatttttgagaatattgattagattaaggagaggtggggacctgtattagttttttattgcttctgtaacaaattaccacacactcagtgccttaaaatgtcaccaatttatcttacatttctgtgagttagatgtctggtgcaggtctcactgggccaaaatcaaagtattagctgggctgtgttccttctgtctttctggagactctaggggagaatctgttttatggcctttgttttttgggatggaatctcgctctatcacccaggctggagtgcagtggtgcgatctcagctcactgtaatctctgcctcccgcattcaagcgattctcccgcctcagccccccgagtagctgggattacaggcatgcgcaaccatgcccagctatttttagtatttgtagtagaggtggggtttcaccatgttgtccaggctggtcttgaactcctgacctcaggtgatccgcccgccttggcctcccagaatactgggattacaggcatgagccaccatacccagcctcggtgccttttccagctcctagggctgccacatccctagactcatggtccctctttcatgtttgaagccagcaacataatgtctctctgatccaagccaccaaaggttctctgtttttgaggtcttatgtgattagattgccccccttccttttggatatcccaggataacccctccatttcaaagtccttaaatctgcaaagtccctgttagtcccatgtaaggtgacatattcacaggttccagagatgaagagttgggcattttagcagagccatcattctgtctaccacacaaccgacattcagtgtattggattcactgtcggcgcttcctctgtttaccagcccatcttcttatgtttcagcttcttgtgtcctgacacccatttttgtctcagtccactttaaaccttgttcttctcagttctcaatttctctgaccttcctttagcatgcagtccagtggaccttcttctgctgagagcagtattgctggccaggctgtctgggttcaaagctaggctgtgcctcataaacatgacctttggtaagttatgcaatatctctgtaactcagttttctcatctgtaaaaggaggataaagaatgtgcctggactacatatgattgatgtggtgattacatgcattaatatattcatcactcttagaacaatgcctgagacatagtaaaccatcaatacatgctaaccattgttgctgtgaatttggttactctccttttgggtgctggtagaaattccctcaagattttatctgtgatttcttgtattttcttcggaagttgcagcttctctcaaagctttagcattcatccctaggcaaagaactccagctggacgcatttccaagctctatacctttatttctggcagtactaggtgaacatttttgtttggatgtcccaggggagccacaaagctgaacttaacatcttgcctaccgaaatattccatccgtgttcttatttctattactgtctttagatccgaagtcaatttttattctttccctctcatttaccactaaacatcaaaaaagttatcaaatactaaagactctactttcaaactatcttttaatctatttgtgtccccacttccactgctctgatccaggcttctatgaccgttaccctgatttgttgccccagttgaagtagaacagtattcttaaacctttgctctgattatgcaacccccacccccagacccgcccctcccttccaccttgctccagcatcttaagtgattccccgctgtcttagcatggagactacatccagtgtagcatataagtgagttttcttcaggaattccctaaaaatttaaaaatttcatacaaaagtatgttgtgaagatcgttgctttcagtctcaacaaccagtcactgctcacgcatcttaaacatgcttgaaacaggacatcttttcctttcatgaatgagccttgttctttcatacctgaaccttcaccatggggggcgtgctcttctcctccatctctgcctatgagaaatctacccagcaatgaggcttagtgacaatacccaccactctctttgtgaagccttccctggtagcctttccctgaaccgtgtaagtcagaggtcagcaaactacagcccacaggccaaatccagcctattgcttagttttataagttttattagaactcagtcacactcattcgtttatgtattgtctgtggctgcttttgggtctacagtagcagagttgagtagctgcaacagagaccatatggcccacaaagcccaaaataaattatgctctggctctttacagaaaaaaacatgctgacccctttctcccctcagagattacatagtctaccttgtgcatctttgacatctccttctgttagagtcacttctgcacaacttttttcctggcaagaacgatctcctcttgtagacatagattctgcctttttcatccttgtttctatccttgggcctagcaggggtagggctcagtagttgttggggacaatagattgcctgtaaaaaaattttttaaactacattttgctcacttggctaagtgacaaaaatcttatataaagcagtgttccctttagggggttagtgcttatcatttgatgtttctggtagtaaaccatttcatgtttcacttcgagaagcgcttttttgactgccaagataagctgcaaaattgagtccaaggatcttaagaaataatattcctaagccatttaagcagctcacttggtgatctcatttaataagtggtccactgaaatttaggattgcagagtatactttttcattatgcatgggtttcaccatgtgaggtagatatctagttcctactcagctatttttgttgactgcctagggtatgataatatttgaccatgctactctcttatgaaaaatgccaaatagttaaatttgttttaggaaaaccagagattcctctcttgctcctaaaggagaaaccaaatgaccctgggtttctttcttttttttttttctttctaaaacccaagaagtattgatgtcatgtcctcctgcgaagtgcattagctgtccttgcctttgctgctttagtactggggaatgcctctgtcagacagtgagctcatgagtgcaaggactctgtcttttaatttctgaatcctcagtgtttggcacagagaaagctcttgacaaatatttattaaatgaataagtcaataaataattgaagatctcagaaagaaccttttccccaaggtattacttttaaactataaacttacaattgcctacttctatctagttcacatccttaaatatcacttgggagaatttcctgttgtgatgatatagagtttatgtctagctgtgggaggtcaagggtgggctacgttgtgcctaagtccacagaacacaaggaaaacccttaaacttttgtgaggtgaccggaaataaatatctgcttcctaagtatttccctgagtgagaatgtaaaggtttaagataaattaagtatcacagggtgagacaaagtgagaaattcaggatttagattggcattcagagcagggagggaaaaaaagatgacccaaattgacacaaaatgagaaaatcttgggaaataaaagtaaacggtagcaaatgtgatgtatttgagaaccttacaaggaggttttcagtatgttccagttgatttataggatgtagaaacattaagtgttaaaatggaaaggggtggattttcaagactctcacagtgagggttcagttaggaatcagaattccaacaaacaaacagattttaataaagatgttacaaaggagaggctgggttatggaaattgacaagagatggtgaagcacccagggtctagcaagggtgaggagcctttataaaacatgcctcaagaggcaagggcaatattggagccgcgcaagagcaggagccctgggaaaggggctacccaataggagtagaccttgcagagggctttccaaatggctagggccctcacaagtattcacacaggaagggagcagggaagaagtaactcagcctgtttttcctcccaacctttagctccttcttgtgcctccattggctgaggccaactggaggcctgtgagggagcccaggtgatgaaggagtcaccttcccaggacacagaacaggtggagaatggatttgaagtaggtggaggcccacaaaacgtcaccagcacagggaccatctccagcctttcagtttacaaatgaggaaaacgaggcccagactgggggaaatgaacaccttggaaattcatccctttcagccttaacacttaatgttcttttttttctttttataggtagtctcttatttttattattattattattatacttcaagttttagggtacatgtgcacaatgtgcaggtttgttacatatgtatgcatgtgccatgctgctgtgctgcacccattaactcgtcatttagcattaggtatatctcctaatgctatccctcccccctccccccaccccacaacagtccccagagtgtgatgttccccttcctgtgtccatgtgttctcattgttcaattctcatctatgagtgagaacatgtggtgtttggttttttgtccttgcgatagtttactgagaatgatgatttccgatttcatccatgtccctacaaaggacatgatctcatcattttttatggctgcatagtattccatggtgtatatgtgccacattttcttaatccagtatatcattgtcggacatttaggttggttccaagtctttgctattgtgaatagtgccgcagtaaacatatgtgtgcatgtgtctttatagcagcatgatttatagtcctttgggtatatacccagtaatgggatggctgggtcaagtggtatttctagttctagatccctgaggaatcgccacactgacttccacaatggttgaactagtttactactcatctgacaaagggctaatatccagaatctacaatgaactcaaacaaatttacaagaaaaaaacaaccccctcgaatagtggacaaaggatatgagcagacacttctcaaaagaagacatttatgcagccaacagacacatgaaaaaatgctcatcatcactggccatcagagaaatgcaaatcaaaaccacaatgagataccatctcacaccagttagaatggcaatcattaaaaagtcaggaaacaacaggtgctggagaggatgtggagaaataggaacacttttacactgttggtgggatgtaaactagttcaacacttaatgttctatatcctcataaatcagtgttcaaatgagaaagacaataaggactgactgaataaataaatggaagaataaattaatttgaagaataaatgaatttttcatatcataaatccatttttcaccaacatgtttgctaggtggcattctaacctatcagtggaccataatatatttaactattgccctattaacagttatttttctagtttctaatattactataatcataattattatagttatgtcagtattaattataattatgatactaagtactatttattgagtatgtcaggcaccatgctgtgtgaaaacatatactttttttagcccttattatgaatatttgaagtatgaatttaaactcccattttgtaaaagaggaaattgaagctcacgtagtaactcaatcataactcatcagaagttccacagctactacaagatagacccagaatatgcacgaatatccattcaacacaaaagtccatctctctattgcttccctatttaataaaaattttgaatggaacattttcttacgtaactgttagtatgtcttatcattttcttgagataacttcctagaagtagaattcttgggtccaaagagatgatcctatttttaagtagtaagaaataacatttagttgcaatttgaaacatattaaatatctgtgagagaaaccttatatgggtatgaaatttttagttttgtcaaatgatctgattgcgaatggtgagatagccatgtctgagagcccccattttcttatgttaccagcagtgaagagcatcttttttaatagcctgtattttttagagcagttttaggttcacagcaaaattgactgcaaaatacagacattccttgtgtatctcctgcccctacatgtgcatagcctcctctattatgaccttcccacaccagagtggtacaattattacaattgatgaacctacattgacacatcatcacccagagtccatagtgtgtattagcgttcactgttggtgttgtacattctgtgggttttgacaaatttattacaatatgtatgcaccattatagcattaaacagagtagttttattgccctaaaaatcccttgtgctctgcctatttctccctcctttcttctttcctcgtggcaaccactgatctttttactgtctccatagttttgccttttctagaatgccatgtagttggaactatgtaatatgtagccttttcagactggcttctttcacttagtaatggttcttgaacatttaaggtaagtaaatggacagttaaggttcccacatgtcttttcatggcttgacagtttgttttgttttaatgcttaataatattccattgtctgaatgtatcacagtttatttgtcagtttacctactgaaggacatcttggttgtttccaagttttggcaattatgaataaaactgctgtaaacattcatgcgcaggtttctgtgggaacataagttttcatctcacttgggtaaataccaaggtgcatgattgctggattgtatggtgagagtaagttgagttttgtgagaaactgccaaactgtcttccaaagtggccataccattttgtatttccaccagcagtgaatgaaggttcctgtcgcactgtattcttgccatcatttgatgttgttggtgtttttgactttcactattctaatagatgtggagtggtatctcgttgttttaatttgcaattaattacccaatgacatctacattattttttaagatttatttttattttaatattttatttatgtacttattttcaattaacaaataaaaattgtatatgtttatcatttataacataaagttttgaaatgtgtatacattgtgggatagctaaatcaatgcaattaatacatatgttatatcacatacttgtcaatttttatggtgagaatgcttaaaattactctgttagtgatttttaagaatacaatacattattattaagtatacccactattttgtataatagatccccagaacttatttctcctgtctaaatgaaattttgtatcctttgaccaacatctccacaactgagctccaccccccagcttttggtaaccgccattctactctctggtacttatgagttcaaaattccacaaataactgagatcatgtggagtttgtcttcctgtgcctggcttattttacttaatgtcctccaggttcatccatattattgcaaatgacaggattttccttgtttttctttttaaggttgaatagaatgtctttgaatatatccaccacacattttctctgtcaatttttccattgatagatacttagattccatattatggctgtgttttggctattgtgtctaaagttgcagtgaccacaggagtactgatagctgttggacgtactactttcatctcctttggctatatactacaacatttaaagagttttaaatcactctttatgaattaaaaaaaatctcaggttgttttcactgtagatgggctagtagggttgaggaaaggagagtgggaaggctaagctattcaaggttgtcttcaatgaccactttcccttactcaccccctcttccaaggtcttagctaatctcccagggactgaacactctccagacaaaatcaacgtaacagaagtctggcatttgagaatatttgagtttagttacctgtagtcttccttaggtatccctagaaagattagttcctggataaccacctccctcccttccccagataccaaaatgttcaagtcccttacatgaaatagcaaagtatttacatattacctatgtgcatccttccatatactttaaataatctctagattacttataatacccagtacaatgtaaatgatatgtaaatagttgttatactgtattttaaaatttattttcctttattattgttttaattgtagtttttttttttctgaatattttctatccgaggttggtttattccacagacatgggaactgcagataaggagggccgtctgtactttgtttgatacctgtcctgccggctccctgccacccccggcaccctccgtttctttctagaactatttacattaatgtctactgtgagctaggcattgtgataggcatgaaataagacacagtcctggccccacattcaggggacatatatatagacaatcacagtgcagttgggtaggtcttggtgtagttatgtaccaggtgctaacagagtgcaggggagggacatgtgagctgagggttctggggatgcttggtagagttaggggttgggaataatggggtttcttcagaagggtggtgaatgagctgatcttaggagaatatattggattagggctatgaaagagagcatttcaggcaagaaggaggatttttttttttttcatgaactcactacttaggaccaaactgtgagcaccagcactgtttcattttcaccttatggagaccattattggaggtgtgttcatcaagttttttctatgaaccaacaaacccaaatctcagtggttcacacccagaaacatttgtctttttgttcagagttttttcaggcagctgttgtttgcctgatattggctggtttaagtaaggcttggtccaggttgcagatcaggtttgagtttgttcttagtgtctccttctgggacccatggctagtcgggacatgtgctttttatgataatagcagaagcaaaagagaccaagcctaaaccacacaagcacatttctgctttcatctgtttgctaacatccctttgactaaagcaagtcatgatggccaagtccaaaaccaatggagcagggaatataccttctctctctattgggaagtactaacaagtcacatggcagagagaagttatgaattacgaatcaggggcaataatctactctgccactgtggtttcctgaaatgaagtcctgatagaatttggtcgcagggggattaaaagggagattctcactcagcctcagcaacaggaaagaaagaagttacaaaaagcctgtaaagaatctaaaggaggatttgaaggagagaaagcaccaataatctaactgcagcactttatttgaatttaagtaacgctggtcaaacattcttacaggctcttaccctttctgatctataaattcttcatgtagatattgagccaaaggttagatctagaaaatattatatctagtccttagcatgttggtttcttttcaatgcgcttaaacgctcagttaacgtggctttagacataattgtaacagaattacaaaggacagcaccttggcagaaagttcttcctggttttgatgtgttgctactgccagatttttgtgacatgctgatgctaatctgtcaaatagcctgacactaagtgagaagagaaataaaaggaggcatgacagggccaaggacctggtgtggtggaggatggttgggcagtagcaaatcctctcatcagccctactgagactaagcaacaacctatcttcaggtctctgggttcggtggttggggggagcgggggcggtcctacgtgggttagaactcatactactctcagaaatgcacctactttcagttacccaccaattctgatgctcaaagcccctccaaacctgttttctgtgggtccacctgagctcgcttaactaagatagcacaaattctgccccctcttatgggaacatacctaagctaatgacacatgaggtgctacctcttccgcatgtatacctacgtgtttgagctttttcctcccttggatgtgggagggtatcagtctattttataaacattttgtcaagtgtcctttgagtcaaataagagaggatattagaaaagctccagaaaactttgggaggccgaggcgggcggatcacgaggtcaggagattgagaccatcccggctaaaacggtgaaaccccgtctctactaaaaatacaaaaaattagccgggcgtggtggcgggcgcctgtagtcccagctacttgggaggctgaggcaggagaatggcgtgaacccgggaggcggagcttgcagtgagccgagatcccgccactgcactccagcctgggcgacagagcgagactccatctcaaaaaaaaaaaaaaaagaaaaagaaaagctccagaaagtttggaaaagtaaattcagacctgagagtaaccaagagagttcccaccttccttctggtcaatgttccaggaaggcgaagcactggatttaccctccactttgcagttaaagaggaaactcgaaataaatattcccttctacaggtttttttttttaattaagaatagatgagtcttatgttttgtgtgtggtggtgacattcaaaacatagtttttcagtgttttgaaaagtaatttacctaagaaatgacaagaagagtaatgcaacacatagacagcattgctgtgagttgtaaaacattgacagaacgacaaatgttcctgtggcatagagtccttctgaatcacagaaatgacatttggatgaaagcaaatcatttttacataggcacactgctaactgtgcagtgaagccagaaatagcacaccttggaagtgggccagagagaaagaacacctaagaattttatgttattcagaaaaattttcactttttcggtaggatttttgaggagtaaagaaaatatttgagagccttaaagaaaatctgagctttgttttttttttttttttgagacagagttttgctctttgttgcccaggctggagtgcagtggtgctatctcagctcactgaaacctccgcctcttgggttcaagcgattctcctgtctcagtctcccgagtagttgggatgacaggcacccaccaccatgcccagctaatttttgtatttttagcagagatggggtttcaccatgttggccaggctggcctcaaactcctgacctcagatgatccacccgccttggcctcccaaagtgctgggattataggtgtgagccactgtgcctggcctttgatttttatttattaaaatattagtcatttattgtgttcccgtatactcatcaagtgtctcttgagaaaactcagaccaagcaggaaacataggcttgatgtttaggagacagagtaaagtgggaggcatgacatggggagctgatcacacagagattacagatggagataaggagtgcataacatccccaaggatggacaggatggagagaagaaaaggccaaaatcaaaactttggaaaatgcccactgtggtgggctgataatggctcccaaatatctgtccacattctaattcccagaacctgcaagtgttaccttgtttgaaaagagtctttgcatatgtggtttacttaggaatcttgagatagggagattatcctccattatccaggtgatccctaaatgtcacaaccagcgtccttataagagagaggcagagggagattagacacaaacactgagaaggtgatataatcacagagatagagattggagtgatgttgtcacaaggcgaggaacaccaaggaatgctggcgcccgtgagaagctgaaggaggcaaggaatggattctccccagagcttctgtctacctttctggagtcttgattggcctacaggtgttcagtttgcacttctgtggaaacagggaacatacagcagtgacacagagccctgccgacaccatggtgagagacacctggccttcagaactgtgagatgataaaatcttgtttgaactcatcctggttgtggtaatttgttaaattgggctttgggaactaatatacccacctttgggaacaggaacagaaagagtttaaaaaagtaaggggaggtagcaagaagcttaagtgtcatgaaaacgaaagccaaagcaagagtttaaaaacagatgagcagaggcaatggtataaacgctagagcctaaagcctaatgggtaaaaatgaagattgaggagaatcattgatatgatagaagctaatgatggcagctaacttgtactgagcacccattatgctggacattgccataagcactctgcagatataaactcaattctcacaaaaccctatcaggtatgaattattgttaccccattttacaggtgaaaaaactgaggcaaaaatttaaataaatgcattaagtaacataggtggtaaatggtgtggccaagatttgagcccagaattctggctacagcatccacattttagccactactttgtactaacctcaccttatcccccaaggtgtgtgtttcccaaggttctgactttgggtcttttatcaagtaaggtagatgatgtgtctcaagaggaaaaggtatttttgtaatgattatttgaggttgaaaggaggaagattaggaactttatatcacctggaccccatcttctcagctgagttggagaggaggctatctgatgaggctgagggaggcagctaagtttctgacctcagggagcctaggaaagacagtgaggatacaataaaacaggaagcactaaatgaaaaacttgctgcacagtgaagcatgctcagtgttatttccttgactggcttttggcactgtgccatctgtgcccaagatgtctgcaccatgtagcgtgccaagtgcagaaggaaaagggactgaaggggcatcatcgccccacacctgccctatggaaagtactttgttcagagacgaagaaggaatccgaaaactgcacaatatgacctttgtcattagaaactcttgaacgtttgagaaatggaccatccatgtactggcagatgaatgagagttcaagggcattacatgataagggctaattgcaagactagagactggagtgggtcagaggaactgaaatgtgtcaaggggaaggtacagctctagatagttcttactaaggtctttgacagctgatcaagaatcaggaggacatttcagcctggacgatgccatgggccaagcatgggagaggggagaaacagatggttctttaagagcttaggccaaaggactctcaacattctgggcttccaatctgtcccccacccaggatagctttctgttaagttactattcagaaccactgcaggcttaaaacaatgagtgtttatattggtattgaatccattagactgcatggtatagtggaaaaaggcaaggttaaaatatcagttaatcactttgttgtgtgaccttggtcaagtaacttctcgagcctcagatttcccatttgtaaaacatagataccaattctcaggctcttatggttgtgatgatacattaatgggataatgatcaatatcgagtgtggtgcctgacatttaatagatagtgtcaacaatttttttttagactaagaacaaattggatgatgtaatttattggctgacaattcatttctaaagatgtgacttcagaatgttctataaatgttaacattttcaaatgcccagagtatattttctatcttgcatactagctatttatttacaaatctctttctcccattgacttagcccttgtgtgaggagagctcttttaggctaggccctttatctgtactttgaggacccttaattcctagaggaagaacatggatttttctcaggcattaaagattccttccaaatttccatgtaacatacccactttcctcatacctatcttctcctggtaatattcttgaattattttttatttttaacattttttgctatgatctacattattatattttaaaaacacaatttcaagttatatattttaaaaaaatgccatttatttccatgatacaatttctattctcatttacgtcattttgtgcttccttcagaaaagttatataaaagctaaaagtgctgtgctgagtcagaatcctgttcccctcagcccaataagcctctgcaaaaaggaaaagaagaaattttttcaggagagcagtctatttcatatttgcagactgagagtgcatgtatcatctgatgttgacttaaaatgtctctccccttcccttcatctgtcatccacaaagctgtttgcattcttctggagtcttgatgggtctacagatggttcagtttgtacctccgtggaaacagggaacatgcaccagtggcacagagcatggtggagtggaagaaaatcactccaccatgatgtggatgatgcatgtgtggttgatgctgtggtgtctgtcctacttatagagagagacctctgggagtagaaggctcatacttgcctaggcacctgagcatcagagtgcctgggggcagcctgccagcctatctcctacggggccacccagcctgacagtcctaacctgggtgaatctcctgagaccaaggcttaggctcacagcattgtgggcttagaaacaacatcttgggggcagactcataccaagcaattcatgtggaggtagatgtgtgaaagcccaggatgtccatctgttagctcacactgagaaccctagctgccaggtagacaggaacactagcgtgaaaactctcttcctgtactggaagcccaatcctaatccataggttatccggtgagcactgttggaatgagggcagttaaatggataaaggagagtaaaaccatatgtcaggactgtctggcggtgcaactggaattcttgaacttagtctgtttcttagatgagtgctgcctatatttgttacagtttgttttaatgatttcctggcttaacaagccctaatctgatttgagtcatccttccttaagatttgctagagtttacaaattggcccaggtcatatcctctttttcccctgggaaaatttaaggtgacccttcttacctttgacatgacctatgattggtgattttgcagtttacctcttagcagacttgttattttccctgtttctgggtttttagtagacttcttattgtagctttaaaataattttttttacattccatttttttaatgttcaatatccattttaatgcatacaacaacattataaggtagatactgttttatatcccatttacatataaagaaacctgagactcagaggctaatgaacttgcctagaaatacctggccagtaaaggaagaggttgtgattcaaacctacgcactctgattccaatacttaagacatacctgtggctacttttctgaatgtttcacatgtactatctaatgtaatccttacagttacacaatttttattaaaaagtacagttctcactcagaaagaaagaaggatttgcataaaaaagaatttcaagcccagaaatactaatattacaggtgtcaggaatagtaacatccagcctacttccagcctttctctctctctctttctctccttccctcctttcttttctccctacttccttctctctctctccctctcccaccctccctccttctttctctttttatttacttacttatttatttatttttattatactttgagttctagggtacatgtgcacaacgtgcaggtttgttacatatgtatacatgtgccatgttggtgtgctgcactcattaactcgtcatttacattaggtatctcctaatgctatccctcccccctccccctaccccatgacaggccccagtgtgtgatgttccccttcctgtgtccaagtgttctcattgttcagttcccacctatgagtgagaacatgcagtgtttgggtttttctgtccgtcaatgatagactggattaagaaaatgtggaacatatacaccacggaatactatgcagccataaaaaaggatgagttcatgtcctttatagggacatggatgaagctggaaaccatcattctcagcaaactatcacagggacagaaaaccaaaaaatccaaaataatttttaattctctttcttatcggtgtttcttagcaagaattcttctgtagtgaagaattttccctcatcaactaataaaaaatggctagtaaaggcaggataaatgcttgctttattccctttattaatcttctgagtaacgaattggtatcttaggaacctccaatggtgaacaatgagtgttttaaaaagatacacattgaactcagcctttctttatacagttgatatgcatcagtagatggagtccatattaatgatgtaatctatataggctgatgtaatcaattctacttttgaggagattgacatgatgtctggaatttgctttaaatactccagcatctaaaaagcaaatcaacaacaaagggagtgggatcgatgaaaaaaaattggaaaaatcttgatatttgttgacactggttgatgagtacatggagttcattatactattcattttgcttttggtatgtttgaaatatttccaaataaaatagttctcaagatgcatataattctaaggttatcaagagtgtaaatgtgagtttagccaacaactttggcctatctgtgaatcttgtggagaaagttcttgatttttattgaaattccagataccccaacagtagttcctaagccctactgctttggcaacagcatgtcaaatatgtgcacattttcccagcattttggaaggaatttttataagaattttcagatttgactgattggatcctgattcataaaagtcttgtcttggtaactaaggatgtctacttttgagtgatgcataccttaagaatttgaaacatggttgcttctgttctctggacttcatatgagagcgtaacagccttttagccattctgaagtgacttcttcagtctaatggtgccatttctcattccaggtttaagtttatctattcatggggctgaaaagcgtttgcaaatccatcaacggcgaagtgtggcaagccgcccagcgtcacgtcgtcgcctgcctgtggtcaggcattcctcactcccaccaggcagaaggtcaataaaaatggaggcaagctcttctggaatcactaatggaaaaaccaaagtcttccacccaggtgatgcatggggaagttcaacggggacccatttcagtagcaacctgaccacagtctgcattatatttttattgtgtaaatatgccatactttcagctaagcttgcttttgttaggagtcttgttctatttccccttctgctcacctcagtcaatggtaaatatcaccaagacgaataagaggggagagagcttggtggttcagagaaggttgaggctatgtgcacagtggtagaatctaaatgaaaatcagagtgcataaactcttgctcagttcaggaaagctcattatataataaaacaacatagagatttggtcattttcctgataatttgctctaagattggtcaggaaaaaaattcaagccaaaaaacacccactttgaaacctaggttatctgtgttggcttgcccacatcctcctgagatcaggagagaagactggagtcattatattatattgttttaagtcttctgggaagcatctgtgatctctttaaaatattaaaatgattctacattaaatgaagtaaaaacatcttatgtgcttatttgggggaaaagctcatttaagtattcattcattcattgaacaaatatgtattgagtgccagctacatgctaggcattgttttgggttcaaggaaatatcagtgaccaaggcaatgttcctgcaaagtgactttatagaaacatcaaattgcgaaagaattcataagtcattgagaataactctcacccaatcctgattcctctctgtaatgtcctagtggatgaccacacagctgctactgaagccagcctccatctctactcatgtcacaccaccttctctctcttagcatgtaaccttgcttcctaacccatcaagaaacaccagggccgttgggcatgaattactggaggtcccttatcctctctcttcaaatgtattgctctttatgcatcattccccactttcctccagttttcagaagatgaggggcctcccactgtctttgaccaagctcttacccatgtcctttagccatggtcacctttcacctcttctgaagcttcctcaggagaatgtgtcctcttgttttcatctctttcacccttccacactgctagctgtttaccttcagtctatgaaaaggctcaagcttctaccattctgatcatttaacactgtacccttttccctcttctgccactttttcctcctcccttccaagccaaacttctgaaaataataatttacttttgattgctctgttctgtcgagagtaaccaacacaatctggtttctagctcctccattccattctggctgtttttgaggccctcagtgacctccttttatcacaatgtagtggatgcttgccagactttcctgatgcaccagaccaaggtggacaacccacttgtttcccaaacactgttcccttggcttccatgacaatcttagggttcttctcttatttctctcgcatgtaactttcctggtttctcccactccagcatctctttcctcctcttgcctcctttcccagtacgtaccaaatccagaatgattcatctgtacccctaatcagttactgtgcttgttctaccaattacagggtccagttcaaacttcttagcatgttaaaaacaaatgccttttgtgatctggcccctactgctttcacccttcattttttgccctcttcttccttaagctttattactatagtgcatcaatcaaggttcaatcagaaaagcaaaaccagtagaaagtatgtactagagactaattacaaagaattggctttcattgtgggagatggctaggcaagtctgaattcataggtcaggctatctgcaagggcaggctggaactcttgggcacagctcttaaaagcttcagctctgcttttaaggcttttcaactgacctagattatcaaggagaatctcctttacataaagtcaactgactatgaactttaattgcatctacaaaacaccttcattgcagcactagattagtgttcattgaataactggagactgtagcctggccaagttggttcatcaaatagaccatcgcatctgagtatatcaatgtgctttcacttctctaaatatgtgatgctgtttcatgcctcccaacctttgctcctgctgttctttcttcccaggataccctggttttgctctgttatctttgaacatgttgaaattacttgtctatccgtccactgaaaggtctttaagggcagggattctggattatttatctttgtactcccaataaatatttgtagggtaggaccgaacaaaaccttcattagctgtgttttagactactacaatagcttctgaatttttctgcctgcctttctttcaacaagtacctgatatacatcagtaaacaaagcagacaaaagtccctgcccttggggagtttacgtagtagctgcaagagataataaataaatatattaaagagaccaactgtgtaatctatattatagttatatgtaagctatatataacatatagtgtttagggaaaggataagtattatggataaaagaaaaagtaggggaagagggtagcatgttgcaatattaaacatggtgatcagggtaggctgagtcacgaagatgtgtaatcactgactagaagtttctgagacagccacgtggatgtctgagcaacttcattccagcagagggacagttagtggacaggttgtagggtaaaagtgggtctggcaatttgaagaatagtatggaggctcctcaacttggagtggagtgagtgaggtggggaatcaactcagtgaggttgtagggactagatcgggcaggaccttataggccattgtaaggactttgagccctatgtgaaaggaagctcttacagggttttgagcagaagaattccataatttgatttatattttaacaggatgtaatatagactatggggagaatagattataggaggagaggataaaaggagaaaggtcagataggaggcctccagaatgatccagtggagaaatgatggtagctctgactaggaacagcagaagtaatggtgagaatttagagtctggatatattttaaagctgggccaacaaaatatcctaatggattggatgtagggtaaaagagaaagaagagcaaaggatgactgaaaagtttttttggcctgagtgaaatcagctgagatggagaaggctgcaagagaagcagatttggtgggtttgagggcaaaggtggggctgagttcagaagtttgattatagatgtgataatattgagagctggcaagatcttgtgggtggtagtttgagctccatgtctggagtttgaaagatgattggtctgtgaaagagatataaaactaatagttgttgacatataagtgctatttaaagaaatgagattgcaagagatgaccaagggaagaagtataaatggggaagggagagcatcaagggctgagatctgggacactccaataataaagggtcaaagaggacatgaaccacgagcaagaaggccaggaaagaagcaccagcaaagatggagaaaacccagaagtgccacatctcagaaattacaaaagtttatcaagaagagaagaatggttttctaggctaaatgttattgaaagtcaaataagatgaggactgagaattagtcgattttagtaaagtggaggtcaatggtgattttgataagagccgttttagtggagtggtggggatgaaaccctgattgaagtggatttaagggagatgagaggatataaattagatgctctgaatatgggcaacttttttgagcagttttgctatgaagtgtagtgaagaaatagggcagcagctggaggagaagtaaggtcaagagtttcttttaaaaatagcagctctccagcagataatttatggtgttcaagagaggggagaatttgtgatgtgggcatcagtgagaggatgagagctatgcacaataggaccatggatagtttatctgtgataactggtgggaaggaggcgtatgtatataatggcaggtgtgctgagggtctaataagttcttttcctatgttgtcagctttatctttaatgtgagaagcaaggtcatctctgagaatgagaatggagccacagggagaaagagagagagaaagaaagatatggagaggggaaatatgtttgccaactcacattaaaagggatttgagattcatagtcatgaaactaaagtaggactagttatcatcattgtgtagtttttaattttgtgtagctacatgagtaaagacatacagttggtggtgagttggatttgaacagcagtgtggttttgcaaaggaagtaggaaagagagaaagggaatcaaaagtgcatggaagggagtgatgatagtgattcattttgtgatttggtaaagagggtacaagacatcaagggaaggaggtacagtgaaaagttggtaagatcaatcggttgaaattcccagagggttcaaaaaattgtgggggttagggtaatagaaggaggatctggaaggataagagaggtggtaagagaatggaatgtgtggcactaatattgtggcacatatcttaataacatttatttaattttattatagtaatatcaacacaagatgctgttactggtaatgacaaggtttaggccaaggtacaaaacaagggactataaagggtagaaggcaagatcattgaatgaaaaaattcctagggactgagaggccaagatgtgaaaatgattgagtcaagaattgagtagctttgggaagaatgataagccaggcattaactttactgagaaataagggaacatgatctggcaggtagcaggagagtacaaagataaagggtagaagatgatgtagtataacaacttgagattcaaggctgaaggtgtttggggaagagggaagaagaatggtctgaaggtggatttgagactcaagaaaggtatctactcctctttcagatgcgttggtgccagggctattggagaaaaacagttctaagtgaaagagccacagggaagcatgaccactgggaagatccaggttttccttagagcaaggtgaatggggcaatctgagaagagattgacgacattcagagaattctggagagcccagtggaaggttttagatgttggacaattgtcttcagtggttctctcagacaccaaggttctcctccagagaggataattagcatcagccttcctcttcttaaaattgttatggctatcccgaagaaagtgcagccttgtgagcccaccttttcaagtcctctccaatttagcctctccctacttttccaggcttatctcattttacactgtcattatccatgttattcagcttcaggcatccacaggctttttagtatttctcaagcaggcttttactcttccattttctttgccattgctcaagctcctctctcatcttggaatatcccttcccctaataaatgtctactagcccttctcattcctcaaaatgtaactcaaattccgcttcctccaagaagctttctagatcttatagtcagaattattcccctacttccccgtgcttccacagaacttagaagccttatcaaagtccatctgtttctatggtcttatagttctcccagaaggcaggaactctcctcaattcatctttgtatcttccgtcactcctaacatcatgcgttgtccctagtaggttcttaataaatgattttatgttgtttgtcaaaatctgttctactcagcagatataggttagcattctgaagttatatggcgtaaatcttaactcttctttcatatgacaatccttcagttgtttaagaaactcatccctagctattttccaggtgaaacatttcctagtgtcttcagtgcttccttgaatgacatgatactcaacttctttacctttgtaccctctccactcttagaaacattcttatttcattgctatctctttgaaaatgcagtgcccagaattgagtattccattaaagtcaaacgcaggcagtgtagattcagtctgtcctttcctttaattgatatcctgtgttgatattactataatacaattaaatgaatgttattaagatattcctaatggtgttttatcaacatgggctaattcagcccacattgtgagttaatatttcaagtctcttccctcaccttaaaaacacatcacttggatgagtacggtggctcacgcctgtaatcccagcactttgggaggccgaggcgggtggatcagctgaggtcaggagttcaagaccaggtggagaaaccctctctctactaaaaatacaaaattagccggacgtggtggtgcatgcctgtaatcccagctactcaggaggctgaggcaggagaatcacttgaactcgggaggcggaggttgcggtgtgccaagattgcgccgctgcactgcagcctgggcaacgagcaaaactctgtctcaaaaaaacaaaaacaaaacaaaacaaaaaaacatcactttacttatctacccatcattttatcatagatccttaaaccctacatatgtcgagtattggttgaaaatataaataaagccaatcctctagcctagaattataattaagaaaaaaatatattaagttacaattagaaacttgttatttaaaaaaagtatttttaaaactcatattattctggcaaggtagaatatgatttcagttccattctctttatttttagtgtacttggacaaatgcatcatagttctctgttgggaaattatggaagagctctcaaactgagtttcttaagtgcagtgagtcatagatcttagtagcagcttggacaatttagtcatattgaggcctattaagtcatccatctattttttacaaagttaataatccctgttcccgaagtgttctctaaggcccactcggattggttactaagaacaaaaagagaatttgggagtcttgtagattttctgttccatctgcctgaacaatttcagtatgtttatcctcctttgagtttacaaacttttatgagggcctactatttactaacaaggatttattgggaatttgccctccttggagtattttgaaatggtgcagaactctattaaacatgggtcttaaggcactcagtcatgtccaagagagacaatcagtcagggttctttgttaccaacaagagaaactaatcatttagtccaaacaaagaaggaatttaaatttgaagaatgtggatggaaaacctaaagagccagccttggaaaaggaatcgagaaatcaagaatagctatttgattagaatagaatatcttctatttgactatctggaatgattgaattcttaccggtttttctagttttgcatcatttggctcacgttttgaagatttaggaggacagttctattggctatgcacctttcctttggttggacagacagtgctgagacaaatgataggacagaagacctctctcttcagccttcatagtgggagggtaggactccttgatttcttctgctaccttgactacacacagcgagggagaaggacttccccaaaaggaaatagaggtgatgttaggaaacaactttatgtggaagaatgcccactacagggacatgtgcttaagctgctgtgatagaagtcaaactgtattaagggctggaacacagaaataaataaggttatggcagcataaccttattatgctgaagagaatttagaaagactcaaaacacatatggtctaccaatttgactttgaaggtcaactaggatttcaacagaaggaagaggcatgaccattcagatgcaggaaagagcataatgataggaacggtgcattacactggttctgaaagcaagctttatcgttaggtgtttaaaagctagatatgtcacctgatggctattacagccttagacaaattacttaatttctctgaatcttagtttctacatcagtaaaatgaggaaattaatacctaccttatagtattagggctgccaaattaaatacaatgttcccaattaaatttaaatttcagataaacaagtatttttgaaatacttgtttgaatttttgaatatttgaatattcctaattcaaatatttgaaattcaaatatttgaaaattcctaaatattgcatacgacacacataataaaaaattatatcgtttgaaattcagatttagcaggacatcctgtattgtaatgtattatgtctggcaatcctacatagccttgttatggcaattaaataattggtgtagaatgtccagtttgatttttggcacatacttggtgttcagtaataaatggttgataaataaagaaatcatttttcttgtcaccaacatgataagcaaaattcagaaccctgaaagtacctatgcctcagaatccttgttatctcagttaccacttcatttagcagtttcccagttaacttgtgctagaataccaataagatggtctctcattatgctgtataaatacagaaaccattcatcttcatcttgtatttgtatggtttctctttccttctgattgtttcaattctttctcctgtttatcaatttcattttgaccttatcctttagacactcataattaatgaatattattttctgcttcctttatggaccaaaaatataagtggtaaatggtactaggtttgggactataatttaagactcaagagcatagtaaactgaagcactgattttgatttttttgagtttgaaactataaagcttagtggatatagatcaaattatcccagctaatgactatgccatataaaatagaattggaagctttctgaaatctaaaatacttcttctattgctttttccttatctgttagacccatcatacaatcctagagaagtgtcattaatcacagaatatgtcctttagtctcatttagaatttgtaaaataatgttttgccgatatgtgttattcccaagtaatttctaatacaggttcttttatctcactttttaaaacctatggccctttccacatttatgcatgattattgttccctaagaatctatctagtatttaaatgctaggacataattgattttccaggagagaaacattaggattttcttgtttccaaacagctagaatgattagtactgtctgtatacttaggcattaaatgcatagtttgataataataaaattatagctacaatatattaagccctctaccatattcccaacctcaaaaactgttcaactgttttcattcattatctcatttaattcccataatattctcatgctattttccttatttgatgggtggggaaactaaggcatgaagaagggtaagtaccttgcctaaggttatacagccagtaaatggtgaaggcaagattctagctcaggtattcttattctcttatttaatgtgctattactttcttcttcacacaacttggcagaaacatttctagcaaattatcataaaaaagccttagaaaatttaaattaaaagccctgcagtagctcaaaccttagcgtaagaaaaccatactaaagaagggaccagttaggttctgttgattgcttgtgtaatcgtcttcaaagtttattatttccttcagtgtaagtgatgtccactttgtagcttctctttctggtctactatgctctggacttttgtttttcatcctccattttttgggttctgatataataaaattcattcctatttccctgagtttcaaagatttctttctggaaccaatgtcaaggcctggtctcaaattagggaacagactgtcttctgtttctccctttaaagagcagtaccagaagatgtggggagagggagaggagaggattattaaggagagacttttaaaagaagaaggacagtcaagaaagacttgttcctagttctgccaagagtcaggataaacttatgctttagggaaacaaaaataaggaaaagataaatatatgaccaatctttagaataacgatcataatactgcaaccctacatttacttgatattctgttgtttccaaagggctttcacaaatttttctcctgcatttcatttagtcctcatagcagtctgtgaggtggaattatgcctattttactatggcataggaagtgaagttactagctcaaaagtacaaaattagcaattgacagaccccaactaaaacccaggtatttaatttcttatgtggccgggcgcggtggctcatatacgtaatcctagcactttgggaggctgaggtgggcggatcacctgaggtcaggagttcgagaccagcctggccaacatggggaaatccgtctctactaaaaatacataaattaaccagacattgtagtgcaggcttgtaatcccagctactagggaggctgaggcaggagaatcgcttgaacctgggaggtagaggttgcagtgagccaagatcatgccactgcactccagcccaggtaacagagcaggactctgtcaaaaaaaaaaaaaaaaagaaaaaagaaaaaaaaaaaaaagctgaagcaggagaatcgcttgaatccgggagacagaggtggcagtgagctgagattgtgccactgcactccagcctgggtgacagagcgagactccgtctcaaaaaaaaaacaaaaaaacaaaacttattatgggtgttttttccacggtgtcaactttttatcttgaagatgagcattagttaagagtgaaattttgggggctttctatccccttttctgaaaatagacactttattgagaagtgtggctgaggtttgcttataggatctaaggaacctggctgttctcttgaacagaactgaagcgtggatgagataatcagtcttcctatttgtgaatggatttttggggtggctggaagataaaattgtatggaaaaagcgacaagggctactttggacttctgttttatttctcattgcattgaaggtgaatgtggtgcctttcagaacagttagtgctgtggtttagaaataacactgtaattatccttcatttgaatctcttcctctttaagtgggtttttttagatgtgtgatgtgagtttagtcaataggtgggggtgcttaggaaaacaagctattttggtccttggcaaatgtgggcattggtatctgtgttccttgctatcatttgctgagtaacaacattattttttttctaaaaatatataccacattcttctcttatttgcatttgcttttcattttactgagggacatatacacacacattttgatctataggatgcatttagagggaattttctgaaaaatcattttacaaccttttgagcacagaaagtgaatgaagaagagccataaaaaggcagccacaaagaaaagcaaatggttaatttctggaaaagagcattgcgttttgtggaatttaaaactgcttcttctgcctgaggctatttaaaataattttatattttagaagcttgaagagatttaagtacagcaatgtgccccttatccatagctttgtttttcatcgtttcagttacaataagaattctgagagaaagacagaaattgctctatcattattgttataattgttctattttgttattagttattgttatcaatctcttattgttcctaatttagaaattaagttttatcataggtatgtatgtataggaaaaaaagcatatatatagggttcagtactatccacagtttcagatatccactgggggtcttggaatgtatccgctgaagatagggcgggatgctttaaccatttagctcaggattatacaactataactagtagagctgagatttaaaagtctaagcccttagccatggtggatagtcagttaatagtgagcttttattttgcttgattgtctgagtttgagctgacaggccgatgcacaagaggggcagagtcctagcttttttgaggattgtcatttcgcaagggcaatattccttctcatatttatctcaagcccttcatgtataaagacttattcaagacaaaagggtaaacaacatttagtgaggctgaaaattgcacagtttctgttctgtaacgcctcctaatcctgagtttgtctcttctcctcatctgcaagagccctcgtcatcacaacagacctcagcatctaggagattggaagacaccacagaattctgcctatgtgattcacaaatccttcttgctatttgaagctttgcaattctgacttccaggccctctagggaacttttagtgcagggatgcattataacttaggagatcatgatcttaccaatcctggaaaacatagaagcaattctgctgaaggagagccattactggccgatgcagtagaattattatttccattttagacctgagaaatatctgcctgctgttagccaaatgtggttctcccatcaggacccagtaaagaacttggccattaggactactcagcattaatcatttgagggaatagctttagccttatagtgactagtgtgagtgaatcaatatgtttattcctgctaatatgagccaagctttcttctgtaaaagaatgaacttacaacatcataagatttatggttttacacaatactaataaaatgacatgaatattttttgcacgtatgaagcatcttctattgtgaagcttttttagtttatgccacacacaaaaaaaggattttggtaagtgctacaaataatgttaaaaaaacaagatggaactttttttttcagaaccagtagcatttcctacatgtaaatctatggtttccaatttcatattctccagaagagctgaattcatttcctttctctcttcttcagagacttttcttgaacactggctgatgccaggaaagtctgtaaagacagaatggacctccctcccttcttttttatttttatttttttaagatacaaggactctgttgcccaggctggagtgcagtggcatgatcatagctcacttcagcctcaaactcctgggctcaagtgatccttccgctttagtctcccaagtagacgtgattacaggtatgcaccaatatgcccagctaattttattttatatttttttttagagatggaggtcttgctatattgctcaggtaggtcttgaacttctggtctcaagcagtcctcctggctcagcctcctgcagctctggggttacaggtgtgagccaccacacccagccttcccttctttcttaacaccattctccatctcagtactgtcttaggaacacagaattcacctatggggagttcaatacaaaactcccagtttagaaaatgggttctttggtgcctcttaagtccaaaaatattacatgtgaggatttattttagatatgtagctcaagttttgaaatatcactgctacctattctataaaaaatgctgtgtttgagaatttgtattaagtatacctctcaggacaggaactaccaaataaaaatatttgtagaatataaatagaatgtagacagaagctcagctctagcaacagttattatgaggctatcatagaaaatatcatttgtcctcttaagtctgttttacacactccccatcttttctgtgacatggggagggtaagagctgatttgtcaggctttcctttattttggtttcaatatgaagtaactattccaagtcccaggttacaagatttttaaagtggaattgtttttacttagcctaggccccaaacctggagtaggccctcattttgcagagaatgaatatataaaatttgtagtgaagcacctagatctaacatgatgggccaaattatttatgtataatgtctataatttgtactacagcctccaaaaaattttagtttcccattttttcaatgagaaagataaggcttattattatttaatgagtcaaggtcacataaaagtagcattcaaatccaggttagtttagtgccagtatctcctttttcaatcacttgtgttaatttacatatatgacatatgtctataattgattgaacaaggaaaggaattttaagtgatttatttaaagtaactaaactaaggcaatctaatgaaattactaagaatagtgatttggtgagtgagtggagggcaagtggaaagtggtagtaatgtaacttttacattgttatgtgtcacagcagaaaaaccatatatagtatataaaattggaaaatcatgaaacaatgggacacacacatagaaggatccaacagagactcttaaaagtcctttttccactgaggaagaggacagagattgcaaaaagggtagctattgatttttattgtaagccctttggtactttgatattttgtttattatttgataaaatttaacaagattttactaaaaatcaaaaagttatgatctataatatgtctttcacagtaatctactgataacctatcaagatgctttaaattgtagactaaaaaaaaatcagagcgtcttcttagtttatattcattattgttattcataatgtgaaattgcagtgaaagagcattaactgagcatctaatatgttcaaggccttgttctaggttttataggagataaaagggggatacagtttgatcccaggcttcaatgtgttactgtctagttgaaggtgctctcaatgaggaagaaatctagatatggaaaaactaggaacttaaacattttctttgtctgcttcatactgtgctaggtactctgactcatttttcatagaaaacatatactatagaaaagacaaaatataaagagctatgtgagttcagtggatagaaaaatggtttttacttatcaggatcaagaaatgcttcctgaagcagagaattctaggtgggccttgaaagcaagaagggatttctatggacaaagaatggatgggaaggcattgacatatttgctaatcaagaaacttatgtttgaaactcatttttttgttgctgtttctcttgtataaaagtgctttgatgccctggaagttgaggctgcagtgagctgcgattgcatcattgaactccagtctgggtgacagagtgtgactgtcttaaaaaaaaaaaaaagcctagctgtaagctaggtacagaatgaattttaaaaatattgcttgtccagctaaagactttttattaaatgtaaatgctgttaccaaagttacagaatcacaattaagtattgagtataacttctgtccataaaatgtggggaaacttaaagacaaaatggagatcacatggattttgtagctattcttgatttttttttaattggtcaatgtgtttccacatatttagggatcttcttagcttccctctttaatttatttgtttagtttccttaggattgtacttaattgcatgttaattactgatgcccagtggggctgtattttaaagaatcttcagtttgaatctatagtatctttaccatcttgcctagtttttcaagtctttgtgttctgatccaaaggccaagatatctgtggctatggcaaagaactcagattcttaggtttttagaaattataacaaaaagctatatgaataacaataaataaataaaatcagtagtacgaagtaggcatagtacattttttacattgaagtcatttaatctctctcacttgggcactataagttaaaggtggagattgtcatctttgaagattcattggtacactgatcactctccatttaggaaagcttacaaaagtccttgttttacagctccctctcctttgtagtgttagacttaatgaacggcttattgtcagaagttccagaccattacattatactctatgaaagagtattctgtatttcttctagagcagagacagaaaaatatcttatatttgggggactctatgtgtgatcataatgtttagcatgaagagaatgttgcattttgaagctgtttggtttatacattttaaaaaattacatgaatttagaaaatctgttatattaaattggatatttcacatctatggtttaatatctgcagtctttattttcagtcttaaatcctgaactccaaataattattaatctccacaatcccactcttgaatttttacatgtctttaaagttataaaagtgttttgtgctaagggcagttgcaatggctcacgcctataatcccagcactttggaaggctgaggcaggcagatcacttgtggtcaagagtttaaaatcagcctgtgaaacatggaaataccctttctctatacaaaatacacaaattagccaggcatggtggtgcgcacctgtagcccttggctacttgagaggtgaggtgggagaattgcttgagcctaggaggttgaggttgcagtaagctgtgttcgcaccactgcactccagcctaggtggcaaagtgagactttctctcaaaaaaatatttttattcttattgtgaaaaacataaaaaagataaagtataaaacaaaatctacccatcatttcacagctgagggataacttctgtacctattttgagtattttcttcctgttatatttttctagtcatataaatgggtatgttttttaatatgcagtcatgcaccgcatgatgactttttcatcagtgatggaccacataaaccatggtggtcccattaagattataatggagctgaaaaattcctatcgcctagtgatgttgcaggtgttgtaatgtcatagtgcaatacattactcacgtgtttgtggtgatgccggtgtaaacaaacctactgtgctgccagttgtataaaaatatagcacatacagttatttacagtatataatacttgacaattaaactactatgttactggcttatatactctaccttttattgttgttttaaagtttactccttttactgattaaaaaaaaaagttaactttaagatagcctcaggcaggtcttttaggaggtattccagaagagagcatttatatcatgggaggtgagagctccattcatgttattgcccctaagaccttccagtggaataagtgacattgataatcctgaccttgtataggcctaggctaatgtgtgtgtttgtatcctcattttttacaaaaaaagttttaaaaaagtttttaaatttaaaacatagaaaaatgcttatagaatatggatataaagaaagaaaatatttttatggagctataaaatgtgtttttgttttaggcttagtgttatcacaaaacagtcaaaagttaaaaaaaatctaaaaggttacaaagtaaaaacttaccataagataaatttattattgaagaaagaaacatttttaaataaatttaatgtggcgtaagtatacagtgtttataaagtctaccaatgtgcaatagtattttaggccttcacattcactcaccactcaatgactcattcagagcaactttcattcctgcaagctccattcatggtaaatgccctatacagagagaccattttttatcttttatactcgatttttactgtaccctttctttgtttaggtattcaaataccattgtattacagttactacagtattcagtgcagtaacatgctgtacaggtttgtagcttaggagcaataggctgcaccatgtaacctaggtgtgtggtaggctataccaactatgtttgtgtaagtacactgtatgatctttgcacaatgatgatatctaccaatgcatttctcagaaagtatcccatccttaagtgagacatgactgtacttgggacatgtctctgtgtgtgtgtgtgtgtgtgtgtgtgtgtgtgtgtatgtatgtatgtatgtatgtgtgtatgtatgtatctatctatctatctatctatctatctatctatctatctatctaatctatctgtctatattcttgtattggttttcctcaccttttcattataaacgagcattttcccacatcattaagtattctttgaagacagaatttaatggcctgtatgcttcctttatggtgcttcttttgtgtcttatacttctatactgccctctcacatttaaaaaaattattaaaggtttttggaatctttgttattaaaaattctagttatctagtagtcatagctacttctacctgagtttatgagcccctgcttatgacaaataacaaataaataaattgggcttctatttattagtctatttaggaagtcacttgttttttagcttatgtaatgtgttttgtcttgatctgaagtattagaacacaggatcattttactgggttatgttggatttatttggcaaatccagttctcttatctccaatagcctgtgtttgtgactgcttggatatgggtgattttaaagactagtgaagagcatggattgtgattacatatttacacctcaatagctgtgtgactttgggcaaattactccattgcatcgcaccttcttttcaagattaaagcctaaatgatatcataaagtacatagcccagagccaggctgataattgaatatttttgttatttttctgtcattgttgtaattatgaggtctttggccatcaaatagaacaaagctgactagccttagttgagattgaaaagcatcagaacttttctttacccattagaagtaactggccatggaagaaaaaagcaaataacccattttaattctggaccagcaggaaggcgtctttgtctgtcctgtctaagaaactctcataagtagcttcagactttgcaatgaggcagctgcattagtgcatctgaaaagttcactgctgtggctggaatgttaaatagcagttcttgacagtgaccgaaatgcatacctggggtctcaaggaaaggacttaggacttccttttcgttattcacattgttcaatacctagtctgtctctatataaatgccagtgttgctttaataaattattatggatgatcatagtaatacctgtagctgctatttactgagtgctgactacgtgacaactaaggtttttgtgcattatctcatttaatcctagtggctgctctgtgagtctgttatcatcatccctatttcacaaaggaggaaactaaaatttagagaggttcagcattatctaataagaatttcaacgttggtctctcagactccagaatctgagcttgtagctttgctcttagctctgttgttttggttttataattactgcatagcctcattcattcattcagcctgagaatctactttgttgagaatctacttcatgccagctcctgttctaagtgcttgggttatagcatgcaggcaaagtccctgccctcccaaggcttattttctattaaatataatagaatattaagttaccttcaggtgttttactcctagaataagcgttcctgtgaggctatgagttatcttattcttgagctttaggaacgtaaccgaaattttgtataaggctgagtatacctcctaagcttatgagatttctacagaatttctacaaaatactggaagctagggcatgttccattttatgcatcaggctgtttattttagcattggctttttagccctggcagactcctcaaatcggagacgttcttactgattactttaagaagcttttagaaggtttggaaggtttattgttcgtgataaagctactttttgataccttggtttctttgacttccttaaatgttctataggtgtatggagcagcataaaaactttctttctttagaacatgccaaaaatacatcagacaaacctagaacaagaggcttaattacttcatagaataaattttcaaattcggatacagttgaaaaataaatgatgaatcggggaggtctaattatgagggacctaagtattaataccttgtttccgtaatatcaagaatattaaatccatccttaagaatgaattattataagaagaagatgatatcataaagtgtttgtgttaatgtcacatttaatccatgtggaagctgaaaataattttaaatatccttaggtagaggctatgttatattttttacgtagggaattatcagtaaatactatgaagtgtgtttccttataaaaaagtagttgccttattttgcattggaaatacaagtgaacctttttggtcccataaaatgcaaatggcttgtatatgttcctttttttttttttcttaagtcctttgtctaagaaggaggatcattggcaaaccagctagccattcactttggattttgacatagcttctccttgggaccctaatgacagactctctgataaccagtgcaaactccatgaatatctttcatttctctagaaggaggtgtggatttgcaaggctaccagctggatatgcaaatactacctgacgggccaaagagtgatgtggacttttcagagattcttaatgcaatacaagaaagtaagtttcactcaaattttaaattcgccgtgagagaagaagctattataatacttgggaggggtaataaactagaaaccttagatgtcaagctttaaaaaatattaacaaaatgatgtcttgaaagagatactgtgcaaaataattttgaaactagaagagatagtgaaagaggtttaatttgtgagattaaatcacataatagtggaatttttgaaaaagctataacggaatgatcaattctgtatattgtatttcatgtaataatatttagtaaaccttggagtattgtaaatttttagatttcttgattaatcataatcaaagaaaaacctttaagaaaacaaaatacaattcctctgctcaaatggaagtaataagagggaaatgttagtggagcaaggtgaaatcaggaacttcttctccaaaatgagtatctggagtcattgatgatggactgcatgccagaagtgaaccctcattttctaagcattttgagtaatcaaggtttgctcttcttcgagtattttatttctgttttatagctttcactcagaattttatcagaatcaacacatttactcaagttaaatatttagcattgaggatgggtgatgcggtgtctcatactaagtcattaccattgatatttcattatcagagctctaattctagatgatgaagctcctcttaatatcgaataatttatctcatgttggatttgagggattttgatgtgaagaacattgtataaacaaccattgcaattttttcttacttctagttttgggacattgcattttcttttctttttttattattatactttaagttctagggtacgtgtgaacaacgtacaggtttgatacataggtatacatgtgccatgttggtttgctgcacccatcaactcgtcatttatattagatatgtctcctaatgctatccctcccccagccccccaccctacgacaggccctggtgtgtgatgttccctgccctgtgtccaaatcatctcattgttcatttcccacctatgagtgagaacatgcggtgtttggttttctatccttgtgatcatttgctgagagtgatggtttccagcttcatccatgcccctgcaaagaacatgaactcatccttttttatggctgcatagtattccatggtgtatatgtgccacattttttaaatccagtctatcattgatggacatttgggttggttccaagtctttgctattgtgaatagtgccgcaataaacatacgtgtgcatgtgtctttatagtagcatgatttataatcctttgggtatatgctcagtaatgggattgctgggtcaaatggtatttctagttctacctccttgaggaatcactacactgtcttccacaattgttgaactaatttacactcccaccaacagtgtaaaagcattcctatttcttcacatcctctccagcatctgttgtttcctggctttttaatgatcgccattctaacttgtgttagatggtatctcatggtggttttgatttgcatttctctgatggccagtgatgatgagcattttttcatgtgtctgttggctgtataaatgtcttcttttgagaagtgtctgttcatatcctttgcccactttttgatggggttgtttgttttttttcttgtaaatttatctgagttctttgtagattctggatattagccctttgtcagatgggtagattgtgaaaattttgtcccattctgtaggttgcttattcactctgatggtagtttcttttgctgtgcagaagctctttagtttaattagatcccatttgtcaattttggcgtttgttgccattgcttttgatgttttagtcatgaagtccttgcccatgcctagggacattgcattttcttgttaactttcttatgaataattttatgctttttagttatccccatttatcattataccgtcctcttgaccttatgagatagttattacctccaccttacagatggaacaactgagggtggaagaaattaaatgacaggggaagatgataataatggagaccagactgcaatgatggctgtttgttccttcatttaattccttcatgaatgtgctcagtacaggatttaaacacattgaggtgaaggatcctgaaactgaagattaggctacttttaaaagaaatgtttttagcagagaatataaggggatcagctatttattccggttgaacaatccctttatattacattaatgaataaaagagaaaaaatttccacaagagaataaaaatcagattattagacattggagagaaaataacttttcatggaaagttataaaattatgtaattacttcacttgatttgaaagatgataggttgtacagtgctcaaagagttcaaattttttttcaataaatgataaaagttggcttccatgcaagtgctagaggtgaacttaaatttaaggagtgggggctagaatgaacttgcatcagaatgaactaaaggttagtaaggtactatttttatagtaatttttattaccagatcttagtaaagacgtgtgtatctgatgttaactgttctgtagtttagaagggtgatctttctatgaacaggtagaggagtataaatttatgagtacttaacagaagaaaaaggaaatgttacttgactttaaaatgcaaatccagccctttataagtttatgcattttctattgctttggaactaatttattttcttgttgcaaacaagttttgtgctaattagatttgagaagctgcccacacaggctgggtcatttctggaaggaaagattttgggccattcagtctctatttaggttccaaatatgatcgaaatttttagccagttcatggaaatctccaagcataaaaataggtagcttggtactttaagggactgtagcttagattatcgtttctggaaagctttgcgagaccatcgttaagtgtgtaaagaatatggagttctgcgactggccccagtgtgtgatgttcccctccctgtgtccatatgttctcattgttcaactcccacttataagtgagaacatgcggtgtttggttttctgttcttgtgttagtttgctgaaaatgatggtttccagtgtcatccatgtcctgtcggggggtggggggctagaggagggatagcattaggagaaatacctaatgtagatgacgggttgataggtgcagcaaaccaccatggcacgtgtatacctatgtaacaaacctgcacgttctgcacatgtaccccagaacttaaagtataattaaaaaaaaaagaatacagaattctgaacatcagtataattcctctcctttttgttaagattaacaagatgatggaaaattttcacttttttcttcaaatgttgtgactatttatatatagtatatatatatatatgtatgcatgtatatatgtgtgtatacatacatatacatacatacatatatatacatacatatatatacacacacacatatatatatatatgagaccttcaagatcaagctagaagtgcatatgtgcatgcttacatgtgtgtatttcaaacatttcttgagtgtctggggtaggctggccatgatggtgttttcccaaagtatctcttttcaatcttaaccctaagtaataatagataagattttctccattttaaaggtgaaaaaactgaatatagctccccaaggatatatggttactatgtgatagagtcaatatttaattgtatgttcatccttgttctgctaaatactaaattaaataaaaatgattaggaaaaatgaactactttgcatttttaaagttgtattatattttcacatcttgatgcaagaattttgccaccatgcttctacattgtgaaatacatttacagtattttatcttttagtgtgcataccctaagtatatcctcatctcttctaaagatgtctcagagtggctggccatactcaagtgctttttcagatcctccatattagatgtacagcttataaaaaagaaaagagttattttaaccatccatccatcttgcctgtcatgtgtcaggtactgtgctaggcataataccttaaggcagtggtgaatgtttggtacaaagtctaattcaggaaaaatgaaaacgttttcagatcacgtcttgttttggtgttcaacaggaaaacaacttgattgctttttaggaacaggcatttacatgtgaaagtataacaagggtgtgtttgtgtgtgtgtgtgtgtgtgtgtgtgtttgtttcttttcgttgatgttatttgtcccttcctctctattctcacccttcactctccattccaagatggtagtcaggtaccttgaactcctttgtttcagcagagttttgtgttaactaaagttcctgccttttttttctgaaagcctgagcttccaagactgatgcttgtatggaagaagaaattgcaagagagatgccctgtagagggagccaggcttctggtagggggaatggaaagggagggaatggctatgttgcatgcctgggagactgcaggggagccacctgaactgtcagtcacacagagagttcctggcctgagaaaggaacttaggagtctctgggaagggggcagtctcatcttcctgtttctttgttttatctccagtgccttgaacagagcatggagtgtggtaggtgcttactaatatttgttagtgattgagtgaacgtgtggaatcactggagacttgaaaggtgggcagctcagtagtaaccagtgtgtcttggacacctgactgctctttctaaatgttctgctctttacaaaactcctaggacctttgcacagttctggatacatgaggcaggaaagtgggagtgtcagcaataactgaaattaaattgtccacgaagccggtggaatgggaacttgcagatagatttagtttgatgcaatgataacaacattacagtgcaattcctactcttgagttcatctagtaagattcaaaccctccatccatagtttaaggagtggagtgcctactcaaatcttatgtacagtagcacctattaaaacaaaaataaacaaacaaaaagaaaaacactgcttttttaatcaccaaagttttcaaatccgaacattttaagaggtaagcattttaaaatatttccttctgaaacttgattgagaatcatgtcttaaagctctgcagtccatgaatcaggtgtatgtgtgtgtgtatgtatgtgagcatttattacattagctggctactgtgaagcatgtcattcaaaggttatactgtactttttcattctcactttaaattattttcaatgtccagccctttttagagaccattcatccccctaccatttgttgcccacccctcttgttttgctcctagtttttcctttcatgattcccagcatatctggatatatactgtagggacactcttgaatggcatccataccctgaaacacatgattgtgttgtattccatcaggttctgatgaaggaaagagggcacaagatagtgtttgcagtgagatctgaggagttaaaaggattgtgggatcattgttatcctgcagtctgtttgtgcttgcacgtgtgtctacataatcatatagctgtgcctacattaggggtggtgtatacttttgtggctgaggagactgagtcatttctcagtgacaccgagtgagtcactttgaatctaattctttagccctgatttccaattttatttttaacctgcatggtcatgccatttcagaggagcagatggcagggtatggggtatgggggtgagcggggccgggggggctggcatatattgagcagataatcttgtctggcaattttgtggctgaccttttacctatgttattttatttagtctttaactctctttgccttaatttccacatctgtaaaaggaaaatagtaatagtacatctatgtaaagcctttaacatagtgcctggtacacagtcaggggtgtataagtgttgactgccacctttgtctttattcctcaatcattcattctgtctgggaaattgtatttccatatttagaagataaataaatatttagaaaataaagaaattaaagcttgaataagttaaatatcccaatctaatagctaataagtggaagggctggcatttgaactcaggtctgtctgaatccagagctcatgctctttccaaagaaggtgaaattgtggtcagtagacttggaggctcttttatgcagagcatgaatgacctcactttatgttatggaaaggtcgccaaggctaatgaatgagcaaagattgaattaggcacatagttcttctctaaatgtcattcccagggctgtaagaagtgccatcatcattatttgcctttttatagaagtaaccaaggtgttcaccttttttttacaatgaagtagtagtaagagaagctcttcttagcaaatacgctaaatcagaaacaagttaatgatctcaaccccattgtggagtgctggggttatatacaataccatcatctgtgctgttttataaacattgccattattgagccaggtgatgacaatgacatctttttttattttaatttttaattttggtgggtacatagtaggtgtatatatttatggggtacatgaaatattttgatacaggcatacaatgtttagtaatcacatcagtgtaaatggggtatccaccacctcaaacatccattctttctttgtgttacaaacaatccaattatacttttagttttaaatgtacaataagttattattgactctagttaccctgttgtgctattaaatactagatcttattcattctatctaattatatttttgtacccattaaccatccccacctcccttccgctctactactcttcccagcatatggtaaccaccattctactctctatctccattagttcaattgtttttagtttttagttcccacaaataagaacatgcaaagtttgtctttctgtgcctggctcatttcacttaacataatgacctccagttccatccatattgttgcaaatgacagaatctcatatttttatagctgaatagtactgcattgtgtatatgtaccaccattttctttatctgttcatctgttgatggacacttaggttccttccaaatcttggctattgtgaatagtgctgcagtaaacatgagagtgcagatagctagtatactaatttcctttctttggggtatatacccctaagcagaattgctggatcatatggaagttctatttttaattttttcaggaacctccaaactgtccttcatagtggttgtactgatttacattcccaccagcagtgtatgagggttccctcttctccacatccttgccagcagttgttattgcctgtcttttagataaaagccattttaactgaggtgagccctgatttccaactttattttacaatgaaattatatctcattatgaaatctgaacattttacaatgagatttctcattgtagtttttatttgcatttctctgatgatcagtggtgttgagcaccttttcatgtgcctgtttgccatttctgtgtctccttctgagaaatgtcttattcagacatcttgcccatttttatttggattattagatgtttttcctctagagttgtttgagctccatatatattttggttattaatcccttctcagatggatagtttgcaaatattttctcccattctgtgggttgtctcttcactttgttgattgtttcctttgctgcgcagaagctttttaacttgatgtgatcccatttgtccatttttgctttggttgcctgtgcttgtgaggtattactcaagaaatctttgcccagtccaatgttctggagagtttctctaatgtttccttttagaagtttcttagtgtgaggccttagatttaagtctttaatccattttggtttgatttttgtatatggtgagagataggggtctagtttcattcttctgtgtatggatatccagttttcccagcatcacttattgaagagactgtcctttctccaatgtatgttcttggcaccattgtcaaaaatgaatttactatagatgtatggatttgtttttgggttctctgttctgttccactaatctatgtgtctgtttttatgccagttccatacagaaattagttttaaatgaatattttttttaaatctcatgactttttgtttgtttgcaaaggcatattttaaatctcaataactttctgtggcagaaggaaggttcctgctgtcatatctgtaataactagaaccgcaggttctttagggagatgtcaacacaaccatttaattgttgccagaacacactagcagaagtttctaaacttttgtaaaagcagtaaaatgtatttttccccaatatatgatcaacatataacttcaatatacaaaacagaaactgagttgtttggtataggtaggggtagaaggtgagccttgcccgctcagttgtctctttgtctgctccatggcccctgaaactcctcaaaagggctgtagggttccagagaacagagattgaaaactgctggcctattagaagggagtaaaatcggctaaggaagcattatgtcctttctaattgctttatttatttattttgagtttttaaacttaaacctccttttttcttattggtaaaccaggcagcctttgccttagggatgctgtcaagatacatttgaagaataatgagcatctagagagtcttgggcttgctcgtgtcatatacatgctaaatagtgtttagttcttaaaatcccagcctaaggtgttcaaagctgtattgtgtctttgtatttccgtgaatttttaagacaataatggatctatttgttaaattttagaaagttgtcagagctgtcagactacagatgtaaagtctagctttattcagataaatgttgaaatggcaacaagataattgcttggtggttaaatgacttccattcttgaaagccaaacatgatttaagaacagtaaaatgcttcccacaaaaacaaaagccagctagaaatggtatggatttggggtctgaattgaatgaaaattcatctttgtcacttactagctgcatggccacacttagcatttctgaacctggcttctttataataatacttgtctcataggttgttttgagaatgaaatgagaaaatagacctgaaaatcattaacacacagcaggctgtcagtaaactgtaattcctatctttgtctcctttcccacttccttcatgtttaatctctgtgattctaagagagaagtagacattttcaagccatcttactaaggtaatcagaataagaaaaaactgaaaattgatgtcatcctacaattagcttttatttatcttaaaatgcatattgagtgtctcctacttggtagcccttaagccgaattggagctaccttagctcttcaccttaaagggaccttagtctaaagacatagagatggacttattataaaacaatctggtaagtgttaaaattgagatataaacattttttgcattctaaaatattcccggaggtgttctttttttttttttttaagtgatactttgaggtcagtatgtaatcccttgagaattctgagtatcagatgcaataacttggaacttaggacaaaaatagtataatgaactggcgctctagagaatgaatatagatacttggattatgctgcaaagccctcttctgtcttcttcaatgacctgtaatttcaccttcttttctctgcatctgaaatttatatatctgaaacttctatactgtaatatcaaggtggggttattttgctgcatttggaaaatagagaagtaaagaaaagagcaatgaatcaaagtctttgatttttttgattgtatttcttactgtcttctaggctatttctaaaatacacttgctggtttttttttttcattgcctttatagcattgattcccaaactttgttctcttgcctggaagtgtgagggcttcccactcatgtcatgtccagcacttaactctaaatctttgttcaatgaacaaatggcagaaaataattcattaattagttcgtccatttatttgagtccttgaaatatatttgtgatctcttatccatagggtattaacaatagctaacatctcaaatgattttcactggaggaataattgaaataattgcaaatagttgatttgattagtagatttagtattaccaaagtaaattcaccttttcatcatgtaaagatcaccatgatctgcctgcctgctggtcctctcctgacttttctgctctgcctccatcctgggatgatgtaaaccaagccagctgtcataaatctctgagtttaatgctttactcagactctttagctgatttttcgtctcccaggcaatttaaggtccttgatcctcgttgttcagttataatatgtgagtccttgctgttttgttcccaagtcattttttaggctgagcttctaatctttgcaatagggaatcatttgagtatcccccttgccttcccaaatgcatggtatacacctaccctgaccaatctgtgctgcctaattctgttcacacagcccttcctgggtctgaatgaaatgcagatctattacttgagttgcatggtagttttgcattttctctccttcttgtcattctttttttttttgcatttttttaaaattatattttaagttctagggtacatgtgtacaacgtgcaggtttgatacataggtatacatgtgccatgttggtttgttgcacccatcaactcatcatttacattaggtatttctcctaatgatatccctccccgagccccccatcccacaacaggccccggtgtgtgatgttccccgtcctgtgtccaggtgatatcattgttcagttcccacctatgagtgagagcatgcggtgtttggctttctgtccttgtgatagtttgccaagaatgatggtttccagcttcatccatgtccctgcaaaggacgtgaactcatccttttttatggctgcatagtattccgtggtgtatatgtgccacattttcttaatccagtctatcattgatggacatttgggttggttccaagtttttgctattgcaaatagtgccacaataaacatacatgagcatgtgtctttatagtagcatgatttataatcctttaggtgtatacccagtaatgggattgctggaatggtatttctaattctagatccttaaggaattgccacactgtcttccacaatggttgaactaatttacactcccaccaacaatgtaaaagcattcctatttctccacatcctctccagcatctgttgtttcctgccattctaactggcgtgagatggtatctcattgtggttttgatttgcatttctctgatgaccagtgatgatgagcattttttcatgtgtctgttggctgcctagatgtcttcttttgagaagtgtctgttcatatcctttgcccactttttgatggggttgtttttttcttgtaaatttgtttgaattctttctagattctggttattagccctttgtcagatgggtagattgcaaaatttttctcccattctgtagatttcctgttcactctgatggtagtttcttttgccgtgcagaacctctttagtttaattacatcccatttgtctattttggtttttgttgccattgcttttggtgttttaatcatgaagtccttgcccatgcctttgtcctgaatagtattgcctaggttttcttctagggtttttatggttttaggtctaacatttcaatctttaatccatcttgaattaatttttgtataaggtgtaaggaagggatccagtttcagctttctacatatgactagccagttttcccagcaccatttattaaatagggaatcctttctgcgtttcttgtttttgtcaggtttgtcaaagatcagatggttgtagatgtgtggtgttatttctgaggactctgttccgttccattggtctatattttggttttggtaccagtaccatgctgttttggtacttgtagtatagtttgaagtcaggtagcatgatgccttcagttttgtttttttttgcttaggattgtcttggcaatgtgggctcttttttggttccatatgaactttaaagtagttttttccaattctgtgaagaaagtcattggcagcttgatggggattgcattaaatctataaattaccttgggcagtatggccattttcatgatattgactcttcctatccatgagcatggaatattcttccatttgtttgtgtcctcttttacttcattgagcagtggtttgtagttctccttgaagaggtccttcacatcccttgtaagttgtattcctaggtattttattctctttgtagcaattgtgaatgggagttcagtcacgatttggctctctgtttgtctgttaatggtgtataggaatgcttgtgatttttgcacattgattttgtatcctgaggctttgctgaagttgcttatcagcttaaggagattttgggctgagatgatggggttttctaaatatacagtcatgtcatctgcaaacagggacaatgtgacttcctcatttcctaattgaatatcctttatttctttctcctgcctgattgccctggccagaacttccaatacaatgttgaataggagtggtgagagagggcatccttgtcttgtgctggttttcaaaggaaatgcttccagtttttgcccattcagtatgatattggctgtgggtttgtcataaatagctcttattattttgagatacattccatcaatacctaatttattgagagtttttagcatgaagggctgttgaattttgttgaaggccttttctgcatttattgagataatcatgtgttttttgtcgttgattctgtttatgtgatggattaagtttattgttttgcatatgttgaaccagccttgcctcccatccttcctgtcattcttaatggacttctcagagtatttgactctctttctcatttaatgaacctaacagcaatattctaccaggcagataattatcaaacatttttctatttaggagaagaagtctaaggaaggtgatgggattcattcacaaatgaccctgtttggatgaacagcatctttgtgatgttcgtgcccatggatagaaaggcctcactcccactctgactggacagtgagctctgagagcagggccatgcctgggctctccagtacttcagccccggttcctagctcagctcagtgtctgcccgtggtaggcactgaatatacttattgattaaaatttattttaaaaattggttagtgttggaagttgagagttgcttttttcttcttagagaatcaatgtaagtttgaatcaaagattttattttgtttctaaaacttaccttgtagttatagctgataatatcagaaacagtgatgaaatatggatgaagtgcacatactttttatgcctgtggagtgtttatatggtctacagtcttcttactgaccacgggttcagctggacattctctcacagcagactttctaatctctgctgaagatactgagaggctggcaagtgataaggttggcttagtatcacctattgtctaacagattgccatgactgactgatttccctgagctcaagtggcagtagccccatgacttccagacagtgattctgatgggaaagaaagagctctcttcctttcccaagttagctgctccttctagaatcaaatcccttgggcttttcatgaagagtaggaattctcaacttcagcaccaattaatattctaggctggatcactctgtggtaggggctgtcctgtgcattgtaggatgtatagcggcatccctggcctctactcactgaataccactttcactgtccccctctccccagtaatgacaataaatatatctccaaacaatgtcaaatatggtctgggagacaaaactggtcccagttgagaaccacggacatagagggcattgttgaactgattgtgccagtgccagaaagtaatattgatagaagatgacctgatattttctatccttgggaaaagcctaaggggatacatacatatatcaagagtttctccttagtatgagccagtcacctagacatgaacctcagtgtccttgttccccctttatctcacaccccgtcctaaaccatttctcataacaaccattccaacttgtaaatatctcttctgccttctcatattgataagaccaaaatactcactttaagctcccagagtctagctagaatcgacaaatcagcatttgttgtgggtctgccatgtgtcagtcaccctgctaatatgcacattgatgtaatcctcttcgccaccctgagagagaagtttgctattcctgtctcaccagtgaggaaacagaagcacatatttacacagctaagtggcagagttcagaatagcgagcaggtcctctgacttggttaaacgatacttttatcttattgttcaaatatcatcaacatcgacttgaaatttaatttaatcactgtctgcttgaaaatttaatcacattacttgaaaccatggaatcctggcttgtgaataagaatcatgttaggaaaaccatatgccaagtcccagaaccatagaatgttagaggaaaagggctctcagatatcgttacattgtgaccatcttcaggtcatcattctgtcatttaacaaatatgtgttgaaggcttacctgtgccagagcctctgtacatcagtcaagacagacaaggtccttgccctatggaacttacattgtaataaggtaaacatccaataaacaagtctaataaataaatgaacaaataagataattaaggattgtgttaagtgctggaaatgaaatgaacaatgagaggacaacaattatgggagggagatctttttacatccagtggtcagggaagttgtctttgatcttgacagctcccaaaacactggacatattagtcttcctcaaaaagtgttagttcctctccataagcacctagcacagtacctggcacaatgtaggtgctacaacccttggctgtatgaaaagaccatggttttttttctttgtagccttataggtctaaaatcctataatatattgttttagtttccttttggtgctatagcaaatgactacaagcttagtggcctcaaacaatatgtttattatcttatacttctggaggtcagaagtcccaaaatcaagactctcctctctggaggctccaggggagaatctgcttttttgtcttttctgtcttctaaaagccacccgcgtttcttggctcgtggccgcatcctgtatcctcaaagccagcagcatagcatcttccaatctttctctctgattctggccttcttgcctccctcttcttaagacccttgtaattacatcaggcctacctatatactctaagacaatgtccccattttaagatcctttgtttcacacatctataaaatcctttcggtgataaaaaggtaagatattaacacgttctaggaatcagatcacctttgggggggtcataattcaccctctcgtagttagcaataaatgttaactttattcctatgcccattatattttacagatgaaaaacttggaaagctaaaagtgttgcctaaaatcacatgcttggatatagctttatacctggtcatctcatctacgtagatcatctctattctctctatatccaaactctgctcttttcattagagaattcaccacaagttacgtgtctttgttttcttcagttattgccacaagggcaggaagccaggtcacttttattcaccaaggtgcaatcatcacacagctctatgcctgacacacaatgtgcacatctctaaaatgtttttgaatgaaagaatgaatactgtattacgtgcttgggtaagaagaacccaatccctcatgaattattttgtgcagtggcttctgacaggttataaaccctcagccatttttaaagcatcaaaagaaaaagtgaactgcaatgctggcccataattgaagtggataaaacagaagggactcaacccatatctttcctctgctggtgatgaacttaaatttctggcgtgctgtaaggcactctgcatttgaacgtggtagcctgtacctagaaccgtgatatacagcactttatatattgacatgttattaacgtcaacagtcttttgagagagcttctgaatggctcacttcattatttcaattcaggataagaggaagaaaaaaggccaaaaatctaagtgcatgctttattgttgcattaggttttctctgttctgtcttagagaagtaacaaaggaggaaaaaaatcacagttcttactgaatagttcaagtggcacgtttatgggttcacttggcaagctatacgacacttaaatgaaaaaattaaatttaatttaaaagtataggtcatctccaacccttttccaacctagaagtcttaaatcaaagtaccttatgccaaacaactatgtgaaggaaagcgaaacaaatataacacctcctgctatcatggaagacaaattatatttacattacggatgtactttgctttttattttccttaatcttgcctaatgaatacactgtttggtcaaacatgttttatgtctgacatacttttcttttaggaaataatatgcttgtcactcaaggagttaatgaaatgatgagaaaatatgaacccaaagggagatgttttctcttttagcattgctttcaagatcccagatttttacccaccttataatgtatttactttggttctagtggccaaggatgtcaatattctttttgatgaattagaagctgtcagcagtccttgcaaagatgacgattctcttcttcaccctggaaacctgactagtacttcagatgatgccagcagattggaagccgggggagaggtaagagtatatgatttcttacaaatgtaattcgtgatccaggcaggaacctgtgaagcatgttccaatggactgtttaaagtcataatctcattgaactgtaggctcttgtaaaacaagggacaggttttatattcctttgacatcccccatgtctaagcatatttcaaggatcctaaatctacctatacacaaaacaaagtttcagtttttcttaaacctatcatttttttaaactgtccgtcattttaagatagcctacattcttgagtgtctcccactggtacaaaataaactttacagggatgggcttccttgtatagatcccccagtgggtagaatagtgacctaaaatgcaccagccttcagttgattgtgttgtctgaagtctctctgagtttccatttgcctctgtaatctggaaacttcattgcaactgtaaatagacctatctatttgtgtgccattttggaaaaattagtattttttttggaggcattcccctttgttcaggttgtgtctcaatagagtttaatatttcctttgtacatgtactgggtacaggtaataggcacaccgaatcagagtaatttatttattgcatattcctaaggtttttatattccagagctagttaactgctaaaaggatgacacctggaacagagaaaattgtttactcttgccaagctttgcagacttcaccccacaaacaccatatgcagctatccaagtttctttttctgttttttttttttctgtttgtttcattaaaaaaaaacactcattctgttattatctgtttacacagatactttggaaaccataatgtggcgtaaagaatggactttgaaagggacctcagacagcaacttgtctcatccctgtaacttacagatgaggaaacagtatcagaaatattagggctttgccaaaggtggcacagctcattgttctgcttggagccaatacccctcctaatgtcttggctgaagccatttttgaaggcagatgctaatatgctgaattcacaggacagccttcttgcttggcaaataagtgttaactaaagtgcttattcaggtagactcctgagtgtctcttaatgtaaaatccaaaacatagtgaggattggtcatcaattgaaaatgtctacatcaagacatggtacatggtcattccatttccccagctgagatgtttttttcgattaaggtttgtgcaagaatgtggtttctagcaatggcccttcaggtctggcatgtttaccttcttcataccaccattggaaaagatagaatccacccatccacttggctgggtttatagacacaattttgaaatctattaggctgagaaatttggctccagcccagtgagcccatacttgatggtctctttcaatgttgtacagcaagcccgaagagcctggatgaaaattcaatccactccttttgttctttactttttaatattactgcaaaataatatttgtaacttctatgtaagttacaaagtatgataataaaatgaacacctggaaccaccatctgatttatgaaccagaatgctatttttcaaattatagtgacaaactaattgtagattactaactccagtttttttttaatggaatggaaaattaatattggagtgtatgaaaacagaaagggtaaacaattgttttgtgaaacttgtctcatattttgtatatgtatgtttacatatatgcacacaaaggtaaaatgtttttcttgttgtgggtaaaaaaaaaaaagagaaacactgaactagaatattcctaaaaccacggaagctactttcaatcccatacctctaccctaccagaggtatcatctttctaaattttattgtgttttattctcttgctctaaagacagttttaccacatagattcgtagtcttaacaacttatatttagatttactttattttatgctttgtaaaaaatggtatcatgtggtatgaagtcttctgagacttgctttttttatcagtgttgtctttaagattcatttttattgttagatgcaactatagtttatgcattttcactgctgtataatattccagtgaatgaactgtctataatttatttatctatttattgtctgttcatggacatttgagttgactccaactttaaacatttttctactattataagtaatgttgccatgaatattcatatacatgtctcctacttgccttatcaagaattttttctctaggcttacatgttatgcacatattcagttttgcaagataatgttaatgtgttttccagagtgagcatatcaattttcactctcatctcacctgcaggatatgaaaatccttagttgcatcacattcttggctacacacggtatttttagatgttttacattttgcgcacttaactcaatgcttcttccaatttttattttgtttcctcttgattacatttttcactaatgaatatgtaattgaacacaatgaaaaaaattattattattattattattattattattattattattttgagatggagtctcactctgttgcccaggctgaagtgcagtggcgcgatctgggctcactgcaacctccacctcccaggttcaagcaattcccctgcctcagcctccagagtagctggaactacaggcacacgccaccatgcccagctaatttttgtatttttaatagagacaaggtttcaccatattggccaggctggtctcgaactcctgacctcgtgatccacccgcctcggcctcccaaagtgctgggattacaggcatgagccaccgcacccgaactgaaaaaagttatttagttttaattgttctttaacattactcacttgaacctcaatttgatgaatgacttaaactggtccctttctctttgtgtgcagacagtgccagaaagaaacaaatcaaatggactttactttcgagatggaaagtgtcgaattgactacatccttgtgtacagaaaatccaacccccagactgaaaagagagaagtatttgaaagaaacattagagcagaaggattgcaaatggagaaagaggtaaatagtttgcttggatgagaaaaaaatatatacatatctattcatatgaagaggcaataagaaataagcaagcagtcttaatgttaaccaaacatttcatttggtcagagttttccagtcttcagagtttggggaatgttccaatatttagactttgacagcacagtttgcttttgagataattttaatgccaaatgattccatgaaaatcaaaatattctattccaattaaatggattgtttcaaagtgtgattccttatctaacttcctacgtctgccatttctctgtatatgtaaatggagggttctgttcgcgtggattaaagaaaactttgagtgaaatccagtcactctctctagaggctctttttacatttcaggaaatatcatgagcttgggcatcctcgtacaccagaggagactgcctggccaatttggccaaaagcagctggaacttacaaaaaagattccagttttaagagacattcaggctatttttttcaggtccccaagctcaagagtgccttaccagtgtttggttcttccccttccttccttctctgcatggggagcttcaaggcagaactaagtaaggaatgtacaagaggccagccaggcctctgatagtaatccatgatgggcttatggtgttctcaggaatactgtgcacatttgtagaacttggcccgttaactgaattatgtaactcttctcggcttctccctaaacattgtgcaaagcttctggagcttttcatagtcaataagaacaacacattggtaatttaagatacttctgattctgttcctcaaggctgaggggatagatctttgaagtcagacatccaggtttttctttgtatgatacagttgcagttcgtacaacctgcgagttgtgccaaggtatcaaatattagaagcataatatgcatatacttgttatctgatcttgggacacttcagataaatgggatttttttcagatctgttaggctgacctcagctcttgaatgtttataacacggaagcagcatttttctggaatgtctccaagagaattggaaaaatggtgagatgaatgtggctgtaaggaaacaggttcttattctcaggaaagaagaaccagctttctcaaagaccatcttaattagaggttccctggtacaacaaacagaattaaaaatgttgtttcttccacctttgtggagttccagaaaatctttcctatacaaactgagtgtatagttgataaatcttactctttaagttctaaattgtctcagacaattgcatttttttcttaacattaatagcacattcatatttttctccttaatcatgccttcttcttttattctcattcctaagtggcagaatttttatatgaagaaataaaagatctgaattgctacttaatctaaaataatggaagtcctccctctgacccattctgactctgtcaaaattctgattcccatcaaaactagatagctttgttcaattaatgcaagatttatattttaagcttcataagtattctctacaggcctagggcttcttctgtatagatcttttcaatgttatttcgtgatttattcgttagaacttaaaaagcctaatgcttttccaaatagcgcacattaaagtgatggaaagtgtcctgttgtgtatcctaaagcatcacctgtactgcagtgtttagctaccagaatttgaggaggatcatgctgcctgttgtacagttgtgctgcacagtacagtgtggagcatgctgtgaagaatggactgcttgtacgattttgtctatatacaagatagttttgtttgttggaatttaaaaaaaaaattttaacaggtatttattttaatgtgtactggaaaaaatagcaattggaaaaagggaattatcactatatggcaaaacatcataaaaacttatctaagcatttcccccctccccactttcccccaaaagttcttctctgggcatcaccttccatatttctcctttcctccacaatcttttagacactacaaacagttaggtcttcccctttctggaaccttcttcacaagtgacctctcccgctgcctggctcgagtcttgccctgactttgcataaatggtgcaatttctctctaatgcagcctcccagctctgctttgcatcttcgtggactcagtcagctcagcaagaaaagggcctttgcaggttctcttatagataaattaatttttccctgccataaataattaaaagaaaatatcccttggctgaacagtaaacaaaccttcatcctttattctcataataagtggcagaatttttatatgaagtatctacattgtattattaaatttagaaaccgttggaagtatttttatttaaatcaagttttttataagcagctacagcagaaagacaattttaatggcgatttcagcttccaggagttaattcaaccttttataggacataaaatgaagaacttagttcagggtggaaaagaagaaacaccctagggacccttgtatatctgaaacgtttgacactatgcacattttatgaattattagtatcttcttaattagctgttgtcatgatgtctaacaattatgaaaaacatgtttcacagacagatgcttatgtttccaaatagacaaagacaggctttctagttcagtttaacatccttatctctttaacattgaatttcaagaaacacaactaggataatctttaattcatgataaaagtgaggacatagtcaagtttaatctttcttaaaacctttgctccaggctgattagtcaacacataagtgcttgctttggtaccctgggtctttaatattctgcaattcaactttcataatagcccagagaaagcaattcacaacaaagttcccaaacaaaatatcattgaagtccaggtgatttacttcttagtatctatccacttaaagtgattcccttcttaaaggtaagctcatatttactaattaacattttctatttctgattttttcatttttaattctatgtccattattgatctttggatacctattttgaaatcattgtcctcaataagacatttatcttttcttttgtataactagtaagaggatgagttaactttgaattatttggaatgtgtgagtaacagttgtactaatggagcaccctcccgcttcagaatcatgtgaaacattggggaagacctttatcattacagtccttacaaaactaatataattaggtaaatcatatcatcttgatgatggttatttcattcaaaaaatatttattgcacactcactctatgccaggcattgctttaaggactaggatctcagcagcaacaaataaaacagaaaaaaaaatccctgctttgttggaacttaaacaaaaaatatgtacaacatatacaaatatcagtaagtgctaaagagaaaaaagtaaagcaggaagtgttgagaggggcttgcaattttataaaagtcagcaagagtgggcctcttttccacagaaagagaatagcaagtgcaaagagaacagctccacaggatggagcatgcctggtgtgttcatggaacagtgaggatgccagtatgactggagttcactgagcaaggtgaagaatagtgagaaattacaccaacaaggcagtggaagccttagtgatcactgggggatgttagcttttctctgagtgacataggaagccactggagagatttgagcagaaatataagatctgttttctgttttaataagggcattcgggttgcctggtaagattagactgtgaggggtggaggtggcaagggcagaagcagggagaataattaggagattcgttgcaagaatccaggaaagagatgatggtagcttggtcaagcacatagaagagaggaagatgagaagagtagaaagtagcactgatgggaattgcagacagattgaatgggcagtgtaaaaaagaagagtcacagactatttgtctgacacatggtatttatctaagcagttgggagaagacagttgccacttacagggatgcggaaaagagtaggtcaaattgtagacttgttaagattgagatatcccaatggagatgttgggtaagatagaagagtctgggattcaaggagagatctggactagagatacacatttgaatgagatctccaaaggagtaactgcaaataaaaatgagaagaggtccaaggattgagccatggggaacactagtgttacaatttggatgataaaaaggaggcagcagaagagactaagaaggagtcaccaaggagctagaaggaaaatctagagtgtgtggttcaggagagatggaggaatcaactgtgtcaaatgctgctgatggggtgtgtacgatcaaagctgaaagttaattattggatttagcaatatggcaggtttgggtggtctgggcaagagaagtttcagtggagaagtcaggggtgaaagcttcattaaagtgtcttcaagaaagaatgggaagagaaaatacagagacaacgaatacaaacagttctttcaatatgtttcactgtaaaggaatggagagaaatagaatgataactggagtatgaagtttggtcaataaagagttctttctattttagatgggagaaataaatacatgtttttatgctaatacaaactatatatttgagatggaaaattgatgttgggaaagagtggaggaagaatttttagagaaatgtccttgaagcaataagaaaagaatgaccacaagtatctcccattgcatggactcacctatctgcctctgtgcccacaaatgccacccttccccagtgctaagggtgtcctgtccatactcattggtaaggccaacccttcactttgcttctaagaccccataccttctcagtcccactcaaatacattgcttccaaaagagataaaatgtagtacgctttaaaaactgaaatgcacaaacaatacaatttgtggaagtagtttgtttctgtttgcactcatctctcagaaggagtgaaaaatccaactgcagtaaacacacacacacatgcatgagcacatgtgggtgcacagtcgaggttgaatatcttggatacttctgtgtaatatgatacaaattacattatcaaaatttttatgctcacatttattaatcacttactattataatttccatttaacagatgagaccattggtaacttgccccagacaacataagtagtaagagataaagccattattaaaacctaagcatacttgctctttgcccttatattgtgttgatttctggtatctaaaggtgaatttcagggttaaagaagttaggagaggcagggcatggtggctcatgcctataatcccagcactttgggaggccaaggcgggcggatcacgaggtcaggagattgagaccatcctggctaacatggtgaaaccctgtctttactaaaaatacaacaacaacaaaaaaaattagccggctgtggtggcggacgcctgtagtcccagctactcgggaggctgagctgagatcatgccactgcactgcagcctgggtgacagagcaagacttcgtctcaaaaaaaaaaaaaaaaaaaaaaaaaaaagttaggagacaggctgagaagacaagtagtgttatgaaaaggaaaaggtaaaggaacaaggaaaattgggatgaataatgaagttgggtgctgcccagactgtggttcttatgcctctagtagccatagacttgaatcttggtacataaccacttacaagctgagtggtcatgggcaatttatcagatttttatggatctctgtttccattgttaatcctgaaggtgatataatttatcgtaaatgatgaagattaagtggacctatatatagtgccaatctttgtttttcctaatttttacttttaaatttcatattattgttttacttccagtgtaagttgttcagctaccttctatttatggcaagtgatatttgttttccctttatgactgatataaaagctttttgtaaaatgattatttaaaaaagggagttatttaaagaaatatacaaaattaagatattgtagatggtattacaaatttgacaaaaattgtgaaggtggcccgcgaatgatagcattctgtgttacttagctagtccttgtggtggacagactctaaagtctgtgatgcctgcttccttttcacaccttcccttccccctgagttcaggtgggacctgtggcttatatttaaccaatagaatatggcttttgctatcatagaatatgacaaatttaatgggatgtcactcctgtgattatcttatatggtgtataagatctcatctcagcagactggcgtcagagagaccctccttgctggctttgaagaagtaagctaccatattgtgagacagcctatgaagagggccacctagcaaagaaaggtggggtggcctctaggagctggcatccagctgacgtccagcaacaagcagggatcttagtcctacaaccacaaggagatgaattctgccaataactgagaatcctggaagcaggtctttcttcagttgagccactgatgagactacagccccaggcaagacctacatcatagcctggtgagaccctaaagcagagaacccagctcagctgtgcctgacttccaccctctagaaactgtgagataattaatatgtgtagttgtaagcctccaagcctatagtaatttattatgcaacaatagataattaatacagtgattaaaagtctgggatcacacattctgagtgttcatttggttctaccattacaagctgtgtgcccttgtaaaagttaacttatctgcaaaatgaggctaataatgggatttatctcatgggttattttaattaagtgagatcatttatatcgagtgcttatctctgtgccttttatatggtaagcatttagtaaacttcattattatcatcattactgttatcataacggctaaatacaacgtgttaacacttttattttggaatagttttcaaggtaaactttaagaaaaattttcatccagtttacaaattctttataacgcaaccattaggaatagcaacatcagtgggtcatatattgttactgtgtatgcattaatgagatttataatttaatgctcttggaagaactcggaatacatttggtaacaagtttagcatgatcaaggttcagatgtttatctgcttggagaggatttggttttagattcatctgggtataaagttatagatcaattcagagctaaacaacaatagtaacaacaacaacaaaaactgtatttgattgtccatcccagtgtttctttacccccattcaaaggaaatcttcacaaagatttccccacttaaagagctaatctcatgcagatggctctgttcccttgtagacttcctgcccaaattaccctaatttcatccccatttatatactgcagccacatccagcttgttgctgtagatgctctctcagcatccagaactccgaggatacaagaacgacaacatcctcccttccttcacagttgaaaacatgatgatgagtgtctcaaataaatgagtgtcaggactatgtgcactacccagatttctgtcctctagggctttctggtcagaaaagaaaaaaaaagaaaaagaaaatcagacttttctccacccaataatctccactttactccactcaatcttcttatatgtcacacacttgtattaccaagggtctcaagttaaggtgacaagaaaggagaatttaggacagtcataaccaaagaaggaagaaagcagattttcttctgaacctcagagccctggcgattccttgagtgtctttcaggagctaccaatgtcagtccacacttgtggtggcttttctgttaacttgagtcttaggctggatttccaaagcataagcagaacttgaggtgagaattcttcctcaagttgttgatgggtggggcaatctcaggagaaaggggcatgagaggagcagaagagaacagctaagccaaaagcatggcctcagctggacactaccttcagcctgatcccacaggggaactcggtaatcagcaggtgcagcacagagctggtctacttttcagacacgggcccccacgtcagtcagtcattggctgaggtctgtgaaggtggtgagaggtaggcactgtccgtttggctgaggatcattctgggtaccagcagcatacattaccactggtattgaattagtagtagagatgctgccaaatctgtggtattcagacagcactttttgagatgccagcaaacatgaaattcatgggggtccttgaccaagtgaagagagaacaagtacacattggaatttcttctgttttaatttgtcaagttgttcttctaattttaggatgctatttctcaaaggtaaagattccatgttgctagtgtaatcactttgagggaggacatacatgtggccaacaagcatattaaaagctcaatatcactaatcattagagaaatgtaaattaaaaccacaatgagataccatctcacaccagtcagaatggctattattaatactaaaaagtcaaaaaataacagatgttggcaaagttgtggagaaaagggaatgtttagacactgctggtgggagtgtcagttcaatcactgtggaaagcagtgtggagattcttcaaagagctaaaaacagaactaccattcaacccagcaatcccattactgtgtatatacccaaaggaatataagtcattctaccatatagacacatacacatgtatgttcgctgcagcactgttcacaatagcaaagacatgtaatccacctaaatgctcatcaatggcagattggataaagaaaacatagtacttacacatcatagaatactatgcagctattaaaaagaacaagatcatgttctttgtagggacatggatggagctggaggccattatccttagcaaactaatgcaggaacagaaaaccaaatactgcatgtttttacttataaatgggagctgaacgatgagaacacatggacatatgtctcttcttttttgagagagagactttgtcttactggtttttgcattccaaagacttattacagtgcttagcttgtggaatcctgagtttgctacaaaagattgtggatagctgattttcacagctgagtctgggtaacaacagtcaattcatctccagggtttttcaacatagaccctattggcatttagggctggataattctttgttgtagagggctattctgtgctttacaggatatttggcagcatctctagcctctacccactagatgccagtagcacctccttcaagtaatgacaaccaaatatatctccaagcattgtcacatgtcctggtgtggggggagggaggaatcatccctagctgagaatccctgggtttgacccttgatccaatattatatggtttgttgtagtgtctagggggtagcgcttccattcttttatccatggtcaaccaacttatttcagcactcttaacatcagactcttgaatcagaaaagaggcctatgtatttgaggggaagaatagagtatgtgaagactggctctcaagccagacagctgggatttagatccacttactacttcaccacttactaagtgaataactgtgtaaagcttttaatctctctgtgccttagtttctttgtttgttaagtgccagataattcctatctcaagggctattatgaggataaaatgagttaataaattacaatatgcttaggaaagagtctggacatattgacagctttaacgcatggctgttgttggcattgatggtactgataaagaagggagtgatttcaaccactggtcatcctgttcctgaagctcaagcattcaatcctgtcacctcttgggctgagagtccttgtgtgtctggggaaagctgaggggacctggtagatggcaagagatataacgataagtcccacctcatcaccaggactcagtccacctaccactgccccatatcagtctgtagaatcagggctgtattcttactggttcatcttgttagggcagttttatcaaattgatgatggtttgagagaaggtgttctccctcctttccctccctcccttagtcttactctaatttctgagaccggtttaaagatctaagggcctcattattgcctcaactgcttttgcttatttaggtagacaaagtttaatcaaaacatttctgttgccaggtcaagatgacctgtacaaagttatcttgatttattcaaaggattattccaaatcaacacgtatttcatataactcacgcatattacttcagtcaagacagaccaactttaagggaaaaaaatacccattatacaaggcacagctgaaaaactcaagtcattttatgaactattgtcatcccacaaaaagaaacttatttaatctaaaagatttctcagcagtctaaatttaacttctctgatataaagcacgttttgcataatcatcattatgtgccacatgtgggcattgtattatatttatgaaaggaattgaagtcctttgtgatacttttgctcctgctgtttttgctatgttatgataaattgctgaaaattatgcaaagtatatatcatgaatatgacactaattattcattaatggcatggagagatttaaaagctttgaagcagcctggagaactgtaaatccatttacaatctccagcttgtaacccttacaagtgaaaaatttgaaaaagatgaagtgtaagctgagtattattaattgaacttgacataccttagttgcaaaaatgatgatgcagcactgcctcttgaggcaagggccctggcttagctcacttcctgttgtatcttaggcatattttaagagcagtctgtggtatctaataactccatttccagatgaagtaattcattcattcattcatcaaatgtctgatgaatatctactactattgaaggaagggaggcattaaataaatatatcagatgtaataggtattgtggagaaatatacaggaatactgggaaggagtcactatttcatttcaggagttcaagaaaaatctctatgataatgggtgaactaagcacaaagagaaattggaatttgcatgtctaaacccaactctctaaagcattgcagaattttcccactgctgggtttcctttgttttgtgcattcctatgcaggctggcatgggtgtaggaagagtaagtggagtaactgaatgggggggtatggtagcagggggaatagctggatttggctgtgggatagaggtaaactctggtgtttgcatctaaatgaacagggaaaaaagtcaagtgcacgagcagtgttgggattttggagaggcccgacctagttgcaaacacctccctaacttgtccttttccattaatcagttgaactctcattctgggtgctacctcttcacttttgcctacccagaaacccaaagtttcttctttaaaattcttccctagtacttataattgcctagcccctctttcattcagggttgtgcgggaaagccactctgtgtcctccaggaatgaagtgttcaataaataattttacagcactgtaagaccacttaaaaggttgggcatgaaggtcagggaatccacctcccatcacttcagcctgaagcaccacagcagcaggtcacaggtgccggcgtggaagccactgggatctcactaatgcccttctgcagcacatgattctcaaaacttacctggagctgcttcaaacctcaaatctgcctgtaactacctgcctgagaaacagcctctcctttcccaccttccatctgagcacccatcattgtacactttaacccagaactttatggagaaggggattctgggaaaccagaaccaagttctggtcgcagcttctcagcaatgcagaggactcagaaggaggtgctaaggtgacaacaaacaatatagtgcagccaccagccctcctaacaggttgttccctgtcccttcatttgaggctatgctagccccatctctgtaatacccagatggtttaaaagttgtaaggtctgaaatctaacacctgcctttgagacagaggagcagctatttctgttttttaacatgggcatggctgagtaaatcacccagtcagagttcctcccagaaacccacatctttgttctgatgctaacgttaggcaactgtcttttttcaaagcatagcagaattcactgggacccaatatttaattggatagtcagcagcagccacaagcctgcctatggaaatgtccttgtgtttgtgatgcaggggagggaaaagaaacaaggaaagacaagctaaaaattccttccaccataactgcccacagaggaattaaagaaggttccctttgtcgtgtccagcccctgcagtgagagtatcaatcctcatgcacacgtgtattgagcgtctattatgttccaggcattgtgccaggcactggagaataaaaaataaatgttctagttatctattattgtataacaaacaactccaaaacttgtatgttaaaataatagtcattctttttgctctcaaatctgcaattgagcaggacttggtagggacagcttccgtctgctccataggacatcagtcggagcagcactactagtgtctggaggaccccccttttaaggtggctgactcacatggctggaatgttggtgttggctgtcagctgaaagctcagtcagggttgtgggctgtgggcctcttcacaggctgcctaggctttctcatgacatcgtggctgggttctaggagaacaaggtaaaagtgaacttttacgacctagccctagaagcatttattctgctgtactccactgggaaaggcagaatgaaggggaagggacatagattccacctcttgatggagagtcataaggttctagaagatgtgtgggatgaacagtaatgttggggccatctttggaaaatataagctgccacaatatgctcagcgtatttgaggagctcactaactagcaatgaaggcagatgtgaaacggatagaatacagtttgaaaagttctatggaagccctggggaatttcatactctgcagagatttcaggaaggttaagagaggtgacctgggacttaaaggatgattagatattcaccaagtcagaaagtagaagggcatggcattccagatgggaaacaacataaacgatggcatgatagactttgaattgaggccttagggctcctctgtgcacctctgcttcccagacagagtgtgaatcccatgaggactgcacggatttctccctagtccacagtgcctggctcatcatgtcatcttgactttcacattatatatgctcgcttagcaatttcccatgaacataattgacatcagatacaattgttctagaccttaatgacagagctagaaagatgtgcattttatagtaatttttttccaaaatgttgcaaccaaatatcatttagcctctttacaaccaaatccatcacactgtacttatatttaaataagaatcatctcaatgccaatttctttcaggccaaggattttactaaacaaactgtaccagccattacctacaaacttagccaagatcatgatggtcttcgaagaaggtggtgttactgctcactagagtactttgtttttcagctccattcttctttctctctgttttctacacatgttgaaattaaaaagagttttctagaagaccaggagtagagcaggcagaaaaatgaaactatactacacatgattttccttgaccttagcagtccagcaggcaggaaagaaaagtacatgtggtgagaccttgtgcccattagagtttcagaagtgcattatgtcgcctcttggggactctcttcctcctcagtctgtaggttcctttcttcagccagaatattcttttggattgtgtagcagtaaatcactttggcattcatctgaggctgccttgattcagtttctcagactctaataagaatcttctgaaatctagtcttttatcagtgactcatggataacatcatatagttataaaagggtaacctgttacaggcgttcgctgttcgctgttgcttctgattgttcaaggggatctcccccaactgcacgtatctgtagaaactccagtcaagtgaaaaactgttagtcttgattccttatgtcacataatgttttacttagttgacagaacacagttaagccatcaattaagtactgaattttagtttgtcatttcctttttttctctggtcccatttgtacatagcaaagctgtaccttaatgcctttttaaaattaactctttttaaggaaagggagttctaaataaactcttaaatacttggaactgaaactttctttgaatgatgtcttagtttattttgtgttgccacaacagaatacctgagatggggtaatttatgaagaaaatattatcatttagttcatggttctacaggctggaaaatacaggaagcacagcgccaacacttgctcggcctctggtgagggcttttgtgcttcgtcacatcatggcagaaggtcaaagtggaagtagacacatgcgaagagaggcaaaacctgggaggtgtcctggcttcataacaacctacttttgtgggactaatccattcctgcaggaacaggtgcagtctcaccagagtgagaccaagcaccaagctacccacaaaggcagcaccctcatgatccaaacacctctcacaaagccccacctctccacactaccacactgggggtgacatttcaacatgagttatggtggagacaaacaaaccatatccaaaccatggccagtgggtttaaattgtccaaaaatgtcattggggagtatattgactgtgataataagcctgctgttgaattatcccaaccattttttaatttattatttttatttcttctgacagagtctgctctgttgcccaggctggagtgcagtggcgcgatctcagctcactgcaaactccacctcccaggttcaagcgattctcacacctcagcctcctgagtagctgggattacaggcgtacaccgccaagcccggctactttcctgtactttccagcctgcagaactatgaactaaatgataatattttcttcataaattaccccatctcaggtattctgttgtggcaacacaaaataaactaagacatcatttttatatattttttttagtagagatggggtttcgccatgttggccaggctggtctcaaacccctggcttcaggtgatctgcccacttcagcctcccaaagtgacagaattacaggcatgagccatgcccagccacaaccatttttttaaatcattatttcatgtccctcattacttagctttgattctgtagttcatcatcatgaccactcacaagcacctgaattctctcactcctttattcctttgacttatttgccgggcaaagccccgaccatggttaaactgcatcttgttcatgcccacccctgagtgatttaatgttgctggaaaaaacatgctgactggttcactttacatcatgaccgcagtctcacacaggtaccagagaatgctcagtgagcctggtacttttgcttcgtcctctctataaaaatcaagtaactttcttcctccctcttttcccatttcactctctctctctttgcttctttctttcattgattcaattttaaaatttcaatcattaaaaaatcatatagtgcctggcacaattcaaggcacttgggatacatcagtgaacaaatcagagagcccctacccttgtgaaactcacattctagtgagggaaaccgtgaacaataaacataataaataagtaaataatacagtatgttagaaggtgataaatagagggccaggtgcagtggctcatgtttgtaatcccagcactttgggaggccaaggtggaaggattacttgagtcccaagttgaagactagcctggacaacatggtgaaaccttgtctctacaaaaaatgcaaaaaattagccaggtgtattggtgcatgcctgtagtccgagctacttgggaggctgaggcaggaggattacttgagactgggaggttgaggctgcagtgagccaagattgcgcccctgcgatccagcctgggcaacaagtgagaacctgtctcaaaaaaacaaacaaacaaacaaaaaagaaggtgataaatgacatggcacaagaaaaaccagagcagagtgtgggtatgagagcactaagggaaaaggatagtcattttaaatagggtgttgggtgggggctcactgaaggtgatgtttgaccaagatctcgaataggtgggggagttggcccactgttacttcacactgccctctctctgcccaatcaaccttctcacctgttttctctgcaccctcatccctctcaacccccctccacagacacacacacacagttctgctgataaccttgcctatactctgatagaaaatgaaaatgctcagacaggatcttctgtgactccccaccctcaaccttccctcccaccaccactctgtgtgtgctgtcgcgggagctctcctattattcgctgaatcccctctcacctcaccttctcaaggactttgctcctgtaattgtcttcctctatctctcctgcatcatcatttttcctctctactcagttgttacaaacatgctcccataactcacaagatgaaaaatctcttgacccctatactctcctctaatgaccactccgtttctcttctacacttcacagaaaacttcttgaaagatttgtctagtgtcctgtctccatctcctcacctaccattctgttttcaaacttctcagtttgggctttctccctcaccatttcacagaaaccccttttataaaggtggcctgtgatcaaatccagcagtcatgccgtctctgttatcttactggcctcaccagcagctttcctccacatggtgagtcattccttccttgagaaaaacatgcttctcttggctttggtgacatctcatgctttcctggattgcttccttcttcattggctctttctcaatcccctttgctcaccttctcttctgtttgatcttcaaatattagtcttttaagacttgatcctgggtccccttttcttctgtatctccatcttcctgtgacttttgtccagttccatagctttatatagcttctgcctgtcactcgaggctttgtcatctcagaggctttaggcagcagggtttagtttttgatctcaggatggcagaagtggaggaggaggaatgctctttgctgcgaccagggacccagataacagaagctgcatccagacacctgcctctggggcagggaaacacaaatcacacaccagacttcaaggctctgctcacagctcaatggctagagctcatgatatggctcctgcctacccaagtgggctaaggagctcagatttccctgtgcctgaaggagaggagaaccgatgccagggacacactagtgacccccacagaaaatgttttcaaatgtactttatatatacatgtacatacatattcacacacacgcacacacacacacacaccctataaagtaggtgagggtagttatatcagcattataccaatgaggaagtgatatgagttgaggtataacctatcagatttctctgttattaaaaatcataagagccccatttattgacagttttgtataacctttaggtaaaaacacttgatagactataccgctgtgtgccctgtaacatcctctaattttgatcagcatttcaccaagacataaatataacagactgaggagggatgtcataacccttcccaagtgcacatgtatacctatgtaacaaacctgcacattctgcacatgtatcctggaacttaaagtaaaataaaaaaaaaaaagacagatagtaaaaaaagaaagtatttccaaagttaaattgcttcctcactagcagaagacaccaaattcttctgtcttttctgggtcttgcttatttcatggctgttaatctctgcagcgtactaagggcatagcgattcatgggttactgattgggtcatagctgtgaatggctgtcagtgggttgatgttttgtgataataaaaagtatactgtgatgataaagttgtccccaagttcagtttatctcatataccatctagaagagtagggaaaacattatgatggtctgtaagaagtgaagggacgtttggaattttatagatcagaactgacattgcttacttctaaggagagatttagtactgggattacctacaaagggagtattttctctcccaatagatagtagaccaacctctgttcatactaattacattatttataattagggtcatcattgctttgctgaattttgagttccctgagatcttgaactatgtcttaaccttctttgtatcccgagggtccaattagggcctatgcactaggcaacacagtgcacagtagttaaatcatctttaggtgtttgctgaatgattttatgagtcattgtgttgtgaggcagataaaacatttgcttttcataatagatctaagaaggtgatggaagaaggttgtctatatcagggtgtattaattagcagtatcagatatactcccactgccggtggtcttgtggatagatgtagccatatgactacttctgttcaatgggctgggcacagaagtgttatgtatccttatgaggccctctgagctctgccttccctctggcagagtgacccatcagcatgaaccactaaatcactgcaacgagctgacctgcagtagacatgtagcatgaacaagaaataaactttatcatggcactagccgatagaaataatgtaatttaaaatattcgggagctacatataaaaggtaaaaataaacagatgaatttaataatagttttgcttatccaatagatctaagatatcatttaaacatatgatcaacatacgaattattgagatattttacattctttttttgtatatatgctaagtcttcaaaatctggtgtgtactttccacagtcagcacatctcaatttgaactagttatattttaagtgtttaatggccccagttgcctactgtactgccagtatagctctgctgtttgaagttactgatatttgggggttattagttgctgcaacataacttagcccatcctgactgctacactaaacattgattttccttggataccctgatgaagtaagtcttccagacttgacatggggatcaccagggttggtacaaagtgacaaagagtatgttgcatcaggggattcactttatggcaacatagagaacctctaatgaaatgtgtgaagatttgtgctcagcccctcagcactgaacatctcctaattgtggcctagaggagagtttactttagtttctcataaatttagccacattgaaacctctgtggtaagaggatgaatttttttctgcctgataatagtgttttaacaaggtaatcaataatgtgagaaagctactcgaagtctcgatcacaagatgttcataaattcatttaggaagcattccttctcaatgactgtgtgctcagtaacatgctgggtgctgggaatacaactgtggagaagtgtacagtctcacaaagacagcaatgaaatctataattagagtattcattagctggaatatgacctgcattagttttatatcgcggctgaagagattacttcaaacttcaaggcttcaagcaacctatgtttatgctcccacagtctctgtgggtcaggagtctgggtacagctcaactgtgtcctctaatcaggatccctccaaggccaccccagggtgtctgccaggttgcattcttttctgcagctcaaggtcctctcgcatagttattggcagaatttagttttccttgtggttgtaggtctgaggtcttcattttcttgttggccttcagccagatatagttctcagcttctagagacccctcagagaccctcacacaacacagtggcttatttcttcaaagcgagcaggagaatctctctgacctctaggctcttttttaaggactcatctaatgcattcggcccaatccacgctgcaatggaaggagcccagccatgaggctgttgcagtattcaagaagagagatgatggttgctcaaaggagggtggtggcagtagagatggagagaagtggatagattagagagaagtttaaaaggtagaatcaataagacttggtgatttgttggatatgacataaggaaaaaagaagttaaagatggctcctggacttgagctactaagaggatgattgtgccatttcctggtctggggacactgagaagaagagcaattttgccagtgaagcagatccattatagacattgatgtgtctgatctgccagtgagacaccaggtaccaggtgccacaatgaccactggctacactgatctggagctcagaagagaggtgtgggccaaagatatgagtcttggagatatcagctaataggtgacatctaaacccattacaagggatgagatcatctagggaggacaggtagaatgagactagagcctggatgaagtcctcagggacctccacttaaaggtctactaagggggagggagtggcaatttcacacacaccaatttcttgttgctgttactaatgtcactttcagggaatgaatattgtaatcatttaggaacatatagtacttcaagaggcttctctccaccaggacactgtgtgtgtgtgtctgtgtgtgtgtgtgtctgtgtgtgtgtgtgtatgtgttgcagagaggaaattgcatccgaatcagctgaagagcatttgtaaactacactcacaaattccaatgtgtccctaagggaaaagaataacagatgcaaaaaatttctttttagagacacgtgccctcattttttagagaaaactggagctcataaaagtacaagtcatttgcccagtgctacacagttggctagatgatagccccactgagaggagttaaaggagccctttaaccctcgaggaatgtacacttatccatcagtttcacaggctagattccagaaacatcaaggaattctagtgtcagctattgggggttacccaaatgtcccccaagcattcagtacctgtgagtggaagaaagaaattctcacttattgaaccagtactatacaaccatgacagctccagaatgatgctgcaaggcagatattattttcctcattttacaaatgaagaaactgaggcttatgaattgagtaatgtgcccacagatggcagaaccaagcttgaaatttgctcttactactggccttacattaatttttaggatgttaaagccaactgtatacattgtgcattgactgtaatatataattaagcattccttcaaaaaaaaattacagtggaattgagttcatgagcaaatacatagtgtgagcctctcagctttcttcttgtgaaacagcagttctgaagccagactgcattgatgagaaccaggctccattccttacttgagtaaacttagccaaggtaccagacttctttgtgctttagttcctcatttgcaataaattagaataataataataccggggttgctgtgaaaattgaatgatttaatgtatgcaaaagctttgaaacaccacctaacgtgtagtggcactatgtagctggtcccgtctctatcattactattcatttgcattcactatgattttttttaatccaagaggcttatctgagtttccaattagaaattaatatctcctcctagccccagaattttagagttttgctttgtcctcttaacagtatagttatgagaaagtgatgcccagatagttacctaaggggatacagagcagatgcaagtggctaacctgatttgatccttcacgctcagtaaattgaaacgtcaagcatatttatgcctcagggcctttgtcttctactcttctcactgactggaatgctctctccctgtgtaatagaacagcctccctgagtaatttcttcaggtctctgttcaaatgtaaccttatcaaaaggcttgtccacaccactctatctaaaatagcatctccttcccaccattactttctattttcttactctatttttcttcaaagcacatcatcagaagtattacacgtctatttattgagggtctgtctccccattagagcttgagttccgcaagagcagggatttggtctgttttgttcacagctgtattcccagcacctaggacaggccctggaacatcacaggccatcagtaaagatttgcagaatagatgagtggatgtgtgagtgaatgctaagttacagttcacacaatgggattcatggctatctgcaaagaccaccatgatttacaggtgcattgtcacctacacaactttgggacaaactggacagctccagcccctcactgcagttaagagtactaccatctgtccagttccccaggccaaataacctcttcatcattctaggcacgggatttttttttcaccctccttatttgttcagtcccaagttctttcaaacctacctccactagatctcaagtccgtctatttctcctttcgttctggttctaaccaccatcttgtctcacctggctactagaataactttcttattgaacttcccactcctatgcttcctgtggaccattctctgcaaaacatgcagcacgcacttttggaaacaagtgatccctgcctgtaactcattagtggcttcctattggccttggaaaataaatccaaacttcttaccacattgtacctggcctggcatgatcattcccagccctcttctctaatcctatcttaggtaactctctccacctcacactttacaatgttcaatcaccccagccttttagttcccggaacaatctctgggcctttgttcttgctgtttcttctgcttggaatgcttctcacttgactcttcctatgcctaacaccgtctcatctttcagatttcaggataaaagtcacctaatcacagatcaaccagcaaatcttaatcaggtgcctccagttcttttctgccacagaactatattcttttcctttttaaatacttttcataattttacatcatgcttatttgttgtctgatgtctgtctcccactctagattgtaaatcctatctactgtggtatatccatcacctggaagagtccctgacacagagtagccacttaatgaacatttttgggtgttattgaatgaatgtcacagacgaacctgcaggaaaccctgaagatactgagggaaaaaagacaggaattgggtgcttggatctcaggatttctggtggttcgggcttgtcatcaaagactgataaatccttccaaaatactggtttcttatttattaccttctcaggttataatttgagtgagtaggaatgctgtgttcttttcaccataccaccaatatgatgtggcccctcttggagataacaacaagcatatttttagatttactatgagcaccttaacggcattatgccatttaatacgattcaataagatatgcattgctatcatttcctattttacatttgaacaaactgaggcacagagaagttaaatagcttgttcaagatcacagggctggtaagaggtagataaatgaatataaatatgtgaaatccaacctcacagtccgaattgctaacctctgaggcacagatgcccacatggcattgtacctatactcccatagtggcctctaccagccctttaaatatcatgtttatcctggacacacttgctttgtatctctggcccagacttctaccctgagctccagactcatttgtctaactacccacaagacatcttctcctgggcatgtcaaacttaacttttccaaaactgagtttatgatctacctctgtacccccatcccccatgcccaaacctggtctgtctctatttcctcttctcaataaatggcaacaggaatcatgagatgtggagatgtgtgtgtttatactatatatatacacacacatgtatatatatacacacacacacatatatatatacacatatatatacacacacacatatacacacatgtatatatatatacacacacacatacacacacacacacacacacatacatatatatatgcatacacactcctttgagagatggactgcttggattagatagtggcatggcatttctcctgccttactgttgcaaggactgtgactgttacataccaaggcatggaccaaaatttattaaatagaaggttttcagtatgttcttgctgaacaaaagaaaaaaaaattttgtgtgtgaatcttatctctttttactccaggtaatttcccatgatactcgttaattttctcagtcatttttctaagaatattttcccaaacttctctaagtggtaatttttctctccccaaggttttattcccaggaatttgtattgcagtatattaatgaaacaactctatgtttcataaaaatcattttcatttcttttcactttggctcttgtgcacttggatttatgtggcaaggaatacttaataataaggaaagacctatctagaaacagcggtgtaatcatttggcagtagagaaaagaatgatttatgggccatataattagcaatcatctgtttctcatttatttctcagggctgaagttcagaaggcattcagtaacaagcagtaggtaatgccttctcagttcttccttgaaaaactgaatataaataataagccccatacactatattttcccttaagtatgtaaagaggacacacacacacacacacacacacacacacacacacagaggactcatagatattcatcgccattcaagagaattcaggtaatattttttctcaagataatcaaaaaaacctttaatagccccaaataaaatcacagttcattagtaacttaagtttgctttacatgaaggaaagcctctttatttttgttgctttgttttctaaaatatgaaattcttttaagatgaatttgtataaactgataaagcaacaattcagtctatgcatcttaaatgcatttgcaaagccatggatttatttaaacttcagaagttatcaggtataattcaaaaggaagttaaaaggtgagggtatggaatcagctctgtctggggtaaacattcagtttggctgtgggtgagccacttgtcacctctctttctcctcctctaagaaactgaaggaaaaccactctcacagggttcatatgggaataagatggggtaacatgtgaatgtgctttgacaattgcaaaacatgaaaaataataaataaataatattgttattatttaaataataagtgatttttatccagctgaataaatcaaaacagctatccttttatgcataaaatggttgagatcccacgtcagaattttagttgattcagtatgtgttcagataatgaacttagcttttctacatatagaaatgtatttatattgttctctgagtggaatattttaatatatttttaatgtttacatacatttatgaaaagtcttcaaatgattattttcccactagattgtttattttctgtaagacctaacacttacagtaaatctatggagagagtatactctaagcgctatattctgctctaaatcatttgtttaattcagtgactctatcacatttccatatagtgtcttcggtgttgcccaattttactctttctctcataggaagatgagtgaatatagaaccttataggaaagctaagtgaatttaaagaaatcccattatcatgattaaaatttccaacttaggaagccacaaagccttcccagatctgaagtatatcttcatataaagaaaaagaactatttttaggaaatacagtctttcttctgctttataacttggaaaactgtactatgtattgaaaagcaagcggcaatcttttctgaagtccaacaaatgctcagctgaaaagctgtgagaccatttcagatccccaaggcatcattgcgtccacaggcatgaaatggggcaggactgactgtgtgtgtgtgatgtttctgtatgttctctatgggcatcgcagcctgtgagctcattcacatacccctaactacttagctctgatctaagcagctgtgccgggaggactgaccataataggttactcaacagaagaaaacagtgtttacaaagagacaaagcattggccatcaaattttcagttgttactggtttgtccactccctggacaggcacctcatttgcagtaacctgcagtgttcactctaagagtcacttcattgacagtcacttcctgcttcacaggaatcacaatatccacctaggccaggtctaacggcccacatttcactaatcatgttcatggattagataaatattgtgtgtgtggtccctccatgccaagcactgtgctaggcccaaaagatccaactatgaataacagaaatattccttgttctcaggagggttatactcagggcactacttgtcccaagccagaagataaaacctcatttcagcctgaactgccagaaagttagacttttcagaccaatattagagagtgcctcccactactgatgggccctggccttcctacccttaggaaattcagcatcacaccagtctctgagaacactgcagttgatgccagtttgattttcataatatcttgatgagttgatttgtgtagagtatttataacccttgaatgtttataattcaggtcaaaaagactctgaattaaagtatcataaatgaattacaactttacatccatctgcaatttgaaaacaatttcccggagtgcaaatttaccccagctagaggaaaaagttgagcttctatttttgtcagttgtgcaaaaacaacaagaagaaacaacaaaggattgttatacaatactagtataaggaaagtctagccacaaagcacaaagtcctaacatatctgtcaacattcctaaactataaaaacttaaatgccatgcagtccagatcaatcctatatgagaaagatggggataagtaattggccactttactaatttaaactagcttggctcatattttctcactttccttctacaactgatccctccttgtggaaagtgacttccaaagagaaatctcctaattggtttttcatgtccttttgtccagaggcatagaccaaaatctgttggatggttactggggtgtgaagtcctaattttacttccctatgttctgggttgataaaaagccctgaaggaggcaaaggtctttgtccaaagaacacagctctttcaaaaagctttgccagtcacccacccagattgcaatctcacatcttttggctcccttcatctccaccaccaccaacttttgcttttgcctggatgactgagaacattccttcttctccctcatcatttattctctatgaaacagccacagtgacctttgacaacctaaatcaaagtggtttcccagtgttcctagaataaagtgcgctgcacgtcctgtcttctgctcactttctcagcctcttctgatgccactcttccctccttagtacgccttagccctttgctcttctttctctccctcaacataccaggaagcttcccagctcagggcctttgcacccagagcgctcatcccatgctctttccccagctggtgccttctcctccttaggtctcagctcacatgtcacttccacagaggagactttccttgaccccttgtccagatgagtatgtagccccctcccataactgtttctgtcattactttatcttcagaacactcaatattatctgagtcttccctccctcccttcctccctccctccctccctctccttccttccttccttccttccttccttccttccttccttccttccttccttccttccttccttctttctttcgacagagactccctcttgttgcccagattagagtgcagtggcacaatctcagctcactgcaacctccacctttcgggttcaagcgattctcccgcctcagcctccccagtacctggggttacaggcacctgccaccatgcctagctaatgtttgtatttttagtagagacggggtttcaccatgttgtccagtctggtctcgaactcctgacctcaggtgatctgcctcagcctcccaaactgctgggattaaaggcgtgagccaccacgcctggcctatccttgcttttcaacttgtttttgcctatcttctttaacatttttgtagaatgtaaatgttattcatacctcccttgtttacagctgggtctccagctgacatgagtgccacacacacagtgggatgtttgttaaatgaatacttgcacttgtaagggtctggcctattggtgaggaatgccccaaatcataaactctgtccaggtccatgcattctaagttccaactcaacttaaactgtgggagccttgaatatacttttcaatttagtttcttttttctgtttcagtcctctctaataaatagtgacattatctttgtgaagttgcatgccccatgggaagtccttggaagatatgcagaacaaatgaatgtaagaatgcctttcaggtaggtggaaatgtattttattccactctctctgctgcttcactgtaaatctaatgttctcctctctcagaacaaataaaactgaaatgcagattggaaggccattagaggagggaatctttcaaatgtttaggatatgcaaataagccttcatggccaataatgatttcatggctttttgtgaaaaattctggctaatttagttcttagcaggtagatatttccagtgcctgtaataaagaagcattttccaagtggcatttttatttccaaagtgccatttttagaagtcctgtgtactgctgctttgaacagccagaccacaggcagcagttgcacaggggcatgttttcatgttctttactgactagtctcttccagaaaaacattaaaatgtatttctgtagatacaagtgcaagaaatttcatgacagtgtgatcttctttttaaaaaaaaaacaaaaaaaaccactttttttaattttaaaaagtcataaatactttgcaaacacgaatattgatatttgttccaaggggaatagaaaatactttgtattccttagttatttaaaaggattaatttaccttcatttcacaatgaatatttttattttccctatggattatggaaaagtgatctgcatttgctatacagaaataaaatattaaacctcaaattagaaatgccaagatatgtgggtcttttgtaatggaatctgctaaaaagatggatggatgtagtcccaaggacagttctgaggggactcgaagaataacgtacttttggtttgcaatttgccagtaagaccacattaggtgacagaaatgaggcaaattggtaccaactctacagtctgtctcttaatgagctgtggaaagttgtggagacaaagaacatttatagagacagagagaagggttagggactcatttagagaaaggcaatttccattcacaggcttgtaatgtatctccctggtgcatcttatcttctttgttcattggcctgtatgtcctaataccaagtcaaaatagaggctatgatttctagcatctgttttcctggaggcaaaattctcaaaatggataataaatatagttctgatcttatgatttatttttgtatttaactgttaaaaagaaaatctgagaactcaaggattaaaaaaaggaatacatatatatatccactagggagagataaggaatgtcaatttagattccactgaaaatttttatactataatagttaaagccaaatatgtatcaatgatataataagtgtctaatgtggattaataccatattatacctaagaaccgaaagagaaagaaagaaaaccctacaaaatatgtctagatagaaatttatacacccctctccagtataaataaatctcataaaaccttctgccagaacacacttctgtaacaaagaacccagggagatgatagaaacttgagcaatggtaatgcaaagccaattctcttactacctgcaaaggattttgtatctgaagggcctggccacatcatgaataacacttctgcatgcctactacacagcagaaatgtgctgcctccaagcagcattaatactgttttaatgcagcattgagagaatgtgaaccaagcaatgaaatgaaaatgaacatgaacaattatcttctttttagatataggaattcctgcaggacaattttagaagaaaatattgttaatgtgtgacactaattgacctcattaatattgatgtaggtttacctactaaacatggcttcacttgttgtaacctgatggattaaaaacttttgctattattgtgtccacagtttcagacaaataactctagtctaaggagatacatgcatttccaaaggaggaattctcctactacatcatttcaacaaaatgtacaaacatcattttagctgaattttaatacgcaaagaatcttacctgtattcataattttctgtagattcataattttctgtacttctgaatcccaagtttagtctccatggatttttatccctataatgtttaaaaggaaatataggaatagatttcttatgagaaattacagtaaaacctgcttcttaaatacttatatgtccatggatattttttataactaatagaccttactttttagagaaatttttaggtttatagaaaattgagaagatactagtgttccaatataccccttctcccccagcctacagtttctttattattaacattttgcattagcgtgatatatttgttaaagttggtggaccaatattgataaattcttattaactaaagtccatagtttactctagggttgactctgtgtgtgtggttctgtgggttttgacaaaggcatatcatgtatccaccattgcaggatcatgcagagtagctgcactgccctaaaagtctcctgtgtttcatcaccttccttctcccccgacctgtacctctggcaaccactgatctttttattgtctctatagttttgcctgtgttttaaagctttcacaaatacgcaaaaaaattggtgatatataaacttaccatttacagaagtcagagagttcagtaacagttcgggatatacataaaaagcacctgtttcattattattccattcagtttcggttgaagcctgaaatatggaaagtgaggttgcattttaataaagaatctaatacatgtattctccattcaaactacaccaagaattttcatttttaacatttttaaaagatagatatatagcaatctgacagaataagactgatttttgtatagtttccagaattccttgattttacttatttaattcatctaaagccagggccagtggttagccagtgtgccccggtgtggttatgtacagctgggtgttgatgctgacaagtgagtgtccttcccatactggttgtgaaatacatatatatatatttatttatatttatattactcctgtctataccatgagagacgtgtcttgtgtaaacttaaaatgctatataaatattagttaatataatagcgtgcccactaaattatgtatgttgccctctgatccatctttgcattttcctggggaaaaaagctgacctcagctgaagctgtgcaaataccaatcactccaaattatcatactgcacatgctttgtaggcaaggagcaaccattaaaaaaaaattatggtaatgggtagaggaagaaatatcaatggaaactgtttcataagatttcatgactcaaaaacgcatgccctgtgttcccactgtatttctcactgttaatctctttttagttttttcttcttcacctcttacaggcttctatcttcaatctcctttccttccttgctagttcaaactgtaactgacgatgggttttcttctcgactggcttcatttttgctgttcttccaggagaaaaatctattacctgccccgccgttacaagttcatgagcaggttagtagcacgctctgtcctgacagtgtttgtctttctgttggcccgtgtgctccaacaatgacaaggagctataagctggggaagatgagcctgtgtcacatgggaaagttggctgccatgcacattttaaaatcagctgtgtctgattagcctgaggagaaaaaaagatgaaaacgtccctctccgcgtcttcccagtaacttcttcccacttggggggattgccattcatctgcaagtgtgctggggctattgctttttagcccattcttttttttttttttaatttcaatagtttttgggaaacaggtggattttggttacgtggataagttatttagtggtgatttctgagattttggtgcacccatcacctgagcaatgtatactgtacccaatgtgcaggctttcatccctcgccccctctttttagcccattctattagataaattatcaaaaatcccaatatctttggcctagatgttctcccttcccttccctttctttttcttttttctttttctttctttctttcttttttttttttgagacagagtcttgctctgtcacccaggctggagtgcagtggtaccatctccgctaaccgcaacctccgcctcctgggttcaagcgattctcctgcctccaagcgattctcctgcctcaacctcttgagtagctgggatcacaggcatctaccaccacgcccagctaatttctgtatttttagtagagagagggtttcaccgtgttggccaggctagtctcgaactcctgacctcaggcgatccgcccacctcggcctcccaaagtgctgagattacagggtgagccaccacgcctggccaatgttatttttttctacaaaaattcctccctccactatatgtaatttgaaagcttgaagtgcagatagtcatccttagctgctggctacttgacttcatgagtggggtcctcctatgttagtaatattttgttaataacatatgcagatgtatagcctcactcaggtgcccttcctaccctcttttctgccaaaaaaaaaaaaagaaaaaaaaaacccaccagatgaagattgcatctactatactttgtatcctccgaaagcttgtttttccttgttttttgaggagctagggagaaggggaatgcatcaatgatgatgtcctctaatttgattctgttgtgatcattggagaatctaatttcaaaatcttaattgatcttatgttttcattcaccctgagctgagctgagctgatggttaaactgggaaactagtaaatttctctgaaaatcctagttagttcaactctatgaaatttagaattcaggttccctctgtttatatgctatgttgagtgataaataaaagagtagttggtacattatggtgggtttactcaaatgcatgtttactcagtgaagtacagtgtgagaactgacctccaaagaagtgaaaatgttgtttctcaaaaattgcctgcgagcaagcttattggcagttctttcattaagcagttgacatgacatttggattcaccatgatttagattgctaccttgtcacactgtaatcatctgtacaatcctgatataacagtttagcctatattaatagttctcaaactccagccagcatcagaatcaccttgttaaggcacagatttctaggcctcaaccccagagtgtcttgttcagtagatctgcagtggggatggggaattttcacttctaatggattcccagctgcagctaatgctgctggtcacgggacgatgttttggaaaccattggtctgtatgataggccaagctccatcttctcattaaaatacggatttgactgactatgggacgggaaaacaaaaaccaatatcaaagaaaacctgaaggaaacacagcaaggtgaagagaggtttctcccaactttgagggctaagtggaaatatcaagtttgtacatgatactgtttcagtattctagattctaaaaagaatgtagggttgggagaagtcttattcttgtttggaattgccaagtcagcaaagtcagtatgtgtggaacagagcacattggggtcataaaacctatgttggcactggatgactttgggcaggttacttcacttctctgagcctaagtttttcacatttataaaatgatattaacttctcccctgtatggtttatgtgaggtttagtgcctagtatgtagctgatgtgcacaaatagtatctattaatacttattacatgtaataattaatacatgtaataattaataattacatgtaataattatgtctttgcagaagggtatccttctattctttctgtcgtgcttctgaatttgttatccatctgtaagtctctcctttcttctatcctctagcaactagtccactaactgttctgagtttatctgccaagtagtcattttctccatttatattctctatacaggcattggctctacttcccacacagtcacctaatttaaaacctaagggtccaggtgtggtggcacacacctgtagtcccagatacttgggagtctgaggcagtgggatcacttgagtcaaggtgttcaagcctagcttgggcaacatagtgaggccccatctctaaaaatgtaaataaaaaaaacctaagggtcattttggatgttttgcttgctcatctagtcagtctctcaaattctgcgggtgcagatgaatatttctaaaagtctatatattactcttcattcccactgccattgacttaggctgagctcccatcacctcttgcctaaacatcagtttatcttcctgcctcctttctgaccccttccaaactctcttctattcatctcctgagtagcaaatctgattattgtcacttggtggctaccatagagtgatcacaataaggttaaaagcattagcttaattacagccctttataaactgtcctcgcccatcgcttccctcccaccactctttgctccatccatattgagctcatcgtttccaaacatatgttatgctcacgtgggtttatgtgcttttgcgtatagtggtccttctggaagatcctttcctttattgttcaccaaggtgaggtctactcagtcctcaaaactcagtccacatttttgccttttgcccaggtcaaatgatctcttttctgcttttccattagaatcctatggccccatcaccctgtgctgtaatctatgatgtaggtgtctagctctctacctgggtggtatttgaaggcaaggatgactcattcaattctatatttccagcaccaagcacataggagatggagtgaatgaacaaatgaatctccacatgcgtgtatgaggattggagtagggagaaaggaaatcacgaagaaaagaagcatagaaaaaccaggtctgcctaaagtttcagacacagccttggggtgaaaacatttgctcaaacagtgggggtgggatggacaataagggcttaaaagaaaacagtgataaaaggaactatagaatctcaaggttttatgggatattaaatgccatcaagtccaaccattcatcagatacttaaacttctgctttctggtcagccagtctatgtttgaacatctctggagatagtaaactccctggcccatctgtgggcagctgtgactgttacaaagttcttctttaaaataagctataatctctatctctttagttttcactctttgattggagttctgccccctggatggataaaaaaataatctagagcaaaaaggcaaagcatgtgagaaatattctgaaatataggcaaaagggcttagcacttagcagctatttggaaattcagagttgaggagaatgaggttctgacacctaagggctagggaaaatattgttggaggtaaaagaagactggaaatcgagaggagatacaggtgtggtgaggaagttgactttttaaaattgattctgtattataactcaacagtagatttcttaggtgttggtgtcttaaaggcctttggaactgatggcaaagcagctgaagagagtggtaatgctagagaatccagtgtgggagtcagcatgaccttagcgaggggagtgtatggaatatcccaggaggagatgtaaagggtgaagagaagagcgcctgtggcagttcctttgaaaatctgcattaatgggatgggggagacctgaggagaatgaaaaagaacaattagagaagtagaaggagaatgaagagagggtggtgtcaaaggcaccaagaatgagattccacaaggagggctgtgcttcagcttctgatgatcaatcagagatgagaatcaattttggatatttagaagtttcagtaatctctgtgacagcagtctccatggagtgatggttctcaaacatgtgtcaggatcatctggagggcttttaaaaacacggatcactgggcgcatccccagtgtgtctgatttggtaggtctgaggtggggctcgataatttgcacttccatcaagatcccaagtgatacctgtgctgatgttactgatcctggaccacatgttgagaaccatcactatagagtggaggataatggaaaccaaattacagccagtggtggaaggatgagggctggatgaatcagaggcaatgagggttcactgctactttgataagtttcatggtagaggaaggagaaagaggggacaggatttaaaacaggagccaagaggaggaaggcagaggagactatgaccttgtgacccatcacatgttctccatgtgtgcagaggagaggctttgagtgaataagagcttgagaaataaactcttctttcttttatttatttttttttttgagatggagtctcactgtgttgcccaggctggagtgcagaggcacgatctcggctcactgcaagctccgcctcccgggttcacgccattctcctgcctcagcctcccgagtagctgggactacaggcgcccaccaccacgcccagctgacttttttttttttttttttgtatttttagtagaggcagggtttcactgtgttacccaggatggtctcgatctcttgacctcgtgatcctcccaccttggcctcccaaagtgctgggattacaggcgtgagccaccacgcccggccgagaaatccttctttctaaagctgaaggaatggcttacaaaacactagtctttgggctggaaacattggtgctacttctagcgcacacatcacaactacagaagaatttaggcattggaaggtactggaagactctgggccaagctaaaggaaaaagaaatcccaacgaaggtagttgattcagaatggcctctcaaaataggcttcattgcataccacatagaattaagtctttgatatcactgggatgtgtgactttctgaagcccagtgtatggtgtacatttaaaatccacgttgtcagaaaatgttgcatctaccttaactcttcatttcacatcagaacagactgatttagatgatggagagtgtctttttctttgtagccagctctgatattctaaattgaaggccacatatacaacttgccatctagtagtacatcaataatgcaacactgacctccaatatcctaaaattcccgtcgtatgaaatcttgatatttaagttagcttggagtttcatttatataagtgatattgaattttattaatccatgaaagcatctctgaaacaaacctattccctaagaataaatgaattaatatctctaaggtttctgagcaggcagagaaataaagcacttcttcataatatctttattttaaaaaatcacttgactctcataaagcatactcatgtagttcagacatggatttttggagttaatgctctttttatccatgtacttggtctattaaatgctgctttctttcttatctttggacaggcttatagccattataaattgcctatccaataaaaaggaggaatttatcatcttttggctgccctttttttttgccttcataaaatattgcaaatatagtctgtggaagatatgattacaaaataacaaatctgattattatgggtggcttgtaggtggagtctcattactactccttccttccaccccccatatgcattctgcctgacttgatcctgggtgaggcttgacagtgtgaatgctggactgtattgcattatacattcaatgcagtcacaacttatcagatgagcatacaggcaaaaggacaaaatggcttgtgtattttcatcctcgttttaaaaaactaatacatgtaaatgttccaaagcctttggagtcttctataaggtatttaggctatgctccaaatagtacccctgtgacctaaaagaataacattagctttctaagatctctaaattctatccaggcagaggcttgtaaatctggagacttggctctaagaaaatgaaaaacaaattcatgcctctgctgtctattatcattccaagagggtgtcatttactgtaatgtagagctgtgtgctactgaaagaaagaaaaggagggaaggaaggaaggaaggaaggaagaaaggaagggagggagggaggaaggaagggaaaagaaaagaaaagagaaaagaaaagaaaagaaagctcatctgtaggttccctctaggcatatcatcgctgataatgtaatctgttagaaacatgatgctattattataatattctttactggggaaaagtaggtgtcttcaaagtaggcctgcttcatttaattcagtctgattaggttatcattagtgtacagtccctcctgggttgttagtggctcaagggaaatgacctttcttctacttcctcaggctatgcccacagcatgcaggttggcattctgtacattgtaggcagtttataaaggtctcctgacaggttagcatgttgggagcaagatcctttgcacatatgtggccttttccttaatcatcatctctcctaagttgggtaagattatctcccctttagagctgagggaactgagggtcaaagagatcaaatagaaccttcccaagaccaaacttgggaagccatcgcagagctggcaagtttgtacccatttgcttatactgtattgtcagctcttcccaggtacccggaatctcacctatcatgaatcagcatgaaggaaacctgagcttaccatcagaacaactttctgtaaaaataactcacattgtagtccagatattaacttgacaagttagggccagaaatgcccaagtgtctgatccattttccctttattgatttgcctgtgtagtgtgtaagagggcttttgctcagtaaatagcaaaaatggaacaaagtgacaacatacccaaccaaaatcaatgctaaatcattaagccaatgttttctcttttctattccctattggtggaggcttcattaagtaaagtctatactaaagtccactcctatactgaagagacaaatggggtgctttctggttagttggtttccagactttaacatatctaagtaaatttcagggttaactatttagggatgtttattaggtgggaacacagacatcaatctactagggagattcacagattttgaacttttattgggaaaagagcaatctatgtagaagttcatcattattgtcaccataattttcttcgtcctagaaactatcactcaatcgagccctttgtgcatccaaggcattgtgtaagcacttgatatccatgatcatgtttaatccttaccattgccttgttctatggattctgttggctcatagaggtttaattacttgcccagcaaggtctataaaactggaatgtgaatcatcagcttccagctgactccaaagtccatcattgtatactaaaggttatctaacattgtatactaaaggttatcattaattcaagtttgaattaatcacataagtgacataatcaagatattatcacccaaatcaccaacaacctgtagtatctaaagaatatctggctgatcatcattttagagatgagagcactaaggttaggtgaggataaagggcttgtcccaggccacactgatgtatgaccacagaatcaagagtccaacttgaatcttatgctttccagcctagtggcttttgcattatgtgcttctgtcttgcatgattgaagggggccctaagtgaagtctgagtgtggcaaagtttggagacaggaatgtgtttgtggaagagcagactaggggagcactcactcattatcctgccacagagagatagactcttgttcccagagccacctaactgggaggtgagaacagcatgtggaatggcagccttaacagtgggagcctggctagctgttgccaggtcttgaggagaggatcagaccgagagtgttttaagaggtgtattcatttcctattgctgtcctaacgcattgcgacgaatttaacagcataagactacacaaatgtattagctcacaattctgtaagtcagaggtccaggaagaggaggctcaactggtttgtctgttcagggtttcccaaggctgcaatcaaggtgttggtcaccctgggcttttatctggagactctggggaaaatctgcttctgggttcatttaggttgctggcacaattcagttcatgtaatcataggactgagatctccatttctttattggctgaaagtcttcctcagcttctagaggctgcctgcattccttgcctcctagctcttttcatcttcaaagccagcaatggtgggtcaagtgcttctcaaactttgaatctctctgattctccttctgccacatccctcctgctagagaaagttctgctttcaaaggtctcatgtggttaacttgagcccatctgagtaattcaggatgctccccctatcttaaggtctgtaaccttccttacatctccaaagtcccttttgccatgtaacataacatattcacaggttctggtgtgtacatctttgtgggggcaactctggtaaccagaggaagacacaaactgctgaccatgtttgagtgtttggtttagtcgtagtgaagtgcacacagcatgcacagccgtgtgtaatggaacctggacaacatgccttgtccacctgcttctgctcaggctcctcagtgaaggccagttcacaccctccagcccccatgcccaaccagtgtctcggggattttatttatttatttatgacacggagtcttactctatctcccaggctgaagtacaatggtgcgatctcggctcactgcaacctctacctcccaggttcaagtgattttcctgcctcaacctcctaagtagctgggattacaggtgcacaccaccatgcctggctaatatttgtatttttagtagagatggggtttcactatgttggccaggctggtctcacgcctgtaatcccagcactttgggaggccaaggcaggcagatcacggggattttatttttaagatgttcttttgaatgtgtttcttccaccacagttttttaaaaagcccagttcctttgctttccatcacttttatgttagtcctgtgtggtccttaagaaattattaataatgcttgctatctgtctggcagcttctccaaagcatttcatactcaccatgttttatgagcccactaaccactctgtaaggtcagtaagatgataatgatgataatgatgattattgttactattacctctattttataaccttggaaaagaaggctctgaagggtaaataacttgtggaaggtcatacagctgaggcgcaagagagccaccccagttacaaatctcagcttccttttaccatgccaagcagcatcctcttgcctccttcttgcttcctctttttcacatatttcaattaattaatcattttaattaccctgttctactctcttttcatcatctccacatttcaattaaattgtggtgccacaggctggctgctgaaagctgccatttcactcctatagagtagttatgcctgattttttttttttacagctttatttgtttttatccatgctgagcactgtacccagctggattcaattcatagtcatcgcacacagagcccagattctgtgggaatgtgaattttacaaagtgtgatctgattagtcctgcagactggagatgtgtgggaggtaaaagctctataataaaaaacctttgggccaatggcctctttcttgaatgagttttaaggcaatcaaatgaaataaagccaagagccatggggaaggccaccatcttagctgaggaagtctaatttatgtgtccatataaggactaaatcattgagcatagactagtgatagatgctggtgaaacacaattaactttgaattaaaaagcaaaaaacagaaatgttaagcggcaagctggttgctcaatatttttatttttggaaaaaagagaaaaacagtaataatagccagcatttcctgtataccagacagttctaaagactttatatatgtattaataagttcatcatcacaactctacgaattgggtatcattatcatgcccattttatagataaggaaactgaggctcagcaaagttaaatcacttgcccaaggttttgctgttaatattaacagagccaggatttgaatctaggcattccagccccatagttcatgttgtcaaccactgtgtcatgctgcttctctaaagcccatcatctcactatattttaagtatatttcttttggggcggagggttctcttggggaggagggtcctagagccactgtgagattcttttcagtttgaccctttgggagttctgaagaaggacagccaccaccaagcagagttgggatcatggtgaggctggaacaatgctgagaataaaggagatagtgaaagagaagtttaccattattttttagtttggaattgattggttatataaataatattatcttcagctgagagtttcactgtgatggttaattttatatgttcaacctggctgggctaaaggatgcccagatagctggtaaaacattattttggggtgcatctgtgataatgtttccagaagagattagcattcaaatcagtagacttagtaaagaagctgatcctccccagtgcaggtgggtgccatccaacccattgagtggaactagaagatggaggaatagtgaatttgctgctgcttgagctgggacatctctcttcttctgcccttagacatcagtgctcctggttctctggccttcagacttggatcaggatttgcacggttagctcataagattctggagagcaagaagtcccgcaatctgcagtttttaagaaggaggcctaggaaacctgatggtgtaagtcccatttccagtgtaaaggcctgagaactaggaaggccaatgtccaagggcaggagaagatggatgttccatctcaagcagacagcaaattcaccctgcctccacttttttgtcctattcaggtcctcaatggattagatggtgcccacctgtgttggtgaggaccaacttctttactaagtctacaaactcaaacactgatctcttcaggaaacaaccccacagacacacctcaaaataatgtttaccagctatctggacatcccttaacttagccaagttgacacagtaaattagccataacattcactgaaaagaatacattgccatgtaaatatattgttttaattaggaaaaaaataaagcatgaccaaattccacgtgttttcagttaataaatttagaaggtattttttccagtagtatagacacttgaggtagtgctatcattttaaagtttggtgtggtttttgcgccttctggtgtttttctgtgaacagtgattgggaactgttcacttggaagccagatgttttcatcagcagaagtcagtggaaccgagggaccagggagatagccagagagaaaactgtagctgaaaaccacttttaggatactgttgttttcattgacttggcttcattagagtgacacatgtgtgtcacgatgccctagcaccatgagaaccatggagcctgcttaaaaagagatcaatgaaagccaaaaatccggctgcctgctgagaggctgctcaggggaggtgggagaggcaggaagcaaatcatggcatggagctctctgcacaactcccaggatgtgctgccagcaccccctcccgaaagttaattacagctagagctcttctctgacctcagatgttttccaaacacaaaatgaattttttagaacctacagaatgtaagttaagatctctgctgcttgcttaagggactgttggaatccttttcagagctttccagccttgttaggactgcttggtcatttattattggcatgtgggtggacatctaactcacagctgctatttcacaaacagtaataatattgaggccacttggtgaaatcaaaacaacactagagttctggctgtcttctttccatctataaaacaaggatatcctgagtgcagtgagagggcctggaatgtgtggtatgatagttgtggctctgcggagaccttcctcctgtgtttcagggcattgctgacatgctgtaccctttggtcttgccttccatgtaccacaggatcgataaacaaataagcaggtttcggagatggttacctaagaagccaatgaggctggacaaggagacactgccagacctggaggagaatgactgctacactgcccctttcagccagcaaaggatccatcagtgagtgttccatgttaaagccccatctcactaaggatgtgcagctgtggtagagcctcaccctgcacgcctttgattcctgggcatgaggaaggaacagcatagtgcccttctcccctaaaagtcttgtgagtgttcatatcccttttatttcagtcaggggaagataactgctgtaaccaacaatccctgcatctcagtggcttaagatgatacaatgcttgctcatgtgtgtgttgggtaaatgatcttctccacagaaaggcagtgacccaggctctgtcattctcattgctctgccaactccctgtgcacggagccccctgcaggctcatctgcatctagccagcagacaggaggagtggcctacaccttttcccattgaaaagagggttttttgttttccggtttttgttttatcttggttcacttctcagttcccctttcttcagcagttcactgggttgccttaggaaaagccacatcacctggcagcccacttgctgagtcatctgtcagattgtctcagaatggttatttgtcacttttgacatggggggaggaaaaacaagttggctaagtcactgagcctgtgaggaactgcaaaaatgaaagagaatttactctgaagcttctgagatgacaagaaatgatggctggatgcagggcagggcaggcaggaggacagaaaagcctgccgtgtgctggagactgtaaacaataggagaaacacagcctctcagtggaggcagagatcaggtcagccccacctcccttgcaacaagatcaggaattccaggccctcttgctccagcagtagtgacagcctccataaaaatgacttacctggagggaagaaaagggtgatggatttaaaaaaaaaaaaaaaaaggttgctgattttgtgagaaagtaaaccaggctgagtgctgtggctcacatctgtaatacctgcactttgggaggcagaggcaggcagatcacgaggtcaagagtttgagaccagcctgaccaacatggtgaaaccccgtctctactaaaaacacaaaaattagctgggcatggtggtgcacacctgtaatcccagctactcaggaggctgaggcaggagaatcacttgaacctgggaggcggaggttgcagtgagccaagattgtgccattgcactccagcctgggtgacagagtgagactctgtctcagaaaaaaaaaaaaaaaagaaagaaaaacaaaaaacgaaggtaagccaaatggcagttttcaagaagttgcagggagtgccaggtggggacatatttcagcaacagaaaaacggttaaagtctgtggagctctgcagggcaaaggggaaaagaaaaatcaaagaatagatgttctgaatcaaaaatgtgtaacagtaagagcagtctaatgcaggggaagcaactctgtacgcctctgaaatagccgagctgatccccacaggtcagattaaagccaacccagctgcagtatgtgaacatttgaaagggtcattgaagcaaacatggaattcacagactggcctcaaaatcttagttcgatcctcaagagaaagtgggaactggaagggacataatgttaattcagagatcagggtgttttcttaagagaaaaagacagaaaaaagctgatacgttcccattcttaatttaaacccctaccatgtctctcttgttcatcttggaagttttttagacaatgagttgtttccctaattcttccggaatgatgtctggtttacaggcaggttttccctgtgcttctacctgtttatgatagagttcctagcacagtgcagaagggtatcaccaattttggatgatggatggatggatacattgataggttgctgggtgggtgggtggatggatggatggatggatggatggatggatggatggatacatggataggtcactggatggatggatagatggatggatggatggatggatggatggatggatggatggatggatacatggataagtcactggatggatgagtggatacatggatacatcaccagatggatggatgggtggatagatggatggatatatggatggatggatggatggatggatggatggatggatggatggatggatagatggatggatagtgtatatggataggtcactgaatggatggttgggtatacacatggataggtcaccagatggatggatggatggatgggtggatggatggatggatggatggatagtgtacctggataggtcactgaatgaatggatgggtatatacatggataggtcaccagatggatggatggatggatggatggatggatggatggatggatggatggacagatggatgaatagatacatggatgggtataggagtggttgtgtaggtgtataaatgaatagaggaataaatgaagtaagtggtatacactctgggattttatttcacttcaaagggaggatatatgagatataggtaaatggaagaaaaaaatgaatgaatatatggatagatggatggataaattagtgaagtatgtgatgtgtgctctggtattttgtttcacttcaaagggttataggtgtatggaagaggagggtttcccacctcctcttttcatgctgtttatattctacagtgttcttgctttagaacaatacttctcagcgtgattcttaaagtcagaagcccttggatacccagtagaatttctagggactagaactgagaatcatatttttggaagtatttaaaaatatataataaatgagggatgattagattagggatatttagccaactctctcacatatttgagaagcccttttgacatgctttggtattaatttgtcaaataattgatttattcaatagtcactaatttagtgttcacttcttgccaggcactgtctgggtacagagggtataaagataaacaatactcagtttggaccctggtgtagtaaagatgcagactattttaaataattgtaaacagtatgatgggtgtgacttaagagggggaatactcaattctccagatttggagggaggttggtaagtgatgaggattgatcacaagagaatgcttgatatgggtcttgaaggataagacttgcccaagtggataaggggcgaaaggcatcccaagaggagacagtaacgtgtgtataaatgaacgaaggcgtgaaataggatggagtgttttgaggaaccacaagtagccttctctgagtaagagcataggtttgtgaggaggacctagtgttgtttgaaaaaagagagtgatcaatggaagatgagatatcaagacaggagaaccaaggaagaaaaagcagaggacagctggaatgaatcaaaccgaagaaccagacctcagtgggaccaagagaatagaggcaattttatcgtgtaaataagaggtgaaaaattaaataagtgtcttgaatattatgagtggtgaggatttatttctctttgaaaattgccatgtcacatagatagcatccctcgggtgtataaaagtatgacttgaagaatgctggctgtcaaattggaaacaattgttgggtacaatcagaaaagaattccctaaggatgttttgagagtgacattaatggatttaaattaatcagaagtagctggttaataagctctgggaattatagcatgatattcctggctttccaaatatagtccaaaatcccatgtgacttcttagttttccagaatgtttcatattgtgtttttcttggaatacaagctaataatagaaatgtaagtgtgttcgttagggggtgaggtgggaggagggcatgaaaatagtaaaaaaaaaaaaaaaaaaaaagagaaaaacattgaaagtttaataagtgtttcatcagagacatttcccactgaaaaacctttcgagattttccaacctccacccccaattctggttgagatgtactcatctatgttttagtaatatttttcttttccttaaccaatattaccacccattttaattactttctccaagtctagagactccttgaaagactatgcctttctcactcatttttgaatcccatagtaagtgcttaataatgattttttaaatgaaaaaataaatgaatagatagaaacaaaagtaggagaatcatgtaagtaaagaataaagctgatgtgaagtcagctgactgcacactcatctcaaaccaaatccaagataccttcttttcaaatgtagactacctccattgttccctgtctcagtaaacagcactaatatttgtccagttgctgaaactggagtctggaagctattctagacacctctctcatctctgcttcttacaagttatacatctccacggattgatgattttacatcctaaatatctctatacttcagactttgtcactgtatttcacttgaaattcagaaataatataacaggtctccctggttttactcttgtcaccaccaatccattctctcaggtgcatactgcatggtgtcttcaaaatgtgcatctaatcatgtcacttcattctctttaaaaactttagacaccaaaattattactatgacttacaagctcttaaatgcctacctgcactgccatcccctctccagcctcatctgcctttcttgcctcccactcttcatttgttgtgatccagacacatgcagcctctcctctctcagctctttggatatactctgccccaggacatttgcatatgttgtttcctctcctggaattctcttccgattctttccttcttcatgtagtatgctgttattcatcctccagaactcagctccaaagactcctgctatggaagcctcccctgaccctctccttccccactaatccttccaaagattgggtctctgttctatactgttgtagttaatgtttcctagataacatttttttaacaattgaaatgctataattatttgagtagcatatgattaatgcctgtctctctaggtaaatggtatactctgtggagccataggccatatctgtttttgcccatgattgtatctccaatacctaacacaatacctagcataaaattggcacacaatgctggtcttctaaatgaaggagtgaggattgaagtcagaaagacagcacagaataatctaattgtaaacctttattctttaactgcactgtacaaaaatattaaagttgagaatctattaaaaaacaaatacctgccagccacagtgtctcacccctgtaatcccagcactttgggaggctgaggtgggaggatcacttgagctcaggaattcaagaccagcctaggcaacagagtgacacccatctttacaaaaatttaaaactagcagggcgtggtggtgcatgcctgtagtcccagctacttgggaggttgagctgggaggatcatttgagcccaggaggttgaggctgcagtgagttatgattgtgccaccatactccagcctgggcaacagaatgagaccctatctctcaaagcaaacaaacaagcaaacaaacagcctagcattccatttgaaaatatatctgtatttaaggaggaagaaagcaaacctgtgggtgtacaagtcaacatacaaatgctacttggtcactttatatgagcttaccaaggtgggcctacaggtagaaaaattcttattgtatgccagacactatttaagaactttaatacaatagtttgagggctgaggtattattattatcaccaatttacggatgaggaaagtgaggaacaaaatggtcaaagaacctgctataggtcgtacacctaggcgaggctacctgtctaaacaactcccaaatatcagcagtagaacagcatagaagtttacttgttcacagcactatctagtgtgggtcactctgggggaaggaggcatatgtctctgattcatgtagtcattcaggtacctaggctactgttatcttgttattctgccatcccctaaatcccttacagacaaggaaaaagagagatgagtgattttttaggaaatttttatgggccaggcctaagagtggtatatagcactttcacacacatttcgtagtctagagcttagtcatgtagtaatgctgggataactagtctacctgtgtgcccagaagaaaaaaagaagcagatttgccgaataaataatcgcagtctgtctgagtgatagagcaggaattcaggttcgaacaggaaggctctaggtctcacccttataagcattacgctctattgtgagatttctcagcctcagcactaatggcactggggctgaataactccttgttgtagggaagagtcctgtgcagtgtaggatagtaagcagcatctttagccactagatgctagtagcattccccaaccctttagttgtaagagaatcaaaaatgtttccagacactgccaaatttcccctggtggtagtggtgggatgggtacaaaatcacatccctttcctccagccttgaaaaccatggttctactgtctttcatcacatgacaccctttaggcagggccacccattctctgtgataaattaaactctatttgaatctaatgactatgacagccaagtccatttaagaattaatttatctctcttcacctctgtgcctgtgaatgttgccctgcttaagtatcattgcccttcattcttaaaatggcattagcgatgacacccttgaggcaattactttctaaggtcaatacccataataaaggttttctgctggtagacagaaaaaaggaaatatgcaagaagagtcgtgttactttttataatagatatacaggacattctttcaggaaatagatcaattctgattgtctttcagaaaaatgtgctagatatagacagaaaaatgttctcccctgcattttctgtgtttttattattaccattattttatttttgtaaacacccataaaaattgaggttaaattaaataccagttcttaagagaagaatatgaaatttatgctatgctacgtgcacatatgtttaaatatatattcactcatccacgtattccataccagttgttgctctgggtgcttggagatcaacagtaaacagaaaggcaaaaattcctgccctcctggagcttacattgtagctgggtgtaactggtaataaattataaaccagcagttgtcagtgaggggtaatttgacaacgtctagaaaaatttttggttgtcacaagttaggagtggagattgcgactagtgtctaacgtgtagaggccagggatgctgctgaacatcctgtaatgcacccaacagctccccacaacaaaaaattatccagcctcaaaagtcactattagtgtgctgaggtaaacattttttgaagtcaatttaaaagcaagtgaaaaggggataaatgctatgggaacagagaaaaagagggtggggtgaggggaatggggaggactgcatgggggtgggggtgcaggttgtatttccaaaagacagtgtttcagttcttcaaggcaggcctcctacagaaggtgtgattggaaaaaatcttgcaggaggtgagaagggcagagagagttccaagaggggaacagaaaacaaaaccaaggccctaatctgggagaagctctgattgtgtttggggaagagaacaaagaccttgtggctggagcagaaataccaaggagaacaacaatagtgatgagttagaggcgtgggagggagcctgatcctgtaaggcctgtgggcttttacagaggaatgacgtggtctgacttaacttttgacagtgtcattctgactgctctggcaactgcagtcatccgtgtgaagcatgatgtatttatattttttcaagtttctatcttttcaaaatcaataatgaaaatacatgccacatataactcagcattgacccatttctttgcaaagcttttgtgttgtacacaaaatgttttaactcatgtactgtgcatgtatgaaacagatattattgaaagaccccttgaaataaagtctgcctttaaaaggcacagattttatgtgaaataaaatcacatggctttagactcctactttcatctcctactagaccgtgagctacctgaggacaggagctatgtgcctgggagcaaggggcacccagggaatgtttgtgagaccaaagagaacaggaaaggagcaaggcagaattggcattgttaccgctgggggacagagccagggctctggagccagcttctctgatcttgatgcagcatctaaaaactgtagaatatttagaagagaagtgaaaaatgcggtcaaccacaatggtcaattgtggtttccatgtccaacttgaactttcccttgacttgattcagttttggctttagttctgctaactgataatctatcttctctatcaaacattttacggccattaaattctgttatcaggattcacatctgatactaagatatttaattcatgcatcacactttttaattatgtgtgatgtgtagtatacaaaatgggcattataaaaagaccacctgacacaaaatttgctttcacgcctttttctgcttctatgctgtgagctagggcataagaaaaaagtctagagaataacaaaatgacatagttctttgtgcctaagaaaaagcgctaacaatggaaatgttggtgctggggtcatggagggtttgtaagaatgggaaaatgttggctgggtgcagtggctcatgcctgtaatcccagcactttgggagaccgtagcaggtggatcacctgaggtcaggagtttgagaccagcctgccaacatggtgaaaccctgtctctactaaaaatacaaaaaattagctgggcgtggtgatggatgcctgtaatcccagctactcgggaagctgaggcaggagaatcacttgaacctgggaggcggaggttgcagtgagccgagattgtgccactgcactccagcctgggcaacaagagtgaaactccgtctcaaaaggcagtggggcagggagaagaatgggaaattgttgctggagggacagtgagtgggagattctctgagattctctgtaacatccctttgattgtcttcttatcttttgactgttctcagcagaaaaggcagcaagttaaagccagtagtgatcagccaatcaaacagtggtagcaccaatggcaacaataaaaatgatagcaaccactgtttactaaacaactccttcattccagggttacaccataggtatattacaagtctgtgagggtaagggtagaataatgatggtcagagaggctgagtgacttgctcatggttgctctggtcactgttagatgagtgaacagaaagaagtgtcttttcagctgggtgtggtggctcacgcctgtaatcccagcactttgggaggccgaggcaggcggatcacgaggtcagcagtttgagaccagcctggccaacatggtgaaaccctgcctctactaaaaatacaaaaattagctaggcgtggttgcgcgtgcctttaatcccagctactctggaggctgaggtaggagaatagcttgaaccctggaggcggaggttgcagtgagccgagatcccaccactgcaccccagcctgggacagagcgagactctgtctcaaaaaaaaaaaaaaaaaaaagtgtcttttctccacagtgctgccacctcctgtaggtgccacataaatggagcctaaatacaatttttcaactgccttaccctagggataagcctgtgcatgtgaagacatctgatttcctttggaatttattgttaaagcattcgagatgcattaaacagacatgaaataaaatggtaaaaatataaatgaatattctgaaccaaggagaatataagttaaagtaggcattcaagttcagggaaaaagtaggctcagatttgcaggcctcagtggcctatgtatctgtaatggttgacgaataaactagaaaattggcctttacaccaaaggggccaagcggaagggagaaacgtagtaactcatgtgattctgattgtcagagacgaagaaaaccaataccataggtaatgggttgctttttgactctgaaataaaattcttgcacagggtcattggagtggacagtgaaatagtgatatggtggacagtatccctggtaacctctttatcacaggtgccttgcaggacttttctgaaggctgtttctggtagtcccatcagcatggttctgaagacttaactgctcatggccataactttctgtgagagtttaggcaaggtatccagcaaaatactgcagtatacctgtgatggttaatactgactgtaaacttgattggattgaaggatgcaaagtgttgatcctgggtgtgtctgtgaggccaaaatagattaacatttgagtcagtgggctggggaaggcagacccacccttaatctgggtgggcaccaccaaatcagctgacagtgaacataaagcaggcagaaaaaacgtgaagaggcgagactggcctagtctcctagcctacatctccctcccgtgctggatgcttcctgcccttgaacgtgagactccaagttcttaagtcttgggactcagactggctctccttgctcctcggcttgcaggcagcctattgtgggaccttgtgatcatgtgagttaatacttaataaactcccctttatctatctatctatctatctatctatctatctatccatcctattagttctgtccctctagagaaccctgactaatacaacacccaaactaatctagttgtctttgttgtttgaactgtattctttaaaaactaaatttgaaaactgatcaaaaagcaaataacatcacattctagttgaaaatggttccatgtttgagaaacaatagaagctaaccagtgggtacacatctctatacgtcaatgcataaagcccttcgtcattttatatcttatcacaagagctaggcctacaggctgcccatcagccatgattgtatggccacctaaacatctgaccccacagaaagctctctcacactagccagctatggaaactcaggttgtcaatattagagtcagtcattccaggaggcccctctcaaaactcaatttcagaaaaggtcatttcaatagaaccatatgaaatttattataggaatatgatagctaacattcatatagtgcttagtgggttccaagtacttcacggttataaactcatttagtcctgtgagtaaggtatcgtcattatccccatttttacagaggaggaacctggggcacagaagggttaagtaacttatccaatgtcaaacagttggtaagaggtagggcctggatttcaaggccaagcattctggccccagtcttatctttttaacattgcatgttagttttctatggctgctataacaaattatcactgacttaactgtttaaaacaacaaaatttatcatcttacaattctgaaggctagggtgcaacatgggtgacactgagctaattaaggtatgtcaaggctgcactcctttctggaggagaatctatttctttgccttttctaatttctggaagctactacattccttagcccatggcttcttcctttatctttaaagccagcaacggtagttgagtccttctcacatcacatcactctgactttgcttctgtcttcacatctttttcttctctgactcttttgctttcctcttccatttttagggacccttgtgattatattgtacctatctaaataatccaggtaatctccctgtcttaaggtcagctgattagcaactttaattccatctgcatcattaattcctctttgccatattgcttaacattctgaggatgaggatgtggatatctttggagggccataatattgcctatcacagctgtacaaatttgccaatccaaaaagtgccaagggttgggacagaggacaggaaagttttgatgggaaaaaagaaggaaagaaaagagagagggagagaggaaggtggcaataggatttggggacattaaatgaaatgacatatgtaaaagacttagggcctggcgcgatggctcacacctgtaaccccagcaatttgggaggccaatgcaggcagattgcttgcagccaggagtttgagaccagcctggccaacattgtgaaaccccctctctactaaaaaaaaaaaaaaactttagccaggcatggtggtgcaagactgtagtcccagctactcaggaggatgaggcaggagaatcacttggaccagggaggcagaagttgcagtgagccgagatcatgccactgcactccagtctgggcaacagagcgagactccatcttaaaaaaaaaaaaaaaaaggcttagtccagtacctggcagatagaaagcactcaacaaatcaacaaatgatagttatcattatcattattaccacaaaccagcagtatactgagaatcctttggagaatctgcaaagttgcagttggtgtgtaatgggaaagtttgaggtgacagagactgattttgcaaaggctcataactgacctgaactggaattgctttgcttttaagccaaatgttactcagtgttccagatactttgccatttaacattttatgtgtcagtaacatatgactacttgcttttaaactctcagcatagatatcggaagatagtgattcttctaacctgtgccttttactgtatttttgtttcaaagaactgaagagttttttttattgttttcatcgatctgaaatctttagagaatccttcaggcagaggtaccaagattgatttacgtaggattaaggttcttttagtgcctcaatgacttaaagcagtctctgaacacttattttattgcagttacttattcggcattaggatcctcaatattcaggttgtttgtattgatccttagagtcaggggaaacatatctatgttctggaaagtcttaaactgaaatgaaaatgaaaaaagccacgcatcttgagatttgtgcttctcaagatcatacagctccttttaagtaggacataatttaatgactttaaagggacaaagaggtcacctaatcaggtgggaaaagcatacctctgggtatctggaggcccagtagttagttgggtctgttatcttaatatttgtgagaacatctgtgaataagtcacttggaaatattttattacatttatctatctgtaaatacatagtttgtttttctgcttatcagttcattcatttaacaaacactttcaatgcctattatgtgccacatattgtactataatagaaaaatatatacaatatgttgatgtatatttatgtgtgcatgtatatttatgtgtgcatgtatatttttatttaaaattttaacttcagtatgttaagttcgatagtcaagaggctattttcctcatcagaatggtaaaaggcaatttaaaacacctataggaaagggaaagagttgtcaaatttacgtacagtaaaataaggaggggttaacctaagaggaaggaagggaactaggatcccatctgttgctatagtatacgtatgtagtcacactgtgcattaagtcttaggaaacaacagtggtgagaggagacaaggaagagcagaggtgaggaaaacctagtgcttcacaggcaggtagacactctggtgccccattggtcagtattctgtgccaggctgtgcactgcacgccctccacattatcttttttgacccttgcaaaaaccctgaaacataattttacagaaggaggcgcagaaactcagaaacattaaatactttaagccagggttacccagtaacaaatagacttggagttagaacccaaatctgtctcattgcaaacccatgctccttccataatacaacctgacatatattgactgcccactagacaccgggctacctgggaggctactggtattgttatttccgtttagagaaatggaacacggaggagtaagtcacctacctgagttgcacagttggtcaaagtaggaaaacaccctgagcagctgggggagggtcatttctgggcctgcttctgactcacatccaggagtggcactggggagaaggagttgttaaacctgtaaactgtgaagatggtagtttattcaaataaccactaattcaagaccacgtcttagaaatgtctttgtctgtggggaaaaacctgattcttctcacttcccactttcctcacccctgatacaacacccacaccatcagtttggtgtttcccattctagatgagtgatttcaccactgtgtgttgaccaaccttgacgctcccatcttcctcgctgcccaccatcaccaccaaatcctttcggcccttctcctcctttctaaccccactgccattgccttagtggaagcagccacttagatgaacaattacgacagtctcttcacctctgtctttcctcactcccaaatctgtctatcccactcatgtcacaggacatttgcaaggctgctggcactggttcctacagtacctgtgcacagttagaagaaggacatccttcctctaggaatattcgtagcgcatggattggcaagcagagtatggacagggtcaacccttcatcatgcccttggctgtgcacctgcaggagtgaataatgcacagtagtgccacgtgtagtaacattgcttccttgcttaacagcttttaatgattccccagggcctttgggataaagcttaaatttcttcacatggcatacaaaactgcctttttagcttcttcccttctccccccagccttttgggctggtgctcctgcagcatgggaatggaagtgaccctaaatattccatgactatttttcctcttcccaaggtgtgctctctttcctctcactctttggtaatatcctgttcttccctcagtaacgagttcaggtgtcatcttctttatgaaacatcttatgtctcatgtctcatgcagacagcattagacttctgggcccattagcctctgtaaatgctttaattatggcactgactattatatcacagttacttgttttcatgactgtgttctacacaaagcccaattcagcagccaaaagtaattagaagggagctccagactaagtttctcaaaggacataaagggaaaccatatcctcagcatccatttattatcatcctttcctctccttccttagtcaaaggtcatcctcctactgttgacaaaagcattcctcctctgccctagcctatacggtttttctttcctcttcctatgttgctctcctccccacaaacctcagccctctctcctattgctttcttatatggattgccacagcttctccatcaggaaaaaagaaaacactcatcttcttcaggcgaagccataaattacaggattatcattgttaggttagagactgtgtcagccaggttctgctgggttctgatacaacaaaccctcaaatctcagtggcctgcacaaaggtttatttatagctcacataacatgttagcaacgggtcaactgaggctttgcctcacatgattcctttatcatgggatctggactgaagaagcagtctgtaagacatgcattctcatagcagagggaaaaagtaatggcacaaccacacattgacttttgaaatttctgctcagatgtggcatatatcacatatcctcacactctgtgtgccaaaacaagccttatgaccaagcatagtatcaatgtggtagggaattatatgctttctccaggcagggagaatgtcagtaacatggtaatgagtagagatatattttcaaagcagcaaattgggactaataagacagtatgctcaggaatacctcgtattaatattgttttgttttgtcacattcgcatggcacatcagtctgtgagcttacggggctcagatgatgtctcatacttttttttatgatttacacgtaattgcacatatttatataggaggaataagttctggtgatctattgtatagtaggatgactagaattaacaatcatgtattgtatatttcaaaatatctagaagagaagtttttgaatattctcattagaaggaaatggtaaatgttttgttctgaacacctagcatatttttagaaaaggaattttccatgcaagttaacaaagacctgggcagaagagagatctctgtagggtagaaatcacacttgaaactggaatatttgaaaattccaaatcaaaaatctatctttatacttgggtgatattcctatcagattaccaagcaggataggtagatggctgcttctgtggtgtgtagtttctcagagaaggaggtctcctctccaaagaatgtttctttctctagatccctatactacttaggttccattcaggaaaactgaaacctggcagttatttttttaaaaaaaggatactgtgggggaagtgaagaactatagtgtcgcaaaggaaacactgaagtcaagcagatgataactgcaggaagtgaagcagctactgcctctagagttgggggagcaaaatgaagaggttggggttatcggaaccaagatgctcagagaggccctgtggagctgagcctcggactcctggggaggagattctgcccttgtggtgctgggccctcaaggatatggggcaacggagtgagcctagtttggggagtgttgcttttcagctggaaactggaaccagctgccattgtgaggtcagaggatcattgctgacaggaacaggcaggcaaacaagaaggaccaaggtcctttcacctgttctcccttccagtctccctctcatgccctgtactgacagagcatatcagagagacagacagcaatgcagaaatgtagtttgcagagtctctattctggcattgtattatagaaaagagtaaggaaggggaaatcagagataacttaatagacagcacactccctaatacctggaattttacaatttgaactttaatcctttggctaaagtcatcctcaattaaaataaaaatgtcccttggaaagatgaaaattttaatgtccttctttattgacaccccattatgaatagtttattgaaaataagaagaggaagcaagagatacagatgaggtattttggccgtagcaggggcagatagagaatgccacaaagatggtggagggccaaaaaagagcaatgaaaacagggggatcatggaagataaattttaccaacttccagattttgcagatgcttggcagagtttctaggactttgctgctcccagcaatataaatgaacagcagggacagagatggatctgtccatttggtcaacattcagaacaactcagctcatataaaaatgagacccatgactaagatcagactaagatggagggagccatggttgagtcactgaataataaacttatgcagggacaattgcctaagtaattcaagcaaaaccttactattgactgaattacagtagtgccctaattagtggaacgctgagagcttagcttattctaaattggatttttctggtctgaggattaattaggaaatatttccagacttgttttatagattaaaaaaaatgatttcctctttattctggctcacttttgaatagcaaataaaactaatctctaataaatttgaatattgcattgttttcatttttgagtgtctatctcagttgagtctgcatcaagtaccagttctgtggcaagaactgtgtagagctggacaaagatgaatgaatcattttctgaccttaaggattaatggttgagctcactcaagctctggttggaaacacagggcctgggtgcccaatcccagctctgtaacttgtaaggtatgtgattctgagcttcaacctcttcatctgtaaattggaaataataaaaaatagccatataatattgtgaaaattaacaacacagtatatcagtgcttatggtatatgttcgataaaggtattttatttttgttgataattttgatggaaccttatatataaatagataattttagtatatgtgaattctataaatgctgattttcatgatccagtcttaaaggtagatagtttaagattggtgggaagttttcccaattctaggatattacttttttctcttacttttttcttctcttttctatagcatcctttctcctttcttttcccctatcatttcctcttcctgcctcctcctcttcttccagaattatccagattgctatccacctctccatttctcttggttgtgtatacctagccaatatcaaaggtactgtttggcctactgtgccttaccaataggttttcaacctctggctcaattaatgcatatccttttgttagataactgactctttaaaatatttattgatgcaaccaataaataaaaagaaaaaggctattccccagcctttttctactgtgatactttacttatgcaacatgctccctcatgttttcctgttcctgcagaaagcacgttagaatacctgggagtaaaatgatcctattataaaggtaccttaaatccattctgatttatttttttaatcattcccaagttttggcattctaatcatcattactgtcaaatacacacctcaccattttgtcttattaggatgttgtgacacatgggtgaataagaccccaaaatttgactattgcttctttcttaagacctgtcctattggacatgcacccttagtcctagtaatgctcttcctaaagtaggtacttcctcaaaacacttgcacatgtgcattttgcagaacgttcattagagcattgtttataataataaaactttataaatagcctaagtatccactagcaagacaatgagccagtaaactgtactgtcccatacagtagacttctgagcagcagggaacatgatggactagagctccttgtatgaacatcatgaacctcaatgctgagcaagcaaagcaacttgcaggagagtaattatagcatgataccatttctataaagttctaaaatatgcaatactgtatttttaggaatacctgcatgttgtggattataaaacattcctgatagtggttacctctaggggaggagaatacaattaaaaaggaggacacagagaaacttcaattatatttgcaaacttttgattcttaagtttgttagtgggtatataggtgtttgatgtcgttcaccagtgcatttttgtatgtttaaacatattttattaaaagaaaaagatgttcacaagatcttatttcaaaatagcaggaacttatacactgggggcctgtttgaaccatgagagtcagtaatcttataaaaagtgacaaatagtgggccaggcaccatggttcatgactgtaatcccagcactttaggaggccgaggtgggtgtatcacttgaggtcaagagttcgagagcagcctggccaacgtggcgaaaccctgtctctactaaaaatacaaaaattagctgggtgtgatggcatgcgcctgtaggcctagctacttgggagactgaagcagaattgcttaaatccgagaggcagaggttgcagtgagcggagattgcaccacggccctccagcctgggggagagagtaagactccatctcaaaaacatttaaatgaaaatttttaagtgacaaatagatgataataaaaatcatgaaactaccatttatgagcatcatgtgtatgtaaccacactgcatgcagtatctcttaatcctcaaacatcctctgaagtgggtgttatggttgtccccatttgaaagataagaattctaaggcttagagatgttacttttctaaattcaaacagttagtgcttggcagaaccaagattctaacccaggtttgttttttctttaaccaacaaagtagatattattgtattccttcaagatgttgtcattccaaccaataagatataacctagctatattatttgggggggaaaagagtgacccagaactcagagttttgtttttgtttcatttggagataaggtcttgctctgtcacacgggctggagcacagctgcgtgatcatagcttactgcagccttgaaatcctgggctcaagcagtcctcccatctcagcctcccaggtagctaggactacaagtgtgtgccagcacactcagcttgagtttctaaaaaaaaatattgcgagctgcccacatgtttacaatatcttgggctcacaaaaggtaaattctatctatgaggcgacttccctcaaaagtctaccttcaagctggaacatcagtatttgtcagtctaatctagtgcataaaatactgagccctaaaagcaataagaatcattgtgaagattctgactttatttcaatgtggatgttttatttttgaaaataattcaattttttaaaatgttagttatctttgacaaatatgttattccaaagggttccttccttccttcctttcctaccaccttataaattaaattaaaattagacatgtatacattttaaatagccctacaaggtttgttttgaaaaacagcaatcccatgcttcaaccctttatatttgcccctcccaagaagcagcccctttcaactcttttacctgtttattttggcaattaatgcctcatatctaaataaactattttattattactttgctgtttttcagttatagcagaatctattacttcccccatagagaataagaatttgctgtttgtttcttccctacaattcttactacagtagatacctattcttatcctttcaacgtagttatattacaatttaattacattatcataatgtagatcactatttacataatgactatacaaatgctacccagagctaggtcatatagtacaatatgaatcattttccttttttgcgctatttttgcttgaactggagtaactcattctcttgatttttaattttcaaaattttctatgtacctattactaattccatcttacattctgccagttatttggcagagtttacctaaattgtctaaatttcaagatgttcagatgcatcatacgtaatcaatttcatcttcctgagaaaattactctggagccttctgacaagttccaatctgaactcttgccttccgctcctgttataaattatcatcttggtatcttcctttaccaaggatatcctaggattctctttgtctttcacttttgtggcatcttctgtttcctgtgtatcatttcttacactttttttattgtaccctcattttgcattctctagtgacttcctaataagattacgtggatgatattatttttgcgatcatgcatactgttatgggtcaaattgtgaccttctgaaattcacatgttaatatcctaacccccaatatctcagaatgtggccttaggtggtgatagggtctttaaacaggtaattatgttaaaatgaagttattaggatgggccctaatccattatgactggtgctgttatataagagaaaattaaaacacagacatacacacagagaagatcatgtgaagacatatagagaaaacagctatctacaagtcaaggagagaaaatttagaagaaaaaactctgctgacagcttgatcttggactttcagcctccagaactgtgagaaaacaaatttctgttttttgagccactcagggtatggtactttgttatgacagcccaagcaatgaagtatatgttcattatactgcactcattatgatagttgggctaggtatagaattctgtataaaaccaaaatctgtttttctcacaatttttaagttcttgatcttttaacttctaaaattaatattcaatattcctgctgagaacttcaaaaacattccaattcctaattctctgtgcgtaacctttctcctctatggaaccttatataattgtctctttggcctcagtgttctataatatcataggaatgtatcttgatgtggttctatgtttacttatattactggatgctcagtgaaccctttcaacctgtatagtcttgtctttcggttcagaaaaattttcttgaataattcttgaatgttttagctgatttattccttttttgtctttctggaattcctatttttcagttattggacttcctgggctgatcctctaatgtccttatcttcctctttttttgataatctatatatttttgctctgggagaattcttcaagttattttctggaccttcaccccacttctttaggtcactgtgtgccccagttctaagattttctgggatttcgtagtataaatattattgttcttgggttttccccagaactggtttagcattcagttttttctggttttctaagtctattattacatagatctgtctgcttggcacattccaacattttgatgctgttgttttgtgctatctttgttctatgagtgttcttactgttatttaaacatacacacccactatgcatgttactatcattttcatgggattttgagagagacagaaaaattgtatgcaaatgtttaattttccatctttacttggaagctcaagagcaaatgtttcttaatttgtatttaacacttagataacgaagatgatatcatgaagtacaattagaaatggccatttgaataaggaaaatgactcacagtcctttacatttcagtaacctgtcatcctgatctaaaaaaagaaactttaaaatctttaccaaatagtcagaactttcaatgttatatatttggcctgacaatcttctcatctttttgctcataaaatgtctactcaagattagaagttagatattgtgctgcagttgcctaaggcccagaaaacgctcaaaataggccttgtcacataaaaaattaattggttgctttgttcctacttagattttcattaatttgaggacataatataagtgacagttaactgtatcacctttgcttctccttgttaaaaaagaaatacctatttaaaagtctaattaagaaagtttcctgaaatatttatttttaaggcattaaccttcccttattatattatggaataacacaactttaaacatcagaaaagactggtatgttggttatctattgctacataacaatctactacaaaatttactgacttaaacattttatttgcttattattcttttgttttagcaatttgtgctagattcagctgggaagttcttccactgctttcacctggagtcaacatgtggctgcagttgtccctttgctcaatgagctggacagtccaaaatggtctctgtcattcacatagctgggggatgctgccagctcttggctgcatttctgtctccacatggctcatcttcaaagaggctcgtttgggcttctttaccctggcagccttggggcagcattccaagtgggcaagaatggaagctgcagaacctatgccaaaaaatcatggaaattacttctgctgtatactgtagattaaagccattcacaaatccagctcagtctacctcttgatagaaggagcaagaaattcacatcccaaaggagtgtatatacagacataggaggaatcatggccttttttctttttttttttttttttgcaatctaccacagactgctgtctggctgaaacttattcacattttttccatatagaaaatattctcattcccattccaggatctccatgggtctcatcccaatattgcatcaggttcacagtcttagatctcatgctctgcatcaggtgagttgaggatgaaaacccttggctacaactcctcaggtgtacactctttgtgagccagagacctgtgaatgaaaaagacaagttacctgctccctacaattccaacacatggtgatggaacagaggcagaataattacaataggtactgccattcaacatggggaacaacaagaagactgtagcagtcacttgttcacattaatctgaaacccagctggtcacatgcttcaggctccttcactccagggtcaaaaaacctaccttgattagttatctgtttctgtttcctactttgccacatgccttaaatttttagattcacagaggtcaataatgtgactataattctaaaataattgtacaaaaccatctgtaggtagttaagtgcttcttgacaaagttaccccttcctcctgaagtttttaaccatgcagattttcatacctttgagaatacttgtttgtttgacccacctcagaaatttcataatatatgtaaaaaaaaaatggaaaaaccatcttccttgcctttacttccccaaaagtagtaccacatacaaagcatcattataaaatgatactgattttgagaatcttcaaattacaaaaaaagttaaaatttatctataatataacctgacagtttctggaacacccagtggttctctatgggaatcacatgatttacttatttacttggggcctagagtagagcatgagacagaccaagccctgccctcacagagcttgcagtctgtagggggagaggggcagacaacaaaaatgtagacacatccccacctcatcccagctctatttttaaaaattttagggagtaaaacataagagaataaaacagggtaatggaggagagagaatgagtgacagagtgagagagagagattattggggcaggagagtgactatcttagctaggatgatgaagaggtgacatttaatttgagaacaaaatgttgggaagaaacaagttgtgcaagaatctaagaaaagcatgatcaaaagccctgggcagtaacagtctgggtttgtttgttcagggtcagaaaacaaattcaatgttgcttgtttacaatgagcaaagggaagaaaggagataaggtcattggtatgggcaggaaccatgaaggactgtgtggaaaggtgaagtcattgaagagttttaactggaaaagcataagatcttattcattttttttaaaaaatcattgtggttgctgtgtagaggatggacaaaagagacagtgaaattagatagtacagttaggaagctattgtagtagtcctagaaacaactttgcagtaggagggtgagaaagggtcagattcaggataatatttgggaagaggagcccagagaccttgatggattggatgttgggcataagagagagggtcaaggatgcatctcaagtttgtgacttgtgaaattgggtgcacttcagttccttttttttccacttttattttaggttcaagggtacatctggagaaaagggaactctcatacactgctggtgggaatgtaaattagttcagccattgtataaaacagtttggtgatttctccaagcatttaaaacataactaccatttgacccagcagtgcccttttttaagatggaaaagcctaggggaagaacaggtttttcctttataagggtccagatcaaaagttctgttttggaaatatttggtttgagttttttcttagacatcaagcgagatgtcaaacaggcagttgaatgtgggagttcagtcatttaccagcaagccttgatgacttgcctcatcaatactttatagtctcactttgtgactatctaaccctatccttgggcaactaagacatggggaccctcatttcctgacaagtagagactcaatgaattacccaaggacacacaactaaagtggaagagcagggcttgaaccaggtcttctggcaacctacacatagtcctgtagggcactgctaacccctcctctactctcctgcttattgtaatcaaggggagatgcagggttttaagataccattctggaggcagtgggtgtgccacatcctcaaagtgtcacccatgacttaggcaattgtttatccatgctgttcatatagtatccaccagccacatgtagctacttaaatttaatttttaatcaattaaaattaaactaagttaaaattcactttcttagttttactagtcacagttcaagtgctcaatagttacatgagtaccatattggatagcacagataaagaacattttcatgatctcagaaatttctattaaacagtgctggagtctagattaatctaatgttcccttcagttatattaatttgtgaagaaagtgtagtcttatcctaaaagctgtgatctaagaggaaagtttaggaaaaaaagaaagttacctgctttaaaattagcatattttataataagctgattttagatccagcattaatgagcacctttccccagctcacacccttgaatatttgtgtgtttctcatgttatctatgaaggtgtaggttcctctgaggagagaaactaggtttttttcacctttgcattcccctctcaaaatatataaatatacaacgcccatgcccatatatacacaccctcaatacatattgctttgcacagaacaaacataatatttacttgttaaatgacccagcatatcacagcattttacaacactactgtggacagttggccacaggaagaacctatcaatcagagcaaataaactccaggaggtctgtaactaaaacccgattgcgcagcgtatttatttctcatttctcccttcctagcaaaaggaatattgggacctcaatcttccaccaccccgggtgaaaacgaggttgctcactaccctagaaagcataaaggtcgagcctagaggagagtcagtgggaagttcaggccctggtctgcccattacttcatgagcaggccagcaaggtcttcctcatggggtgtgatggagatatgcagaaagcccttcacacacatgcacacaggcagacctgggcccctcacagttcccttcacaaacgcaggagaaaatttggagcaaaacagatgttttctgaattcctccttgccacttgctgtttgtgtgactttgggcaaattacattagcccgtcaaagtagcaggataaggagatgtgtggatataggccttgatcacagagttgatgctacacccattcagcagtttattcccctcttcaccgaatttcagggggaatgtgagagcaaacctagaacagaaatgtgctttccttttaagttttctttttaaaaatattttcaaatgttttttaagaggcagaatctcactctatcacccagactggagtgttgtgttcatagctcactataccctctaactcctgggcctaagggattgccctgcctcagcctcctgagtagctgggactataggttcacaccaccacacccagctaatttttttttttgtagagatggggtctcactatgttgccctggtcttgaacttctggcttcaagcggtcctcctgcatttgcctcccaaagtgctgggattgcaggcatcagctactgcacccagccaaaaattgcagttttttaaaaaatgtgtaatagtacttacacatggtaaaaatttcctaagtatgtacaatgaagttttcctcctgtctatccagccacccagttctccccagaggcaaccaatgttttccgaggtgtatgtgtcctcccatagtcattctgtgcatgcacaagcaaatatgcctatcaacatattcatatgcatgtacttcctaatatgtgcacattttcctctgacacaaatagctgtgtgactgttttgaaccttttctccttgtcctgtcttggagatttttttagatctacaccaagggcccttaatctatttacaggtgcagaatattccactgtagagttgtaccataattttcttatcctatcccccactgattaataatttaggttatttccaggcttttgctattataacccatgccataatgaacattgttgtacatctgtcactttgcacacgggtaagtatatttgtagaatacatttctaaaaaaagaaatccctagattagatggtatgtagtgaagatatatgcgtagttttgatagacctgaccaaatggcccttaaagagtttgtatgtttgctctccccctagcagtgcatgggagtggatatgagtttacaagccaatgtgaagccctggtcagagactgagccccaagcctcatgtttgccagagttgcttagcttacattgtgtgcatgaggggatgggggatatgtgtgtgtatgagagagagagagagacttcatttggagaaagctgtggctaactgtgagaaccatgatatggggaatcatcactgttccttctcataatcctccagtttgaaagaatgacccagaaaatgaaagtgttccacaccccgcaggaagatccttagacatgcagtgtggaggcagtagttcagctgatagctagaagagatggcaagagcaagagcagaggccaaggtataaggagatgagatttagtttcatagcccctgtgttaggttatttgcattgctataaaggaatacctgagactgggtagcttataaagaaacgaggtctattttggccacagttatataaacctgtacaggaagcatggcaccagaatctgctcctggtgaggacttaggaagcttccaattgtggtggaaggtgaagagagagcaagcatgtcagatggcaagagtgggagcaagggcaaggtggggcagggggaagtggggagccacactcttttaaacaaccagctcttacataaactaccagagtgagaactcactcattaccatgggcgtaacaccaagacattcatgagagatccacccccatgaaccaaacacctcccaccagaccccacctctaacactggggattccatttcaaaattagatttagaggggacaaacatccaaactatatcagccaccaacattagctagtgttcttcagatggtcagctcatttgatccaactttaagtgtttatcatgtgctaagccctttacctgtgctggaaatacagagatgagcatggccggtttctgccctcaagaagctcacccaaggaagtgggccatgtgggcggacagctttcatggaatgtaatagaaactacagcaatgatgacagctaactctgagaacatcttcaatgccagccagtgggctcagcactgcgtgtcatctcacttaattgtacaatagccctgtgaaggtgattacagtgttatccccatttcacagatgaggaaaccaagacccagaaaagttgagggatagccctaaaaccacatcataggtggcactactggagtatatgctgaggtctgtctgactgcagagtattgagataaatcagagtgttcagcatactcagagctaaaagtcgctcctcctcctccatcagtggttctttgcttccttctctctttatagcatcacattagttgttctcacgctgctaataaagacacacccaagactgggtaatttataaaggaaaggaggtttaatggactcacagttccaaatggctgaggaggccttgcaatcatggtggaagatgaaggaggagcaaaggcacatcttacgtgttggcaggcaggagagatcatgtgcaggggaactgccctgtataacaccatcagatctcatgagacttactcactatcacaagaacagcactggaaaaactcacccccatgattcgattacctcccaccaggtccctcccatgacacatggggattatgggaactatgattcaagaagagtgtggggacacagctaaaccatatcaagcaccacactgcatttcagagtgagggcatggaagtcaagccagggcctctggggaagatatggcctgagctgagatttggaaacaaatgaataaaaacctggaaacaagagcaatctggacagaggaactctcagctgacctccaggagactcagcctccaggcctcaggaagtagctggcagacagaggcaagcgagcaaacagagtcaccacaggggtagcctttggagccagactgcctgagttcaaatgctggttcagcccttttttagctcagtgacgttgggtgcatcacttaacctctctgattcttcacctgtaaaatgtggctaataagtactacttcccttatgggttgaaatagggattgaataagttcatgtattgagactgtttagaatagtgtctggcacatgccctgtgtgtgtattcctctacagaacctccaggctccaggtacagcctagatgtaaggaaaagaaaaacaaaaatttgaagcttgtctgtggtgcttattatagagaacatttacatgtgctcagaaaatgtaatgtgatgctataaaaagggaaggaagcagaaaaccatttaatggaggagggacatgggcttttggccttcaattttcttgtcaagcatagttgtgcttctcagctttcagttatcatctagaattgtgaggcaaaatgtgctttttatttattgtctatttctttatgacatctttacttggtgttaaaatataatggcctgtctcaaatcaggtgaaaaagcagaggaagataaaatacaaagaaacacattcagtgagactctcggttttctcctcttcctctttgatgctgtaaaatgttttcagagataaatgtcagataaatgctgcagcatcctcatttacccacacagcgtttatcgctcatccaccaactcaaattacctttctccaagagcggtattcagtaagagaatccaagagaagtaaaagtgagagaaaaatacttcggtaaatcagttctcatgatttactttttgtctccatattccctggcctttctttcctttatctgttatcccaaagtcacatttccagccctgtttccaaaccaaaccccatgcttggactactctttctcgaggccaattttttctcttcctctcattatttgaacaactcctgagaattcatttccttgaagaaaaacatttagcaaattccacatcataaattaccatgaccctcacatacctgtgtaccagccactcaccggatccctgggctacagaagtgatgattcagccctttgtcctgaatgagctcatggtcttacatggaaggaaaggcatgcagaaggaggttgaccttgcctttctctggcatacactcacattcatttccttgatgctcttgcttccccactatactgtaagcttctcaaggacaaggattttatctgttttgtttaccactgtataatttgtaccttaaaagagtatcctcagtaaacatttgacgaacaaatgaaaaaaaaatgacaatatggaatgatcagtaaattgatgtgcttgcaaaataagaaatagcacaaaggaaggagtaactgaatgctttgggggacagaagtgtagttggaggggtggggagacttgctggaggaggtgacttctgagctgagtgttggggaaaatgcctacatttatatgcctttgcatgatgtccagcttataggaggtgcccaaggaaagtttgcagggttgataaactttataatttatgaaggagttacatatacagtatctctaatattctaccattttttgcattcgtaaaaaggggaaacatggccatttcatgctggattatgtaaacctggaagctctatctgctacctagaaaacctcttagtagggtacaagcacctactggaaagccgtgtgtgtgtgtgtgcgcacacacacatacacacacatacctgcacatgcacccttgacaaagtagagactggctagggcacttgctgggaggcaaatcaatcttaagtgtgtgctttagaagaaagatcctattcacgaaagaacatggaaaaggtaaggacagaggtgatttccagagactggcctctcacctcacctgtgagccagaccacagctcattacctaactcctatatccaccacccaagccagttttatatcttaaaatttctgaaaatccattgattatgccatgggagagcctgaggtaggagagaagaggagagaaaaacaaaatgaatttttagttgaattaatataatgagcttactgagaaaaaacaagatacaagacctagacttgctattagtttatttttaggtttcttaactttgtttagctccagctccttcctagcatgaacgatgttgatgctgaaaaccaaaactactcatacctatgagcctactatcctggtgtgatctctggctccctcaggctgttccagacacaccctgtctatgactgactgaagacatctgcatctgagcaacaccaaattataacaaaaattagatccttcacctccgattaattctcaacttgtatttttaatatatgtatgcagcttcatcatacacaacaaagaaacgttcttcaacaatgccacaagaagtagaatcgtgcatcacattttacaaagaataaaatatgaagaaggaaaaaacaagattggtaagtagtatgttagtataacaaactacatttggcatttgggaattacagacttcttcccttggttttattaagtttgtatcaattctagcaatgcttgtcacttataaaacccctaactaatcctttgatgaataattcacaagtgtaaaatcttcgtcgcatccttaaatatcttctttaaatagcatgttgtctcatttgtctaagatcatggagaaattctctcattttagaaaatgttgtgtgccaggcactgaactagatgttggggagatatgcatagttctgatctggagcttgtgttcaagaaattaaaagcagacaataaaccaataagtaaatacaataacatgaagaaattaaactggatgatgatacagagataggctggtaaaaggtgggagtgagttcaagctgagatttgatgatgagggcaagcttcactgagaagctgaaatttgaactgagacctgaatgctggggaaccagtgtgggaagatcgaggggtagggtgttcccatgcagagggagctgtaagcacggagatgagctgtcccacaaaagcaacttctccagtcatctcctccattaaatagcctctaccatatatattttaggcatttttatgagaatgtgtccatattatattacacatttcctgccttattaaacagattattatatatcaggaagggttgggtggctttgttcttatctctttttccagcaagttttttatcaatagttttaataatgacctatatcagtcagggtctaatcaggagacaaaggcacaagtaaattgaacagagaaagttttatataaataattaactgtgacaggggattggagtaatggagggttggctagtcaagggtaagaataactctaaagaatacaggaatagcagatgttaggagcagctaccacctctgagaagactcctcgctacaatgctaagctgcagatcctgctggaagaggtacagccatggcagtgcagtttgctgggggctctagaaatctgccctctggagtactgggggaagctgcctcgagtggctccaaggaagtcattctttgggagttgctacatcagcagcactactctgtgaagccccccaaggggatactgaaaatctgcctttgaggagtaccatgtgtttccagccaccacgcactgcaggagctgggtactgtagaagtatgtgctacagaagcctgctgagatatcatactggtatcaggaagagaaaccccttcctcctccagtgtccctcccagtgtcttctgctggcaaagcttaacattgaatcagctgacaaaggagaaatagttacaatagttacattattgcaaagcaggcaatgaaggtgcatttggagctgaggggaaataagttaatatctggtgcatagcccagatgacctgctcatcaagctttcgggtagggtgaaactagaaggttgcattaaatgacaagactcagtagctggcactcagccaaatccagcaagatgacatttaataattttgcgttgaccatttctaatgtgtattttcttttcctttcagtcttttaaaaaatatttactaattcagtgaaaatgttatttaaacatacatttggttattaatgagatttgagatttttcaaatgcttattttattcatttacatttgttcgaatagaaaaggaagtacataaaattttacattaatatcactgtaaaaaattaaaaaaataatttttaaggtaaagtcttacagtcaaattcagcaaaacaactaccttggtacagtgtgggagaaatgttgctcaacatcataagaggaacagatttgagagttgagctgaatgcaagcttggtgtgagtcactagcataatgactctgccaaaaaaaaaaaaaaaaaaacacctactttgatcccaagctgcataaattaaaatataacatggagaaatagatagctttctagtccagatctgattacaactggaatattatgttttgtgagagtcaatgtatgggggtatggtgaagtcaaacctgatttaggtctttcttaactttgatggattttagttaaacacattcccatttctctgcattagtcatccttccttgaaacacattccttcaataaagtcctctgtgaccattccagcttgaatgaattcttctctcttctgaattcctatggcaactatttttggagtctatttgatagttagtcatatacaactcttcttttgttgtcttgaactacattcaataacattatgaaaatctaccacataaagagaaccactcataacatttgcgtactgaataatttaaatgttaccttagttacttttatatcttaatttcttattcattcatatggtttttagaaacaaacttaggatgtgctatgcatcctttttacgaacttttttcagttaacattgtaccataaacatactagaaagcaagtgagtgaaagtgaagttattattgcagtagctgttctgaatcacttcataaaatgcaaataactccaaatggcatcttcactaataatggtattatcatttgcagtacaacttatgactcttttttttttgttgagacggagtctcggactgtcacccaggctggagtgcaatggcaagatctcagctcactgcaatctctgcctcccaggttcaagtgattctcctgcctcagcctcctgagtaactgggattacaggtgcccgccaccatgcccggctaattttttgtatttttagtggagacggggtttcactatgttggccaggctgatctcaaactcctgatcttgtgatccgcctgcctcggcctctcaaaacgactctttatgagacactagtgtattaagaatctgcagctgaatgctgctcatctggataataagatccttaactgtaaataaactgccttatttatctttatatcatcactgcctagcacagtgcctggcatatagtaggagttcaataaaggcgtgctgaactgaaaagcttttaaattattgtgcctaattttgcgtctcaaaatgtgggatgcttttataagcaaaagaaggacagagacagtgatttttaaatgttctgaagaagcacaggaagtgtagtattgttgctagtcagaaagggtctttataaaagtttctttcatttgatgaaataaggagttttctattcaaagacctccatgtgttgaaaattggtaataggccaggcacattggctcatgcctggaatcccagaactttgggaggctgaggcaggaggattgcttgagcccaagagtctgaaaccagcctgagcataatggtgaaaccccatctctacaaaaaatacaaaaagttacccaggcgtggtggtcagtacctatagtcccagccatcaggaggctgagatgggaggattacttctgggaggtcaaggcggcagtgagctgagattgtgccactgctctccagcctgggcaacagaacaggagtctgtcacaacaaagaaaaagaaaataataaaagaaaattggtaatgatgaactggaatcatatctaattagaaataaccaatcagatagtaaattattaagccacaaccaagcattatgctgaaaaacatggagcaaaactactaatggcctgtagattcaatatttcattatcatctttggttttgtaaataaaagaaataatatgttagaagaaattttaatttcttgatagaactaatgtttatccagtattattttctgcctgaaactctttctgaaagtggcatcttgcatgagccaacatcgattagaaataacatgaaaatactgatttgtagacatgattcataaggatattttagtggaatgtaaactgccactatgtacatttttcaacttcactctgaatttatttcaactgtaaaaatcaaacctggtgaaacccactttcaaaatagagccatttaatagctcaacaaagatttatttaacaatgtgggtgcatacaataaatcttgaaattgatttgtatttttgaatttggtgcttagaggagaaattagtaaagtgaaaaagatttcaaatattggctactttctcactttgcaggactttgataaattatgataaacttataaaagttatcatctgaggccaggcacggtggctcatgcctataatcccagcactttgggaggccaaggcaggtggatcagttgaggtcaggagttcgagatcagcctgaccaacgtggtaaaactccatctctactaaaaatacaaaaattagctgagcatggtggcactcacctgtaatcccagctacttgggaagctgaggcacgagaattgcttgaacccgggaggcagaggttgcagtgagccgagatcgcaccactgcattccagcctgggcaacagagtgagactctgtctcaaaaaaaaaaaaagttatcatgtgagtctcttattaggtccttatgaatcctattttttctaacatctgggatgtttgaaagttattgatgagatatgtagaattcccaatagagactccagggaatcaaagctttctacatagtaattcattacaaaggtatttattgagggcctctggtgcgctagacaaactataaagccttgtgatatttggatttcaaatgtttttcttagatatttagtattaatgtgaagcatcttaaaacatattaatgtgttactatgattaaaagcatctaaatattgattgatcctccatcaatgaaaagtgaatcagtgcatgtgccattttccagttaggctaaacctctagattctggtaaggatctaaagcataggtagcattcctctcaagccacttgagaaattatgataatctcctttgaggtgtattttaggaagtagcagaaatcttgatctgaaaggagctttaaagatcaacatgttaaacttccacttctggccaagatggagcaacaggcacaagatttactctcccacctgaaacaatcacaaaagaaaaaacagacaaaatgtatgaaacaactattttcaagacactgaatattgggcaacccaaaacaaggatctctgagagacagaaaacaaatgaaatgagccctgctgggccctatcttaccaccttgacatagtttctagacagcaccatgaaaagtgagaatgtaggcaggacctgaaagactctctaagttgagaagttgttgctaggagttgggaaacaaaggcagcgagagttcacagaaagaagtaccggaaggcagcgagagttcacagaaggaagtaccagaaagcagagaactgcacagggctagaaccttgaagatctgtagagggtctccctcaagtattcagcaagtgctgatcagtgcatacatgtccggagaatacccaaggccagagaaagaaccatccaaaagaatttccagtaagactggaacacctcataattcacagagcagtgaggagaatactcagaaaagtctttcctcctgcaaacataaagaaaatttagcaaataaagtttaacaatgtataacaagggtaatacatcatgaccaagtagaatttatcctggactgcaaggttggcttagtatatgaaaatcaatcaatataattcaccatagtagcaaactaaaaaagaaaaaccatatgttcatatttatgaacatgggaaaagcatttcacaaagttcaacatccattacagataaaaactcagcaaactactaatagaaattatcttcctcaacctcataaaatacatctatgaaatgcttatagttaaaattatgcttaatgataaaagactgaatattttcctcccaagataatgaacgggacaagtatgtctgcacttgccacttgtattcattttactatccagtgcaataaaataaaaagaattaaaactgtcctaattatcagatgacatgatcacctataaagaaactcacaatggaatccattaaaagggactaataggtgaatgtagctaggttgcaaaaaatgagattgatataaaaactcaattgtatttctctcaatctgcaacaaacagtgagaaactgagattttaaaaaccaaatcacttataattagcccccaaatatgaaatattaaatacttaaggataaatcaaacaaaagatacttaagaattgtacactgaaaactacaaaacattgctgagataaatttaagaagacccaataaatggagacatatactatgtttatgagtcagaagactcaatattgttaagaggtcagtcttaacaaattgatctatagattcagcacaatccagtcaaattcccagaaggtgttttgtgtgtgtatatgtgaaaattgacaaatgaattcaaaaattcatagggaaatgaaaggacctagaatagccaaaacaactctgaaaaagaacaaaaagtcaagtctttgacttgagacaaagggtcgaagtcaattcagtgggtaaagaattgacttttcaacatatgatactgaattcaaacccatatgcaaaaaaatgaatttaggaaaactcgtatacaaaagttaactcaaatggattatagttcaaagtgtaaaatttaaaaccataaaaattctaggagaaaatagaaaatctttgttaccttgggttaaccaagggtttcttaaataaaagcataattcataaaagaagaaaaaaatggataacctagacttcaaaattaaaacttcccttttcaaatgatgttttcaagagaatgaaaagaagggtggggccaagatggctgactagaaacagaagtgatcagaggctcccatcaaaaagaaccatcattaatgtgtgaatccttcattggcaaccaaggtatcttctcatcagaactgactaggtggctagacttgatccacagagaggaaggaagagcagtgtggtgcggcagcccgtctgagagccacacggggcaggggagcccccactccccagccaagggaggcagtgagtgagtgtggtacccagcgtgggaaaccgtgcttttttccatgggactgtgcaacccacggattagaagatcccactcaggaacccacgccactgggacctagaatgccaaccccagagctgcacagattctcaacaacctctcagctggaatctgcctaaccctgcagagctcctgcggggaggggtgaccagtgccacagctgctgctgcctgctgcctaagccatttgagctccttgggggaggggcagcagccagcactgggactcataactgcctgataagctaagctctctgtgggggaaaggatggcatccatctctataactccaggccatgcttttcccctgctggagccagggaggctggatggcttggtccccaagagtggtcccccacagctcaacacactggctgtggcagactgcaacaagagcgcctcttcaggcactgacatatccttcctcacttcctatatggtggggcttccctacaggaactccaataactccagccagagactcagggacagaacctggatctccctgggccttatcccctagtgggaggagtggctgcagtctctgcagaccagcagacttagcccagaatgccacccagcaaggcacactccctccaccaagagacagtgaaaatgcttcattaaatgggtcccatttcccttgtcacccaaataggtaagaccttccaacaggggttgtcagataccctatacaggagtgatcctactggcatcaggttggagcccctccgggttagagatcccagaagaaggagcaggcacccatctttgccttctccagcctgcttgagtgacatctccaggtgcgggagcgaaccagataaatagggcctaaagtgaacccccagcaaaccacagcagccctacagaggagggacctgaccagtgaaagaaaaacaaacagaaagcaacaacaacagcatcaataacaaaagaagtcctcacaaaaaccccatccagtggtcagctgcctcaaagatcgaaactagacaaactcacaaagatgagaaagaatcaatgaaaaaatgctgaaaacccaaaaggacagagtttctcttcccctccaaatgattgcaatgactctctggcaagggcataattgggtgaaggatgagatggacaaattgacataagtaggcttcagaagatgggtaacaaaaaactccactgagctctaggagcatgttctaacccaatgcaaagaagctaagaaccttgaaaaaaggttacaggagctgataactagagagagtttagaggggaacataaatgacccgatggagctgaaaaacacagcacaagaactttgtgaagcatacacaagtatcagtagctgaattgaccaagaggaagaaaggatatcagagtttgaagaccacctcactgaaataaggcatgcagacaagattagagaaaaaagaataaaaaggaacaaacaaaacctccaagaaatatgggacttcataaaaagaccaaacctacaattgattggagtaccacctgaagcagacgtgaagaatggaaacaaactggaaaacaaacttcaggatattatccaggagaatttccctaacctaggaagacaggccaatatgcaaattcagaaaatacagagaacaccactaaagtactccacaagaagatcaaccccaagaaacataatcatcagattgtccaaggccaaaattaaggaaaaagtgttaagggcagccagagaggaaggtcaggtcacctgcaaagaaaagcccatcagactaacaatgcacctctcagcagaaactccacaagtcagaagagattgggggccagtattcaacattcttaaagaaaataattttcaacacagaattttatatccagccaaactaagcatcataagcgaaagagaaataaaatcctttccagacaagcaaatgctgagggattttgttacccccacgctggccttgcaagagctcctgaaagaagcactaaatatgcaaaggaaaaactggtactagccactgcaaaaatacaccaaaatataaagaccaatgacactatgaagaaactgcatcaactagtatgcaaaataaccagatagcatcatgatgacaggatcgaattcacacataacaatactaaccttacatgtaaatgggcaaaatgccccaattaaaagacagacaggaaattggataaagactaaagacccattggtgtgctgtattcaggagacccatctcatgtgcaaagacccccataggctcaaaataaaggatggaggaaaatttaccaagcaaatggaaagcaaaaaaaatgcaggggttgcaaacctcatctctgacaaaacagactttaaaccaatgaagatcaaaaaagacaaggtcattaaataatgataaagagaacaattcaacaagaagaactaactgttggctgggcatggtggctcaaacctataatcccagcactttgggaggatgaggtgggtggatcacgaggtcaggaaatcaagaccatcctggccaacatggtgaaaccccatctctactaaaaatacaaaaattagctgggtatggtggcatgtccctgtaatcccagctactcgggaggctgaggcaggagaattgcttgagcccgggagacagagattgcagtgagcctagatcacaccactgaactccaacctcgtgaaagagcaagtctccgtctaaaaaaaaaaaaaaagagctaactattctaaatttatatgcacccaatacagaagcacccagattcataaaacaagttcttagagacctacaaagagacttagactcccatacaataatagtgggagactttaacactccaccatcaatattagacagatcaacaaggcagaaaattaacaaggatattcaggacttgaactcagctctggatcaagtggacctaatagacatctacagaactctccaccccaaatcaatagaatatacattctcagtgctacatggcacttattctaaaattgaccacataattggaagtaaaacactcctcagcaaatgcaaaaaaactgaaatgataacaaacagtctctcagactacagtgcaatcaaattagaactcaggattaagaaacttattaaaaaccacacaattacatggaaattgaacaactcgctcctgaatgactcctggttaaataatgaaattaaggcagaaataaagaagttctttgaaaccaatgagaacaaagagacaacataccagaatctctgggatacagctaaagcagtgttaagagggaaatgtatagcactaaattgcccacatcagaaagctagaaagatctcaaattgatacactaacatcacaattaaaagagctagagaggcaagagcaaactaatccaaaagctagcaggagacaagcaataactaagatcagagcaaaattgaaggagatagagacacaaaaaccctccaaaaccaggaactgtttttttgaaaaaaataagaaataccactagctagactaataaagaagaaaagagagaagaatcccataaaaaatgataaaggggagatcaccactgacctcacagaaatacaaactactaacacctctatgcaaataaactagaaaatctagaagaaatggataaattcctggacgcagacactctcccaaggctcaaccaggaagaagttgaatccctgaatagaccagtaacaagttctgaaattgaggcagtaattagtagcctacccaccaaaaaaagcccaggaccagacaggttcacagccgaattctaccagaggtacaaagagaagctggtaccattccttctgaaactattccaaacaatagaaaaagagggactcctccctaactcattttatgaggccagatcatcctgataccaaaacctagcagagacacaacaaaaaatagagaatttcaggccaatattcctgatgaatatcgatgcgaaaatcctcaataaaatactggcaaaccgaatacagcagcacatcaaaaagcttagccaccacaatcaagtcagcttcacacctgggatgcaaggctggttcaacatacataaatcaataaatgtaatccctcacataaacggaaccaaagacaaaaagcacgtgattatctcaatagatgcagaaaaggccttcaataaaattcaacagcccttcatgctaaaaactctcaataaactaggtgtcgattgaacatatctcaaaataataaaaactatgacaaacccacagccaatattatattgaatgggcaaaagctggaaacattccctttgaaaaccagtacaagacaaggatgccctctctcaccactcttactcatcatagtattggaagttctggccaggacaatcaggcaagagaaagaaataaagtgtattcaaataggaagagtagaagtcaaactctctctgtttgcagatgacatgattgtatatatagaaaactccatgatctcagccaaaaatttccttaagctgacaagcaacttcagcaaagtctcaggatacaaaatgaatgtgaaaaaatcacaggcattcctttacatcaacagtagacaagcagagagccaaatcatgaattaattcccactcacaatcactacaaagagaataaaatgcctaggaatacagctaacaagggatgtgaaagacttcttcaaggataactacaaaccactgctcaaggaaatcagagaggacacaaacaaatggaaaaacattccatcctcatggacaggaaaaatcaatattgtaaaaatgttcatactgcccaaagtaatttatagattcaatgctattcccatcaaactaccattgacattcttcacagaattagaaaaagctactttaaatttcatatggaatcaaagaagaccgcatacagccaagacaatcgtaaccaaaaagaacaagctggaggcatcatgctacctgacttcaaactatactacaaggctgcagtaaccaaaacagcatgataatggtaccaaaacagacacatagaccaatggaacagaacagagacctcagaaataacaccacacatctacaaccatccgatcttcagcaaacctgacagaaacaagcaatggggaaaggatctcctattcaataaatggtgctgggaaaacgggctagccatatgcagaaaattgaaactggaccgcttgcttacgtcttatacaaaaattaactcaaagcaatggcaacaaaagccacaattaaaaaatgggatctaattaaactaaagagcttctgcacagcaaaagaaactaccatcagagtgaacaggcaacccacaaagtgggagaaaattttctcaacctactcatctgacagagggctaatatccagaatctacaatgaactcaaacaaatttacaaggaaaaaacaaacaaccccatcaaaaagtgggtgaaggacatgaacagacacttctcaaaagaagacatttatgcagccaaaaaacacatgaaaaaatgctcaccatcactggccatcagagaaatgcaaatcaaaaccacaatgagatatcatctcacaccagttagaatggcaatcattaaaaagtcaggaaacaacaggtgctggagaggatgtggagaaataggaacacttttacactgttggtgggactgtaaactagttcaacccttgtggaagtcagtgtggcgattcctcagggatctagaactagaaataccatttgacccagccatcccattactgggtatatacccaaaggactataaatcatgctgctataagacacatgcacacgtatgtttattgcggcactattcacaatagcaaagacttggaaccaacctaaatgtccaacagtggtagactgggttaagaaaatgtggcacatatacaccatggaatactatgcagccataaaaaatgatgagttcatgtcctttgtagggacatgaatgaaattggaaatcatcattctcagtaaactatcgcaagaacaaaaaaccaaacaccgcatattctcactcataggtgggaattgaacaatgagaacacatggactcaggaaggggaacatcacactctggggactgttgtggggtgggggaaggggggagggatagcattgggagatacacctaatgctagatgacgagctagtgggtgcagcacaccagcatgtcacatgtatatatatgtaactgacctgcacaatgtgcacatgtaccctaaaacttaaagtataataataataataataaaaattaactcaagatggattaaagacttaaatgtaaaaccccaaaccataaaaaccctagaagaaaacctaggcaataccattcaggacataggcatgggcaaagtcttcatgacaaaaacgccaaaagcaattgcaagaaaagccaaaactgacaaatgagttctaattaaactaaagagcttctgcacagcaaaagaaactatcatcagagtgaacagacaatctacagagcgggagaaattttttgcaatctagccatctgacagaaatcgaatatccagaatttacaagcaacttaaagaaatttacaagagaaaaaacaaccccatgaaaaagtgggcaaaggatataaacagagacttctcaaaagaagacatacatgcagccaacaaacatatgaagaaagctcaacatcactgattattagagaaatgcaaatcaaaaccgtaatgagataccatctaacaccagtcagaatggcgattatttaaaagtcaagaaacaatagatgctggtgaggctgtggagaaataggaacacttttacactgttcttgggagtgtaaattaccccagccattgtggaagacagtgtggggattcctcaagtatctagaaccagaaataccatttgacccagcaatcccattactgggtgtatacctaaaggaatataaagcattctactgtaaagacacatgcacacatatgtttactgcagcactgttcacaatagcaaagttgtggaacctactcaaatgcccatcaatgatagagtggataaagaaaatgtggtacatatccactatggaatattatacatccataaaaaggaatgagattatgtcctatgcagggacatgtatgaagctggataccatcatcctcagcaaactaagacaggaacagaaaaccaaacactgcatgccctcactcataagcaggaattgaacaatgagaacctatggacacagggatggaaacaacacacaataggcctgttggggagtaggagggtgaggggatggaagttagaggacaggtcaataggagcagcaaaccaccatggcacacgtatacctatgtaacaaacctgcacatctgcacatgtatcccaaaacttaaatacataaatagaatgataagagaagccacacattaggagaaaaaagttttcaaaaaatatggctagtaaaggacatctatatcttgcctctagaatacataaagaacactcaaaactcagtgaatccaaaaatcttattgagcataagatatgaacagacatttcacaagagaagatatacagatggcaaacagcacacaagatgattttaaatattattcattaaaaaatgagaattaaacacgatgagatatcacaacacacccatgagagtggctaaaatttaaaagactgaccataccatgtggaggaccttgaactctcatatgctgctgatggaaatgtaaaattgtacaaccacttaagaaaacagtgtggcagtttttcaaaaagttaaatgttcatctactatatgatctagtggaatcacttctaggtatttgctaagaaagttaaagcatatattgatgcaaagttttgtatatggatgttcataacagcttaatttgtaatagcccccaaactataaaggacccaaatgtctatcatcaggagaatagataaacaaattattacatgtgatggaatactactcagcaataaaaagaaatgagctactgatatttgcaacaacatgaatgaatctcaaattatgttgagtgatgaaaaagagtaaatgttatatgattccatttatataaaactctggaaatttcaaactaattgatagtgacagaaagcagatcagtgtttgccctggagatagcacggggaagggtggcagattagaatgtggcatgataaaactttggaggcaatggatatgtttagattcttagtcgtactgatggtcttatgagtatatacttatgtcgaaacatctaattaaacaacttatgctgtctattgtatgattgttatacctcagtaaagctgtttttaaaaagatctgcgcatcccttcccattttatggatgaggaaattgagtcctgaggacaagagaacttttccaaagtcataccactagtccaatgcagaggcattaggtttgtccataatgaagcttctgaatgaaaatagaagagctcctggtgtaattccagggagctgaaggccattatcctaggtgaattaatgcagtaatagaaaaaccaaacaccacatgttctcacttataagtgggagttaaacattgagtacacatggacaaagaagggaacaggagacactggggcctacttgagggtggagggtgagaggaggatgaggattggaaaactacctgtcagtactatgctcattacctgggtgacataataattacaccaaatcccccaacacacaatttacccatgtcacaaacctgcacgtgtactccctgaacctaaaataaaagttagaaggaaaaaaatgttaaaagttaaaatgggcagagaaactgaatagacatttttccatataaaacacacaaatggccaacaggtatatgaaaaggtgctcaatatcactaatcatcagagatatgcaaatcaaaaccacggtgaagtatcatctcacacccgttagaatggctcttatcaaaaagtggtaagtgttggcaagtgtgtggagaaaaggaaacacttgtgcgctgttagtaggaatgtaaattggttcagctgtgatgaaaaacaatatagaggttctttaaaaaataaaaaatgaactaccgtatgatacagcaatcctacttttgggtacatatcccaaggaattgaaatcagtatcttgaagagatatctgcacgtccatgttcattgcagcattatttacaatagccaagatatgaaaacaacccaagtgtcccctgatggaagaatggataaaggaattgtggtacatatatacaatggaatattgttcaaccataaaaaagaagaaaatcctgccatttgcaacatggatgaacttggaaggcatcatgctaggtgaaataaaccagacacagaaagacaaatactgcatgatctcacttatgtgtagaatcttaaaaagccaaactcttagaaacagagagtagaatagtggttgccaggccctggggatggggaacatggggaggtgttgatcaaagagtataaagtttcatttataaaatgaatgagttctggggatctaatgtacagcatgggtggagatagatgtgttaattaatgtgattgtggtaatcattacataatgtatatgcatatcaagtcatcacattataaactttgaatagattcgatctttatttgacggtcaaatattttaatttttttagtgaatttcccagcccttgatcccaatttcacggcagcagagctttttttctaactcttggtgcccctaagagggttgatagcctagattgtttcctccaaaaagcaccacacttatatttgttttgaacattgtgagtattcaaactctgtattaattcaaatggacttatttgctgttttaggtctgaatcgtttgcttaccaatggctcctatgaagctgcgtttcccctgcatgaggtattgtgctgtctttaatctttatctttctttcaatcgtttgttactaaagtcagcttctagagatagtcaataattgaatttgttgacatttgctcagaatgaatttaatttgttcaatgggtaattagggagggtctacttcaattgttatatctcttcctcagcatagacttatttctatatatcttttcatgtaattgcgagaatacttaaatcaatagtcatgcagcatgaattcataggaatggcttagagactttaagtcttaaaattaaaaaggcattgacaatttgcatgaggcaccaaatccacaagaagaatgttcttgaaatatatagtctttgcaacaaataaatgtatagctattgcttaaaagagtgggaggaagccatcttgaaaagtctctggtaaccaacgggtgacaaataaaaattaataatgttgtactcatcattgttcacctaagatgtataaatactgtgactctatttcctacatagtctccatcatataaattactttcgcaagtgtaactgattaccccagctctactttccacagaattatttaatccagaattcccctacacctgggtttttaggaacataatccctcatgattattgagaaattattgtcattttcatggtgtggcacccctactgtggtcactatatggcacagagaatacaaagataaatgtcatagcctctgtcctctgggacctcacaaagtagccaatgtgcagcaactgttagctgatgttcagtacagcctgttggaaacaatggtaataatttgtcaatagactttggaagacggttccaactctccgtaaatggcaagtctttccaaaacatacttttttttggcttacagtggtacttctcttaattttaaacactaagagggtgcaaaagatgaggtagatttttcagaactttatttattaagaaaaccagaagctgccatctgaaactctgtttagactgccaggaaatgtgtttggaatgctccatttactatgacagaagcaaacattttgacacaaaggtttgctagagccatacgcaggtgtttctgaactctaaagacatactgttccccaaaacatcatgtggcttcatcatgtcattgttagttggcattgcccagaaaagggttttgtgagaactgcatcctccctgctctcagccccagctcatggtatgggctgtgtctgatatggtaagtggcagaagcgtctgtgcaggggagtgggtgggtgggcatgggagtgtctgaggagatgcagctacaaagccccacagagtgactcatgcctttcacaatgactttcctatctcagtaaagccctgtattctatgagaagttccaaattggtaatagcagcagcaatcattgcatcattgcttttctgactttttactctcagtttaacttgattatattatttaacctcagaggcaaaaaggcagaaggtcagatattgctgctcttgtttcacgttaaagatttagatagaggtttagagaaaggtgaaacctccttaagtcacacaatgagttggtggttgatctgagactcacctgagtttctttctcctagccctgtgttctttccattaagaaaggacttcttatcaggtgtggtggctcaggcctgtaaccccagcactttgggaggccaaggtggaagtattgcttgagttcaggagttcgagaccagcctgggcaacatattgagacattgtctctagcaaaaataaataaataaataaataagaaagggcttctccacttaatatgaataattagcttgcctccagaaagtaccgtttctctttgtgaaactatcattgccacaaactaacctcagaaaaacatgcacttctctggccctttgtctcctcacttcttcaatgaggaggttgaattaaatttgaattacaagaattctgaagtgacttccagcttttacattctagaattttcttgtcgataacattgtgacaaggttacaactatggctgtttaccaactatcctatcttgaaagaagtgggaagagaggccaggcacagtggctcacacctgtaatcccagcacattgggaggccgagggggacagatcgcttgagtctaggaattcgagactagcctgggcaatatggcaaaaccccatctctacaaaaaatacaaaagttagccgtgcatggtggcacatgcctatggtcccagctacttgggaggctgaggtgggaggattgcttgagcctgggagtcggaggttgcagtgagctgagattgcgccactgcactccagcctgggcaacagagtgaaacccagtctcaaaaaataaacaaataaataaataaaaagaagtagggaagagaactaataagccttgggcatggcccctgggccagacactttattcattcaaaccacataagaaaccaaatgggacaaatattagttccactatggattaggaaaccaaagctcagagcatttagggaacttgcccaggatcttctagctgaaaagtagcagaattgaatttgaactcagttcaaaccttcctgattatagcaagcacgtgcattttactagatatcagcagtagcaagacaatgtccagaataactcatcaaactgcctgccctttaatagagaggattcatttctttctcataccactcctatcacaacacctgctgtaagacacttacattaccatcagcatttccttgtgacttttgtgagtactacctcactggcagtggtgtttttatcccagggaagttatagaagtaaaaactccattcgaacccatggagcagaaaaccaccgacatctactctatgagtgctgggcctcctggggcgtgtggtataaataccaacctttggatcttgtaaggtgagtttttaatcagctgcaaatataaagcttgcacagaatgattagggcagactgtcagctgggacaagctcccaatgaagcaaaaagagcctgaagtgtacagctctcactcatatctggcttcttcacaagaggaaactcatctgaggacatcagctgttcttggtaaacctaccatcgctctgatgaggatggaatttcccccaaaaagagtcttagagaggggcccaggaatgggcatgtgagatcagccaggcctgtcacaagacttcgtaagaagcgagtcacccatgtgagtcttattgacaaaccatcttgtacaaaggtaacactgcttacatatattactgacaaagtaaaatatttactactgttagcaaataggacaaatggagtactgtcattccaatacatttcaggcttagttttcattcagaactaataacctttaaagattgttttaatctgcagatcaaaaagtatatcagcttttaacctatgataattgtgaagtggaaatgtatgtttttttattattattatactttaagttctgggttacatgtgcagaacatgcagttttgttacataggtatacatgtgccatggtggtttgctgcacccatcaacccgtcacctactttaggtatttctcctaatgttatccctcccctagccccccaccccccataggccctggtgtgtgatgttcccctccctgtgtccatgtgttctcattgttcaactcccacttatgagtgagaacatgtggtgtttggttttctgatcttatgatagtttgccgagaatgatggtttccagcttcatccatgtccctgcaaaggacatgaactcatcctttttttggctgcatagtatcccatggtgtatgtgtgtgtaaatatatgtgtgtgtttttttttaactatctatatcttcccaaccttctgccttggcagcattattctctgacatctctatttatttagaggctggttattaagattgggtaataacaacccacatttcctggattccttattaaagagaaagtcatgtctcatttcctagactagctagatgtgttgtttcacttaaataccagggccataaaataaaatgagcccagaggggaggacaaacaaaagacaatgcactttatatttgagcccttatcaccaagtgttccaagggcattgatgaattgtgatccattccttgtgttggtaacagataatccagataatcttagtgaatggaaaatattttctgagataagatcattttcctttggtcagactcagtgtatgataaacagtggggggaaaaacaaaagtaaattctcttcccagcctcggtgccatgttacaggattacattgattagaaatcacagataattgctgtaggcagcacatttcccattcatgacagtattttgattaagattttgcggttttggttagtcaatgcatattaattaactgtctattgtgtatctagtactgtgctaagtactattggcaaagccaaacagacgccaaatggtctctggctctgaaaaactcagttttcctcagcaacacaggccctgcatacttgaaacatcgagaaaagaaaatacaaggccatgcataattaggtaaaatgtgtgacagaggccataagttttacagtaattcagaaaaatggaaagaacggatgtggcagcacccctgtggaagtctctggagagctgagccctgaagaacagtggcatttatgttgggcaaataaagggggatgaaaagcacaaccaagccttgagtagaatgaaagttgtggagcatctagggaatgtcatctcttagacagttcctatcctataggttttacttccaccatatctctcgaatcgggccccacctcagcatctccactgccttcacttgttacctggactatgacagctgtgtgcctggttggtctccctttgcccactccggccccttccagtccattctgtcttctcagaataagcttgtatacaaccatgttattttatggaagggctaattctagttctgctatagagtagtagtagaagaaatgtaagcccagatcctagatttgatgggatgttcttttatcttggcttaccttgcttgcagtttacctcgtaaggccgctacaaagtaaaatgactatacgaagtttcataatgcttaactttacacactgcactgtaatttgcaaggccgttgtgtctttaacaggcggtactttggagagaagattgggttatattttgcctggttgggctggtacaccggcatgctcttcccagctgccttcattggattgtttgtctttttgtatggcgtcaccactctggatcacagccaagtcaggtacggggagctcttggatgagtttgcctttgtttagtacttagaggtggctgtttgcactttgggggtattcacagattgtggagacatttagcttttcactcaaacttcctaccctctcatggaaaaactcaaagtttcagttcactaggacctctccatccattgtccttgctgccatggtcttcagataccatgcaagtaaaagttaccttttcagacatacaagccactatatatccacagaacaagccgccttcattcactggctataagtgctctctttttttactttttcactttttttcttagctgatactgcaaaatagtgaactaacaattctctcttatgaattctgtgtttttacaacttgagccagaaagacatctcaccagcttgctagtatcttgggagcggttcagtgtcgatgaccattatcttggttgtctcaccagaatataggtcaaggtactcacagagatcttgttgcaaggctggacaatgatcttaaattgtaaatatgccttttaaatgtgattgcaaaaataaaagtgagtgattaagccttccacctacgaaaacattttactttctggtgaaattgttaatgtgttagttaaatatagttttcccccaggatagggctagaatctctagtcatttatgttttgttttccatattagttttaacttatcatacacatagagatcaagataagtatctttatatatcttcttactcccttaattcagtatgaaattgcttcagacctttgaaaagtgaaggacatttctataatttgggatataacaatcaatgtttggcttcatgtattttcctgagtttaacttattaatacataaagataaggaacagcctcataagtaggtttaccaaattatttaaatgggcaagaacttgtttacattaataacagataaagctaagatgcttctaagggcaaacatttaacctactggatcttatttactagttgaacattctggtgaagttagaaaaaaatgttccatgtcatcaaaaagcagtcctttctgttctcttttccagtaaagaagtctgccaagctacagatatcatcatgtgtcctgtgtgtgataaatactgtccattcatgaggctgtcagacagctgtgtatatgccaaggtaatttcaaactgtagcattttagatgaattgaatttaacatacaccttcctgagggatggtgggtaactctattctgtcatttccagtctttgattttcaagtgaatgttgtaggatagacttatctccatcattcagtattctaattcccatatctttgttaattgtccatgtatttggaaggcatggctctagacatcatccatggagctgcagcatggcacagtgtgaggagcacggtgctggagtcagagaaagttaggtccaaattttgactctgctgtttaccatttctctatctgggaataagatatttaacttctttgagtctcagttttctcatctgcaaaatggagaccatgatgcttgtttcacacggagttaaggtgtatactgagcatagtgcttggtaaatagacctcagtaaatgacagctatcatcatttgcctcctcttcatcatcattattgtcaaaatgacctccaattaaggctagctcagccacttacctctttagccctgaaatgtgccccctttctaagaaactcttttttcatagaaagaagctcagtcttctgagctttcttgtctctaaaatacaggaaatatgtgtcctctctgtcctaccctattggcatgacgtgaggactaaagaagagaatatatgtgaaagtgctatgagaaaaaaaatacatgacaccactatttctattatgtgttattgcatacctctttctcgtgatatgccttactttatttcttagacatattcctcacattcctagagttttttgatacttaggtggtggtgtccataacacaaaacaatagctgaagtttgagtttgcgaagacttttccaagagctactgccttttggcttgcccagattcagatataaatggcattggcagattttatccagcttttgtaatcactgaagcctggatctatctaattactctcttggcattgcagagttttgttcattttaaacaagggaacatttgataggcaacccaggatcccgcctatctataatgtctttagtactgcaggtggccggtctgtgtaggaggagcccagactgcagcagtgagcagtggttttagaaagatttgagctcttatgttgcaagggacaaaaaaagcacaaaatgctctgagccctatctttaggaaacactcagatagacctgagtggataaggataaatttaacagagtgactttaggacatagagatttggtgagcatcaagagctttgtcagtaatataattttgtttaaaggtcagatataagcctgaatgactcaggttttaaaattctgcttctggggaaaccccaaaatcagaagccaatttttttttttaatgtggaaagatatgcttgagtaaaattctctttttaggagatccttaataattcttttaaagaatcgtcatgaatagtttatgagtgctcagattttataggggcttattttgggagttattctccctaacttaagacctagaacaataataattataatagttacagctataataatagctagacaatctacattgattatttctaattctcacagcaacttcaagataggtgttattatttccattttattcagagactcaaagaggtaaaaattactcatgcatggtcatgcagcaataagtagctgggccttggtttattgcactgcaaaacatgccttctttaccactgtgccctgctgagccacaagatgtttagattctgaatttaacatttggccttgcctagaaacttagtaaaatgaaagataaaaagccttagaatgacagaattggagttatacagggtttcctttagaaatatttattagagatgtcagagtgatttcatgggactgtggatacacagaaatattaaatcagattggcgctgggatctagtccaatcagtggctgttctgctgatagggatgctgtatccttgactcttgtgtttgcaagaatcagaaacccaactcctactggcttagtcagaaagtgatgtaatggtacattttgccagaacagatactggggtggctcacgctgtgggatcatgagggcctcacagcctggaactgttcctccagggaccccggtggccctgcccacatgatcattctgtagactagttctctgtacaatagaaaagatggctaccagctgccttggctccaggcttacgttttccttcccttgtctccttaagtggatttttgtgcttattttaaactcctggtctgctgccacactgtgtctatgggaatcttctttggaggggaggggttgttgtcttccccatatatttcattattttggcctgttgggtacttgtcctctggaggcgtcagccactttgagtaagggtcagaggccaaggccaagtttgtcagtcctagtgagttacagagaggacagcgtgccccaggcacgactgagtgctactgctctatcagaggacttttctggtcagtttcatttttaaacctgcttagaacaaagcagaattgggcactttcccttgattgtaatctgccaatgctggggtttaagaggaggtggactatggagtgaatgccccagggcagctatccaggtagcacctgcttttcacccatgtctaacagagcaggactttgagcattccctgatattgctccaggaataccagcacctgtggtgtggcctgcttagctgatttctgagggaggggaaactaattgtccaatggccatttgagggagagaggctagagtagagcttatgtatttctctaacctgtgctctcactctacctggtatctacaacctacctctccccacacaccaccaccatcacacacataccagttcaagataacctcccatctcccctgaggtttctcagggtctttgttttttgtttttgtgttttgttagttcctggaatctactaccttgcttctccaggactgattttggcagaaggtgtcatcagcttaagctaactgactatctcattgggaaccggagcccctataaccttacccctcctcattcatatattgtcaaattgataactgcagcagaaagctgtctgtctccaaatgtttgtgtatcagccccagggcagtattctgattggttctattttgagccatgtgtcccttgggaccagcaggagttacctggagaaaggagaatggaagacagatgatctgggtagccaaaacaatgataactgcagtccattccagaatggacactgatggtgcaagctacactttctagcaactctcagtaaatactctgatagaggctgggcgcggtggctcacgcctgtaatcccagcactttaggaggccgaggcaggcggatcacctgaggtcaggagtttgagaccagcctggccaacatggtgaaaccccatctctacaaaaatacaaaaattagctgggcatgatggcgggtgcctgtaatcgcagctacttgggaggctgagacaggaaaatcacttgaacccaggaggtggaggttgcagtgagccgagattgcgccattgcactccagcctgggtgacagagtcagaatccatctcaaaaacaaacaaacaaacaaacaacaacaaactctgatagatagcacagtccagtcaaataccgctagaaccttcaaggttggtttgatactgagtgcccaatatacagcttaacattccctctggcatatgaaatagattagcttcagacatttgtctcacagtaggtatttgagtgctgcccatctctcctctattcaaagaaagagaaacttctggaataatctgaaatacttcacgttctgatataacatgaaaaacctctttatatttggtgcattctcgaaggaacaataaagtatactttataggtagctataaagtacccccaaaaaaggttattctttatgaacctatcagtcatcatttcaatttgtcatggacattggtattatttatactagaggcaggaatgagcttggcagttttgcagtaaaaatggatatttttgctttcttctgtggtgtttgcaatagaatatattattctagcaataaagtattgctagttgtctttgtgttatgtgcagtaggtaaatatagtgattacccaaggctttaataagggtagagttggatttagttaatggttctgctcttttttataaggctgaaatccagagggcagcccagaaaatgtttgctcaaaactgcataaacaaaatagccatgttttcaaagtgaataaatgaggcattaaaaacagtgcttgggaagttgaaaacctttaaagcagcactaacaataccttcctggtcctaaatataactatatccatacacatatgtacgtgtataagagttttgttgtgcacaaaaggggattcttagtagcactattggggatgctgataaatgttcaactagatgataaccacataaagagaacaaattgtatcctctatatatgaactaccttgcaattagaggaagccttttcttatttatggttcaaaaggaatattccccctacccaaaacaaagcctgtaaaactcattatataatcacagctatttttacagaacttgaaaaaatttgaattggaatatcatatatgagaaattaactcagcaccgattcttattattcacaggtaacccacctttttgacaatggagccactgtcttctttgctgttttcatggcagtctggggtaagtgttctataaccataaaacttgagttttcctcatatgccctatgatatattcctttagaagtttcactttggatgtgaaagaaagaagcttgagtaaatggaattagctttcctattagtagaaagttggtaaataatttattgggtttattttaaacgatattgtagaagagagacatgtctgatttctcttaaaccttcaacaatgtcattagcactctgttattagagtagaatttactttctgttggacacagaaataaagcttatggtacaactttagtttaggtcaggggagaactgaaacaccatctcagtatatataggactttctattgtaagtggctaatgtgtgagtacccacctttagctttcttctagctctgtacaaaattacccctaaaaacaaggtctattcacaggactgatttgagctttttgatataatttcaagctaacagccccatcacacaaggtgtgatggaaacagtcaaatatttggaagtaacaggacttgattgaaatctcaactccctttacacactaggctgtgtgatttttggcaagttatttaacctacctctttgtaaaatgggttaatatataatagtcaaataattataaagcttcaatttaatgatatagaaaaacatctcacaaattcatggaaagcagttaatggcagttacctttggaaaggaagattcatggaagagtaagtgaacaacgaggagagacaaactttatgctatatatttttagtctggtttgaattttttacaattatacttttctcctataactttaattgccaaaatctgaattttgatgtaacaaaattctactacctttagacttaggctcatcttgttcattatgtctgctatgaatattggaatcttccccatctttcaggccccagctgaaatgtcatctgctccagccaaaagatgtctttctcctttgaatttccatggcattttgttcttagggcacttaaaattattttcacagataacttgtcttgcctagtagatttatggtccttgaggaccattatgattatcagagatctcatattttttttttttttgagatagatggaatcagtaagtttctgttggatggatgggtgggtcaatggatagataggtggatggatggatggatggatggatggaaggaaagaaggaaaaagagaagaagaaagaaaaagaaattaccaaaagtatttatttatgatacagtgaatgtatttaagaggtcttttttgataagtggaaacataaaaccttgttcacttgagggagcttgttcttgatatattgtgtcttttgtacctagagactgtcaaaggaaaattgtcccacccatcacagctctgttgaagggacatgttttgaaccccatgactccagtccctctcagccagtaagcatttgaaccaagatcagtcaaaccacaggttggtgagtggcctgggaaaaggcctgaggttctgcccagacaaggactggtagggccacccagattcttattctccagaatgtggactagaaaatgtaaagggaaatagggagttagcagcaggaatggacactgaaaaatacagagggcaggagggagggagaaaaagaaagattaaaattgaccattgggtagaagtagggaccaggaggaattaggaggctgaagttatgagaatcagaacctagaaatagatagaagcaaagaactagtggaaaaattagagggcgaaaaagccaactgggagaaaatgtaagacaaccagagggaagcaaagagagaatatagccaagtcatgttactagtggagtgtcaggatgaagacccagactctcttgtggctgaggcctctctcaagcttcgggcttccatatcctgtctctgaacaggccatgtattttttcctgtaggattcctgcctcccttggtggaccttgtgaaaagctttcactgttcatgctacccttaatgcttctctgtcccttgcaaacaaactaaccctaacagaattttgattacaggcctgagctctcagataaagaatgcgtatatagttttactagaatctattagtatcatacaccgtgattcggataagccatataatgcttaagctttgccatggtcacaaatgaggggactctggaaatatattcatttcctaaaccagtattataaatactaaatgtattctgtaaaccttaatgtatatagtattctgtaaacgtaaatactaaatgtatattgtaaacctaaatgtattcatttcctaaacttttcaggtcatagcacacataaaaatgaaaatatttacacagcagctgctgtacatggaggagcctcctcatggccatggatagggctgtcccaaacaccccagcctcagaagccacaagggttgaaaggggcattattgttattcctggcataggcatttggaagttctgccttgggctgctaatttactgtgcaatgagttaatgcttctatataagagtggtatcctggtggtatcctggaagaattaaaacacaaaacttccttacccacttcaatatttcaccaatttcaaatatactttgaattaaataatggtttcttctcacagtttacctcctgagactacatagaagtaaatttttgtatgatgacatttgttcataaggcagaggttattactctcccccactacctccattataaaatggattgcataccctctttgcaagttgtgttttatgttatagatgacaaataggttttgttttatccccttgccaacctcagctgattggtgctggctgcctggagcatggagttgagaagtttctgaggttgaaagtgggtggattggagatttaacagcccttgtggtttggagtatactttgtaagactctgatggatgttttataataaactttgggcacagaggaacattttagggccattccaggcaagacatgcctggaataattcaccctctgaattgctttgtcttagatgacaacttattgcttaaatcccacattattcccagaaatgtgctagtttgagaaaaagaatgagttgccccaagtgtttctttgtagatagagataatgccttttgcagaaatctgaaagagtcaacaatattaacagttatattaatagcattcatttccgagggattactatgtactaaatgcagtcctaagcattgcccatgtatcatctcatttaatctctccagcaagcttttaaaaaggtactgttcttatcctcatatgacagataaggaaactgcagcagtagctagaaagtggcaaagccaagagttaaactgggcagtgtgagctcctctgctctactgctagaatcaggtattgtttgttaccatttccttctgttttagagacctgaaccttaaaataaaggactgctatgcctgtcctgagcctcatttatcctgctttgagacagtaatgttctataaaaatgtgtcagttctaatggagctcagtttaatggtctcaggatcatctcttatgatcgacaagttacagcattaaagaaaacaaatgcactctattttcaggaaattgctagatatggagctgatgagaacagatgtaagtggtttacaagacttctgaagggctgggcttgacgtgttcattttgttacctttgctttgtgtgttcaccggaaaaaaataataaggctccatctgtaaccagtttgtagcaactgggagggccttggcattgggttaggaatcctgacagaactctactacctttgttcaggtcacgtctgtgtgagtgcagggctccctcgggatccctgaggtatgctgtgagcctgggtctcggctggaattacagtgtggctcattcctcaatgctcatttttgttcagaaaggtccaagggtcagaatgattatggactaaataactcctctcccgagggaaaaaatgagtcatcagggaactagatgttggcagagacctgtcggggaaacagattatttccctctgttctgtttctggtttggtttgttttttttctctctctcccccttgtttttcattttttacttctaggattgccaaaagttaagttatccccagtaaacacaccaagcaagatccacaaagctctttaatcaaaatgacaagatggtaattatttagtgtgatcctgttagtaattggtgaatgaagtatgtctcatttaaaaaaataaattttgcaagaatcagccttttgtttctagatatttatgctaactttatattttatagtcttatctacatgttccacaaaaaaatggtaattgtatgttgaaaaaggtacacatttactaaaggcctaccatgtttgtatgcacattcacataggatacctcatcaatttctcatcacccattagaaagaaattactaacctcattttatagatgaggatactgaggctcagagaggttatgcaacttgcccaggattccagtagctgataaggtgtggagcctaaactttaaaccagatctggtctgtttcactccagagtcattccaaagtgtgtccaccatgttgtgcatcttctgtgaagtgtgtcaattaagatctcattaactcatacacaaaaatgagttagatgtgatctctgctttcaaaaatctcagtatattaaagaagcgttgataattataatacagggcaagtccaatttacaataggccaatgagggtttatgtagtcaacttcctgaggcaaaaggaaaagcagaaaaggttcacccaagaagagatattggaaagaagtcttagctttgccaggcagagtagtggggttggaaggagacatagataacattcttaggtgacaagagtatttgtaaagctctgaaaaggaagaattggctgttcagagtgatagggaggttgagtgtgtattagtttcctaggactgctgtaacatagtactacaaactgggtagcttaaaacaatagtttattgcataacagttctggaggctcaaagtccaaaatcaaggtgtcagtgggattctgagggctgtgagggaaggatctgttccatgccagtctcctggattctggtgatggctgatggtccttggccttccttggtttgtagatgcatcactcctatctctgcctctgtcttcacctggcatttgccccgtgtctctgtgtcttcacatggctatcttcttctcaagacggtggtcatattggattaagggcccagcctactccagttatgaccccatcttaactaattacatgtgcactgaccctacttccaaataaggtcacattgtgaggtactgggaccttttttgaggggacacagttcaacccatagcagagtacctgttgaaggctgagagctacttatcacagaccacttgagctacaacagaacatggcttcacgctgtaagcaacagaaagccaactggagttataatccgggaagggacatcatcaattgtatttgggaaataactctggcaacagtgcagggagaggtgaaagtggaggccaactggtggcaggcaggccccttagaaggcattctagtactcagtcaaaatattacgcagaacttggcttcagaaaagatccaatttccagaataaaaaccacacgtgtaaaatgttttcctagctttagttatttataatatgcaaaatttgtgaacaacgtaaatgtccaacaatagaagaacggtttggtaaattataagcagctattataaattgctctttcaaagcatgttgataatacaaagcttgtatttaaatttttttaaagtagggtataaagtatacaagtaaaacacgattttgagtatattaaatgtaaatgaaaacagaaagaaatgatgccataatattaatggtggtttgctttatgtggtgggattgtgggaagatttttttcaactttaagtataatttatgtgcaataaaatccagcaactttaagtgaacaattcaacaaattaggtcaaatatatatagtcatggaagcatcaccataatgatgatatataagagaactttttttcttttttttgagacggagtctcgctctgtcccccaggctggagtgcagtggcacaatctcggctcattgcaagctccgcctcccggcttcacgccattctcctgcgtcagcctctcgagtagctgggattacaggcgcccgccaccacgcccagctaatttttttgtatttttagtagagacggggtttcactgtgttagccagaatggtctggatcttctgaccttgtgatccgcccgccttggcctcccaaagtgtgggagccaccgtgcccggcctaagagaacatttttatcctctcaaaagtttcctcatgcctctgcagtcagtcccttggcaacctgaaacctgctttttaccactgtagtttcagctgttctagaatttcatgcagattaaattattcaatatatagcattttgtgtctggctactttcacttcagttaatgctgttgagattcatttatgctgttgcctgtgtcagtagctggtttctttttagtacagagtagtattccagagcctggctatgtcataatttgttcgtctacttaccagttaatgaatatttgggttcagtatggtttttaactactataaataaacctagaaactattggctcttctagttttttgtttttgtaaattttcataaaagcctttgtagccattcatcttggatgaataattaaaagtggcattgctggatcatgtgataagtgaatgcctaacttagtaagaaattgtttcccaaagtggccatatcgttttgtagtcaatatcagcatgatatgagaattccaggtgttccacattctcacaagcacttggaattgtcagtctttataattttagtcattttagtgggtatatggtattatcccattgcagttttaatttgcatttccctaatgagtagcgatgttgaacatcttttcatgagcttatttgcaatctgcacatcttacttggtgaagtgtttgctcagatcatttgtccatttgttattgggttgtctgtcttatttttaagttaaaagagtacttttatatattctaggtagaaatgcttcatcttacaggtgtttgcaaatttttttccctgtctgagtcttgcatttttattttttaatggtgccttttgaaaaccaagagttttttctttttatatagtctaatttaaattttcttctgcactcattttttgttttatttatgaaatctttgccaaactcaaagtttctaagattttcgtctatattgtcttctaaaaagcttatcgttttagctcatatgtttaggtttatgacttatttcaagttggtttttgtatatggcataacgtaaggggcagatttatttctttccatgtagatatccagttttcctagtaccatttgtcaaaaacgccgttcttttcctttttgaattttcttggtacattttggttgaaatcaatgggccatatatgtatgggtctgttttcagaatttttattatgtttgatgtgtatgtgtacacatggcaataatccactgtcttgattattatggcataataactgttaaaatcatatttttcttttcaaaaattgttttgctgttttaggttctttgcatttccaaaaaaattgtagaatcagcacttaaatttcttcaaaaaaagtgttgatattttgattgggattaagttgaatcaatgtcagtttggaaagattgagtgtcatttagctttttgtttatttacatattctgtaatttctctaagcaatgtcttattattttcaatgtacaaggcttccagatattttgttaaatttatgcctatatattggattttttgagttttttacaaatagtatttttctgtaatttcaattgccagttattcattgctactacatagaaatacaattaacttttgtatattgaccatatatcttgtgacttactaaactcagttattagtgcttctagcttttttatagattccttaatattttcaacatagatgattaagaaatttataaaataaataagttttctttctttctaatctatatgagttttatttctttttcttgccttatactggttaggacctccagaataatgctggatacaagttatgtactagacatccttgccttatgcccagtcttaggggaatgtgtttagtctttcaacattaagtatgatagaaaccacaggttttcatatatgtctgttatcaagttgaaggacattccttctattattaggaactgagggttttaaaaatcatgaatgggtatagaattttgccaaaagcttttcctgtattaactaagacaatcctgtttctttctttcttttatttttttatacttcaagttctgggatacatgtgtggaacgtgcaggtttcttacataggtatacatgtgccatcgtggtttgctgcacccttcaaatcgtcatctacattaggtatttctcctaatgctttccctccccgatccccctatcccccaacaggccccagtgtgtgatggtccctgccctgtgtccatgtgttctcattgttcaactcccacttaggagtgagaacatgcagtgtttggttttctcttcctatgttagtttgctgagaatgatggtttccagcttcatccatgtccctgaaaaggacatgaactcattcttttttatggctgcatagtattccatgttgtgtatgtgccacattttctttattcagtctatcattgatgggcatttgggttggttcgaagtctttgctattgtgaatagtgccacaataaatatacgtgtgcatgtgtctttatagtagaatgatttataatcctttgggtgtatactcagtaatgggattgctgggtcaaatggtatttctggttctagatccttgaggagtcaccacattggtttccacaatgattgaactaatttacactcccaccaaaagtgtaattagtgtaaaagcgttcctatttctccacatcctctccagcatctgttgtttcctgactttttagtgattgccattctaactggcatgagatggtatctcattgtggttttgatttgcatttctctaatgaccagtgatgatgagctttttttcatatgtttgttgcctgtgtaaatgtcttcttttgagaagtttctgttcatatcctttgcccactttttatggggttgtttgtattttcctgtaaagttgtttaagttgcttgtagattctggatattagctctttgtcagatggatagattgcaaaaattttctcccattctataggttgcctgttcactctgatgatagtttccattgctgtgcagaagctctttagtttaattagatcccatttgtctattttggcttttgttgtaattggttttggtgttgtagtcatgaagtctttgcccatgcctatgtcctgaatggtattgcctaggttttcctctaggatttttatggttttaggttttacatttaattttttaaccgatcttgaattaatttttgaataaagtgtaaggaaggggtccaatttcaattttctgcatatggctagccagttttcccaacaccatttattaaatagggaatcctttccccattgctgtttttgtcaggtttatcaaagattagatggttgtagaaatgtggcgttatttctgaggcctctgttctgttccattggtctatatgtctgttttggtaccagtaccatgctgttttggttactgtagccttgtagtatagtttgaagtcaggtagcgtgatgcctccagctttgttctttttgcttaggattgtcttggctatatgggctcttttttggttccatatgaaatttaaagtagtgttttctaattctgtgaagaaagtcagtggtagcttgatgtggatagcattgaatctataaattacttggggaagtatggccattttcacaatattgattcttcctatccataagcatggaatatttttccatttgtttgtgtcctctctcatttccttgagcagtggtttgtaattctccttgaagaggcccttcacatcccttgtaagttgtattcctaggtattttattctctttgtagcaattgtgaatgggagttcattcatgatttggctctctgtttatctgttcttggtgtataagaatgcttgtgatttttgcacattgattttgtatcctgagattttgctaaagttgcttaccagcttaaggagatttggggctgagacgatggggttttataaatatacagtcatgtcatctgcaaatagagacaattcgacttcctcttttcctatttgaataccctttatttctttctcttgcctgattgccctgaccagaactttcaatactgtgttgaataggagtggtgagagagggcattcttattttgtgctggtttttgaagggaatgcttccagcttttgccccttcatatgatattggctgtgggtttgtcataaatagctcttattatattgagatacattccatcaatacctagtttactgagagtttttagcatgaagcggtgttgaattttatcgaaggccttttctgtatctattgagataatcatgtggcttttgtcattggttctgtttttgtgatggattatgtttattaatttgcatatgttgaaccagccttgcatcccagggatgaagccaacttgattgtggtggataagctttttgatgtgctgctggattcagttttccagtatttcattgaggattttcgcatagatgttcatcagtgatattggcctgaaattttctttttttgttgtgtctctgctaggttttggtatcaggatgatctggcctcataaaatgagttagggagaagtccctcattttctattgtttggaatagtttcagaaggaatggtaccatctcctctttttacctgtggtagaattcagctgtgaatccttctggtcctggcctttgtttggttggtaggctattaattactgcctcaatttcagaacttgttattgggctattcaggggttcgacatcttccttcttctttttcttcttcctggtttagccttgggagggtgtatgtgtccaggaatttatccatttcttctagattttctagtttctttgtgtagaggtgtttatagtattctctgatggtagattgtatttctgtgggatcagtggttatatcccctttatcattttttattgtgcctatttgattcttctctcttgtcttctttattagtctggctagtggtctatgtattttttaatcttttttaaaaaacaattcttggattatttgatattttgaagggtttttcatgtctgtctccttcagttctgctctgatcttagtcagccttcttgtcttctgctagcttttgaatgtgttttctcttgcttctctagttcttttaattgtgatgttaggatgtcaattatagatctttcccgctttctcctgtgggcatttagtgctataaatttccctgcaaacactgcttccgcagtttcccagagattctggtacgttgtgcctttgttcccattagtttcaaataacttatttatttctgccttaatttcgttatttacccagtagtcattcaggagcaggttgttcagtttccatgtagttgtgcagctctgagtgagtttcttaatcctgagttctaatttgattgcactgtggtctgaaagactgtttgttatgatttccgttcttttgcatttgctgaggagtgttttacttccaattatgtggtcaattttagaataagtgcaatgtagtgctgagaagaatgtatattctgttgatttgcagtggggagttctgtagatgtctattaggttcgcttggtccagagcagagttcaagttctgaatatctttgttaattttgtgtctcattgatctgtccaatattgacagtggggtattaaatctcccattattattgtgtgggagtctaagtctttttgtaggtctctaagaacttgctttatgaatctgggtgctcctgtattgggtgcatatatatttaggacagttagctcttcttgttgcattgatccctttaccattatgtaatgcgcttctctgtcttttttgacctttgttggtttaggtctgttttatcagagactatgattgcaatccttgctttttttttctttccatttgcttggtaaatattctccatccctttattttgagcgcatgtatgtctttgcatggagatggatctcctgaatacagcacacagatgggtggtcttgactctttatccagtttgccaacctgtgtcttttaattgaggcatttagcccatttacatttaaggataatattgttatgtgtgaatttgatcctatcgttaggatgctagctggttgttttgcctgttagttgaggtagtttcttcatagcgtcaatagtcttgacaatttggtatgtttttgcagtggctggtcccagtttttcctttccatatttagtgcttccttcaggagctcttgtaaggccagcctggtggtgacaaaatctctcagcatttgcttgtctgtaaaggattttatttctcctacgcttacgaagcttagtttggctggatatgaaattcagcgttgaaaattcttttttttaagaatgttgaatattggcccccactctcttctggcttgtagggtttctgcagagagatctgctgttagtctgatgggcttccctttgtgggtaacccaaccctttctctctggctgcccttaacactttttttttttcattttaaccttggtgaatctgacagttatgtgtcttggggttctcttctcaggagtatctttgtagtgttctctgtatttcctgaatttgaatgttggcctgtctttgtaggctggggaagttctcctggataatatcctgaagagtgttttccaacttggttccattctccccatcactttcaggtacaccaatcaaatgtaggtttggttttttcacatagtcccatatttcttgaaggctttgtttgttccttttcattcttttttctctaatcttgtcttcacactttatttcattaagttgatcttcagtctctgatatcctttcttctgcttgatcgactcgactattgatacttgtatatgcttcacaaagttctcatgctgtgtttttcagctccatcaggtcatttatgtcctctaaactggttattctagttagcaattcctctaaccttttttcaaggttcttagcttccttgcattgggttagaacatgctcctttagcttggaggagtttgttattacccaccttctgaagcctacttctgtcaattcgtcaaactcattctccatccagttttgttcccttgctggcaaggagttatgatcctttggaggagaagaggcattctggtttttggaattttcagcctttttgtgctgttttttcctcatcttcgtggatttatctacctttggtctttgatgttggtgatcttcacctggggtttttgagtggacatcctttttgttgatgttgatgctgttcctttctgtttgttcgttttccttctagcagccagacccctctgctgcaggtctgctggagtttgctggaggtctactccagaccctgtttgcctgggtatcagcagtggaggctgcagaacagcaaagattgctgcctattttttcctctggaagcttgagcccagaggggcaccccccaaatgccagctggagctctcctgtatgaggtgtctgtcgacccctgctgggaggtgtctcccagtcaggaggcatgggcatcagggacccacttgaggaggtagtctgtcccttagcagagctcgagcactgtgctgggagatctgctgctctcttcagagctggcaggcaggaacatttacgtctgctgaagctgccccgacagccactgcttcccccaggtgctctgtcccagagaggtgggagttttatctataagcccctgactggggctgctgcctttctttcagggatgccctgcccagggaggaggaatctagagaggcagtctggctatagtggctttgccaagctgcagtgggctccacccagttctaacttcctggcggctttgtttacactgtgaggggaaaattacctactcaagcctcagcaatggcggacacccctccccccaccaagcttgagcatcccaggtcaacttcagactgctatgctggcagcaagaatttcaagcctgtggctcttagcttgctgggctccgtaggggtgggatccgctgagctagactgcttggctccctggcttcagccccctttccaggggagtgaacagctctgtcttgctggcattccaggcaccactggggtatgaaaaataattcctacaactagcttggtgtctgcccaaaaggctgcccagctttgtgcttgaaacccagggccctggtggcacaggcacctgagggaatctcctggtctgcaggttatgaagactatgggaaaagatactaatctgggccagagtgcaccattcctcacagcacagtccctcagggcttctcttggctaggggagggagttccccgaccccttgtgcttcctgggtgagacagtgccctagcctgctttggcttgccctccgtgggctgtacccactgtctaaccagtcccaatgagatgagctgggtacttcatttggaaatgcagaaatcacccaccttttgcactgatcccacagactgaagctgttcctattcagccatcttctgttctcaatcctgtttcttaaaagctggacaatatattaattaaattgattcattatgaaataataggatgatcttgcattccaaggatcccacttcatcataatatattaccttttatgagtgttgcaatatttgatttgctaaaatactttcaggatttttccatctatcttcatgagggttattggcctgtaactttttacttctagtgtctttttgttattgaggtgatgttggcctcataaagtgagttaggaaacgtactttcttctagaaagtagaaatggtgttatttccatcttgaatgtttggtaaattgtaccagtgatgccacctgggcctggagttttctttgcaggaaggcttttaatgcaatcttagtcatttaatggatggaaggttgtccaggttatctttttttttttttttttttttttttttttttttgcctttgaaagagtcaatttgtgaatttattggcataaatttgtttataatattctcttatcttctttctaattcctataggatgtgttatgatatcatattggtcattcctgaaattggtaattaatgtcttctcttttcctgttcattctgtctaaaagtttatcagttctattgatcttttaaagaaccagcttttggttttaatgatgtttttctattgtttttatgtttcatttttcattgatttttgctgttatctttcattttgttcctcatgcttgctttgcatttaattgctcctttttctaatttcttaaggtaaatgcctaattatttatgtgaggtctttctcattttcaaatatgagtttaatgctataaatttcctctaagcactgcttagctatatcccccaaattgtgtttttatttttaatcagtccaaaatattttctaatttcctttgtgagttcttctgtgatctgtgagttactatgtagaagcgtattgtttaattaccaaatgcttgggagattttctaaatttccacttgctgttagtttctaacttcattcaaaggacatagtttgtgtggtttcagttcttttaaatttactgagaaatgttttatgacccacagtatgatatcttggaaaatgttccaagtacatttgaaaagactagtagttccccacatggacacgcggaggggaacatcacacaccagagactgttgatgggtgggaggctagggaagggatagcattaggagaaatgcctaatgtacatgatgggttattgggtgcaacaaaccaccatggcacatgtatacctgtgtaacaaacctgcacattctgcacatgtatcccagaacttaaagtattataataataataataataataataataataataaaagattagtagttcccctttttccacagttttgctttccacagtttcagtgacccactatcaacaacggtccaaaaatattaaatggaaaattccagaaataaacaattcataagttttaaattgtgcacaaatctgagtagcatgatgaaatctcacattgtcctgctccctcccacatgagatgtgaatcattccttgtttggcatatctacaccgttcacactacctgcccattagtcatttcgtagccgtcttggttatcagatactgccactgtatcacagtacttgtattcaagtaacccttattttacttaattatgtcatcgaagtgcaagagtattgatgctggcaatttgggtatgccaaagagaagctgtaaagtgctttgtttaagtgaaaaggtgaaagttctcaacttaataagtaaagaagaaaagaaaaaatcttacactgaagttgctaagatatacaactgtaagatatattcttacagttggtaagaatcttctatgcatgaaattgtgaagaaggaaacagaaatttgtgcaatatatatataaggttcagtagtatctgtggcatcttctgagggtcttggaatgtattacctgtggataaaaggggactagtgtatattctgctgttgttaattatagtgttatctaaatttcattgattattaagagagaagacccaaataaataaaatcagatatgaaaaaggagacattacaactgataccacagaaattcaaataattattagaggatactatgagcaactatatgccaataaattggaaaatctagaagaaatgcacaaattcttagactcatacaacttaccaagattgaaccatgaggaattccaaaatctgaacagaccaataatgagtaacaagatagaagccatactgaaaagtctctcagtaaagaaaagcccaggacccaattgcttcactgctgaattctaccaaacatttaaagaagatctaatagcaatcctacttgaactgttctaaaaaatggaagaggagggaatatttccaaactcattctatgagtccagtattaccctgataccaaaaccagacaaagacacatcaaaaaaagaaaactacaggccaatatctttgattaatattgaatcaaaaatcctcaacaaaatattggcaatcaaaattcaacaatacatgaaaaagatcattcattataaccaggtgggatttattccagagatgcaaggatggttcaacatatgcaagtcaaccagtgtgatacatcatatcaacagaatgaaggatgaaaaccatatgatcatttcaattgatgacaaagaaagaatttgataaagttcaacatttattcatgataaaaaccctcaaaaaactgggtgtagaaggagaatacttcaacataataaaagccacatatgacagaccaacagctagtatcatactgagtggggaaaagtgaaaacacttcctctaaaatctggagcataataaggatgtccgctttcaccactgttattcaacatagtactggaagtcctagctaaagcaatcaaatatgagaaagaaataaatggcacccaaattggaaaggaagacatcaaattatccttgtttacagatgatatgattttatatttggaaaaaacctaaagactccaccaaaaatctattagagctgatacattcagtgaagttgcaggatacaaagtcaacatacaaaaatcagtagcatttctatatgccagcagtgaacaatctgaaaaagaagtcaagaaagtaatcccatttacaatagctacaaatacaatcaaagaactaggaattaaccaaagaagcaaaagatctccacaatgaaaactatagaacactgacgaaagaaatggaagaggctttttctagagatgccctgctgggagagtatccatggctttgcgtccccatcatggccctgcggtcggcggcctcctcctggagcacagcaaggtcaggtggcacctgcttgagtcctgcgttgccatggccacagttcctgagttgctgcagcagcaggaggaggaccacaggaagctgagatctgtatctgtggacctgaatgttgatccctcacttcagattgacatacctgatgcgctcagtgagagagataaggtcaaatttacagtgcacacaaagaccacactgcccacatttcagaatccagagttttctgttacaaggcaacatgaggactttgtgtgactacatgacactcttcatgtaccctagaacttaaagtataacaaaaaaaaaaaaaaaaaaaagaaagaacagaccatgctgggcttattgtgagtgttttagaaaatcaaataagctagttctttctgccttgctattcatttagtttaaagagacttatatccactttttataatggattgtgaaaattttgatttcatctacctactagagtatttgctaactattgggtaagtggaaaatatgtgaaggaatagtgttacagctttgaggtaatgcatacaggcttacattatttatgttgtaaagtggtataaacagtgtaatgactttagtcttatttacctttaggtttggtttttctctggtatgttctttccaatgtcagtagaattgatttctaggaaacattagtattggtaatagtatgtgataagatttctcaaaagtgctgaaggaggccatgcctgtaatcctaacactttgggaagctgaggtggatggattactgagctcaagatttcaagacctgcctaggcaacatcatgagaccttgtctctactaaaaatataagaaattagctgagcatggtggcacatacctgtagtcccagctactggggaggctgaggcatgagaatcacttgaacctgggaggtagaagttgcagtgagccgaggttgcaccacttcactccagcctgggtgacagagtgagactctgtctcccaaaaacaaaaaagtgctcaaggaggcagttttcagcccttgattgttaattcttggctgcaggaacagaggcttagctgattttaaaggagatttccatgcattttgtcctgccatgcagactgaagaatctgtccaaatgacaatttcttaataattgaacaaaattagtactgaagcttatatttagatatgttctgttcattcaaaatcaaagtccttgattatcctttgggattaggaaaaaaatcctttggaatactggagacttcataatcttgatggctaatcattggtgtttagcatttgttgtactagttttaggccaacattgaagcagtatagacactgttgtgctctgaacgattgtctgtaatggataaactgggcaaatgattgccatcaaagtgaatacaggaagatacctccttttaaatggccagaagaaataaggaaggttaagaaaaaacaggagttgacttttaaatagccccataggagtggagtggttgtctcctgtggaccagcaagagtagaacgaggcaccagctagaaaacatcgcttctgggacaagagactcatgagttcctgcctctgctgcagattccgcctgctcctacgaaggctgacttcaatggtccttgagagaagatgcagaaactgggagaaggtaaagggtctttgaccaaagaagaatttgccaagatgaaataagaactggaagctgagtatctcgctgtttttaagaagactgtgtcctcccatgaagcctttctttagtggctttcttctcaccctgttctcagtaaagatcgcaactttcatattttcctggaatatgatcaggatctaagtgttaggtggaaaaatactaaagagatgtttggtggcttcttcaaaagtgtggtgaaagtgctgatgcagtcctttttactggagttaaggaggtagatgacttctttgagcaagagaatgacttccttattaactattagagtaggatcaaagattcttgtgtgaaagctgacaaaatgaccagatctcataaaaatgttgccgatgactatattcacactgcagcctgcttacatagcctggctttagaagagcccacagtcatcaaaaagtatctattgaaggttgctgagctatttgaaaaacttaggaaagtagagggttgaatctcatcagatgaagatttaaagctaacagagctcctccgatactacatgctcaacatcgaagctgctaaggatctcttacacagatgcaccaaagccctcattgactatgaaaaatcaaacaaagctctggataaggcccagtttaaagagcaaagatgtcaagttggctaaggtacactaggaggagtgctgccagaaatttgaatagctttccaaatctgcaaaggaagaactgataaatttcaaacggaagaaagtggcagcatttagaaagaatctaattgaaatgtctgaactggaaataaaacatgcgaggaacagtgtctcccttttgcagagctgtattgacttgttcaagaataactgatatgccttcactctgaagaaaagaaatgaatgtgaaagaaagccaaacatcacttgcacttaaatcattaccagcggaagatttattgtcttcaactttagtttaaaattatgtgaataaatattttgatttctacaaatcttaacatttaaccatgttggtttaaaaatattgttgcttgctatttggacataactaatttttccttgtgcatttaatacctctgggcagaatctaaatactgagttctcctgtagtatgtctttagttactaagagaggatgtaggagacatatgccttctggaaacaagtagaagcaatcatctggcccatgtcctacaaacccatgaatgtcagggaggtgccagttacagcaggtgattcagcaacttgaggcaggtaacagaccttccattcctcactgaaggtggggtttgtgtttttgttttgccccctgttactcccctggtagtcatctggtgtttgtactataacaacagcaagaaaatctcatttgtctttatgtactcttggcacctcctttttttaaatcgagatataaatatttgaggggagaaaagtatctacgggtatatatggaaactgataatgtggtctactttataagatggccagatctacattaggaaaagtatgagctccttccatagtgtctgtgggaggtgatggggggagaggggacagtgtatgtctttggcgtttgtttttttataaagtatataataaaataatcatgctactaaaaaaaagaaattgaagaggacacaaaaaatggaaaaatagtccatgttcatagattggaagaagcaatattgttaagatgcccacactacccaaagcaatctacagattcaatgcaatccctataaaaataccaattatgtgcttcacagaaatagaaaaaataatcctaaaatttatgtggaatcacaaaagactcagaatagccaaagttatactgagcaaaaacaacaaaactggaggaatcacattacctgacctcaaattatactgtagatctatagtaaccaaaaaggccaagtactagcataaaaaaacagacatatagaccaatgggatagaatagagagccccaaaacaaatccacacacttacagtgaactcatttttgacaaagttgccaagaatatacattggggaaaagtcttttcaataaatggtgctaggaaagctggatatccatatgcagaataaagaaactagacccttatctttccgcatatacaaaaattcaaatcaaaatggattaaagacttgaatataaaacctcgaactatgaaactactaaaaaaaagcattggggaactctccaagacatgagactgggcagagatttcttgattaataccctacaagaacagtcaatcaaagcaaaaatggacaaatgggatcacgtcaagttaaaaatcttctacacagcaaaggaaacaacatgaagagacaacccacagaacccacagaaatgggagaaaatatttgtaaactatccgtctgataagggattaataaccagaatatataagcagctcaaactactttgtaggaaaaagacctaataatactgtttaaaaatagccaaaaatttgaatagacatttctcaaaagaagacctacaagtggccaacaggcatatgaaaaggtgctaatatcattgctcatcataggaatacaactcaaaactacaatgagatatcatctctccacagttaaaatggtttttatccaaaagtctggcaacaacaaattctggcagggatgtggagaagagggaacatttctacactgttggtggggatataaattagtacaaccactatgaagaaaagtttcgaggttcctcacagacaaaaatagtgctactgtatgatccagcaatctcattatcaggtatatattcaaaagaaaggaaatcaatatattgaagagatatctgcactcctatgcttgctctagcactgttcacaatagccaagatttggaggcaacctaagtgtccatcagcagatgtataaataaagaaaacgtggcacttatacacaatgaagtactagtcagccattaaaaaaaaaaaaaagagaatgacatcctgtcatttacaacaacatggagggaactggaagtcattatgttaagcgacataagccaggcacagaaagacaaacttcacatgttgttctcacttatttgtgagatccaaaagtgaaaacaattgaactcatggaggtagagaatagaaagatggttaccagaggctgggaaagatagtgtggttgggggtggagggctgaagaggaggggggatggttaatgagtacaaaaagaaatagaatgaataagacgtagtacttgacagcacaacatggggactatagtcaataataatttaattgtactttttaaaataactaaaataatataactggattgtttgtaacacaaaggataaatgcttgaggggatagatactcgattttccatgatgtgattataatgcattgcatgcctgtagcagaatatctcatgtaccccataaatatatacacctactaagtacccacaaaaattaaaaataaaaaaattaaattaaaaaaggtacagcattttaacccttccttggaacctaagctatgcatctgaaaggggagtttttaactgtataagtctgtctaaatgccttagtaacgtgatgaattatagtaactcagtgttttttcctccctatttgcagaatgttaaccattgctatgttttccagaaaaaccctatattagttaggatgagtaaagttagctgctataatacacaaacatcacaacctggtgtttgatagagcccagtcagatgttcctggttggcagatggttttccttatgatctttcatatgggtggatgagttccttccatcttgtggctgcatccccttctggatcttcagcattctctctcttcattcagctaaagtataaagagagcacagggaagatatacctacttcttaactctttgtccaaaaatgacatatatcacttcttactttctattagcctaaacttggtttgtggacacatctgagataaaggctgcaaaaatataatcaaactatgcctaggaggataagaaatcattttggtaaatgcacagcagcctgccacaaatttatttgaaattgataataattgttctatttaagaaaataccataaaaaccctagaagaaaacctaggcaacatcattcaggtcataggcatgggcaaagacttcatgactaaaacaccaaaagcaatggcaacaaaagccaaaattgacaaatgggatctaattaaacaaaagagcttctgcacagcaaaagaaagtaacatcagagtgaacaggcaacctacagaatgggagaaaatttttgcaatctacccatctgacaaagggctaatatccagaatctacaaagaatttaaacaaacttacaagggaaaaaaaaacatcaaaaagtgggcaaaggatatgaatagacactctcaaaagaagacatttatgcagccaacagacacatgaagaaatgctcatcatcactggccatcagaggaatgcaaatcaaaaccacaatgagatatcatcttgcaccagttagaatggtgatcattaaaaagtcaggaaacaacagatgctggagaggatgtggagaaataggaacgcttttacactgttcatgggagtgtaaaccatttcaaccattgtagaagacagtgtggcaattcctcaaggatctagaactggaaataccatttgacccagcaatcccattactgggtatgtacccaaaggattataaatcatgctactgtaaagacacatgcacacatgtttattgcggcactattcacaatagcaaagacttggaaccaacccaaatgatagactggattaagaaaatgtggcacatatacaccatggcatactatgcagccataaaaaaggatgagttcatgtcctttacaaggacatggatgaagctggaaaccatcattctcagcaaactgtcacaaggacagaaaaccaaacaccgcatgttctcactcgtaagtgggtattgaacagtgagaacacttggacacagagcagggaacatcacaccccaaggcatgtcgtggggtggggggcagggagagggatagcgttaggagaaatacctaatgtaaatgacgagttaatgggtgcagcaaaccaacatggcacatgtatacatatgtaacaaatctgcacgttgtgcacatataccctagaacttaaagtataataataataataataataataataataaaagaaaataatagggtgtggcctgaagaacattcagccctgtcccttttgtgtctgtgatgggccttatgagacacccttctcaacggtctgtgattctgaaccaagagtgtcctggtatctgaacactaacctgcctgaacactacccctgatcctacctttacttagagagtggaatcctcagattttcctaatatgtcgactaacgttgtgagaagattgctatttgggattggcattattaacacctcagatgaactttatttgtgggtatgtttttatttttatttttatttgtgggtagattttatttgtggataggtaggtacatggtggaggtgaaggtagaaaatggagcagaaaaagcatgcaaaactctgtcttgtaaatacaattaatcgagtgtcagatgttgtggcttgagagtgtccttttctaagatctgtgagggaaatggtagacaggttgtttcatcttcatgccttcaatgcaatgtcttagtgaccaggtgacttcatctccattaaggtaaaatgcctatgttcattaagataaggttagatcgctgtagcacaaaggcagtggctttgaaaaacacagaaattaatttctatcacatgtataagtatgaagtgagcattccaggctggcagacagctccactccacatggtcactcagggactcatgttcctacaaaagagctgtttcccataaccccagagcctgtcatcactttcacggtctcactgggtcacctgggttctacccgtccagaaggggaaagtggatacggaaaaagcaccccgcaatgttttaagaagtcaacaggcaagtactacacatcatatcacctgtgctcatatttcactgctgagaactatcctttggtcacatctaatgcaagggtatctggaaaatacaatatatgtaggcaaccatattctcagcaacaatcattttattgtggaggaaagcaagaaagaatcttagaggacagtcagtagtctctgccacagggtccatacaaccaaataatgagagtgatagttagaacagaatcacacttttattgcaagacaaaagagaagcataataagcttcaaacgttgatactattattaagttatttaataggccctggtgtgtaaagcattcagaaagtgtagctgcatattcttcaaattcatatcttaatttcttataagcatatgaaaatatttagaaaattaagaatagttttccacatttgctttcattctcaggacagcatttcatttatgcatttatggagcctctctgcgtgccagttgctgtgctagactctgaaggtataaagacaactaagatacagctctgctctcaagaagtccacaaactagtcatagatatgatctgggtttgggtttttattggttttgtttttacagtgctgaatggtgtgattagcgctgacctagagttgtgtgcacaactcagcatgggtgcacagggatgattcagggggcgtagttacagaacacacggggctaaacctgaaagtgagggtaggagttgaccagatggacccaaatagggaaaaacattactcgctaaggaaatggtgtgggcaaactgagaaagtataaaacagctcatgtgtgaaagtgttagtgagttagcctggagtctgaagtgcaagtcagggcagagcgagttgggcttatgagctttgcatcgtgagctgctaacagattttattctataggtgatgtggctccactgattcccaagacacctggttggatctggatttagagaaatcattagcaatgtaaaatgatagattggaatctaaggagttcaaaatgccagcagtaaggctaaacatgctgatgctttagctgagaaaattcttgtggaaagagttccatgtgccaaaagaaaaaaaaaaaaaacacttgacaaaactcttaggaatttcgtcttttgagaacaaagtcataaaagaaatacactttttaatcaaacttatcatagtgccaggtagtataagagaaatatatatatatacacacacacacatacacatatatctttatataaaacataaagatacatatatctttatataaaacaaatatatatatctttatatatatatatataacaaaaatatgtatagcataaaccacctttgaaggagacaagaaagtgtgagctcatgacataagacagtgtataactaggcacactgaaagtgcaggggctcccaaggctgtgagtattcagaggagggagtttaaaccatggcataatgagggattggaactttgccttgaaaagagacaacctgtcttggtttgactacgtttcataggtacaaatagaggcagattcttcttcctcaaatgaatgggcatttcacccaaacataccgacaagggaatggcagttgcacaagcagctaatttcttcttctcttcctattgagtactataatggaagaaaggagaggattattagccaaaaaagggaatattatagtgtgaatatttatgttcccccaaattcatatgttgaaatcctattctttaaggtgaaggtattagtaaggggggcctctggaaagtgattagggcatgagagcaaagccatcatggttggattattgtacttataaaagagaccccagagagctaactacctctcccaccatgtaagggcacagctggcaggtgccatctaagaaccagaaagcaaccctcaccagacaccaaatctgctggtgccttgatcttatatttcccagtctccagaccagtaagaaataaatttctattgtttagaagctacccagtttatggtattttgttacagcagcctgaacagactaacacagggaattaatggttagaatctctgtttcctccaggcaggattcagcaggaatactgaagaagggtgatggaataattgtgacagccactggctcatcttagaagtcagttccctcagatgagaaccatagagggttggtagggcgtagtgagagcagcagctgccagtaagacagactggatgtgaatcctatggcctgaggctgtcccagaatggtcccccatcaagtgtctttatgctcatggaggtacctttgtgatttttatggaaaatagccacatattcaggggctgggccacttgtctcttcaagaacagggagaccctagagaccaaggagggaaagtctttataaagtggcatttgcttgaggggctagaggacctgataaaggaaatatcccagggactctgtgcaaagacagtttggtgaggcagagggcaagcgtgcagcaaagagttaacacagcaggcctgctttagaaaggcctgcttgcaagggtggcccttggctggtgtctgggaacttggctttcaagacagtttccaccaccctgactgctaagggtaactcgtgatgcataaactacatgtgccaacaatacaatttatgctttctccctgaaactctggaattttagtacatgctaagcagctggtgcctatgtgaccagcccccaataaaaaccctgggcactgagtttctaacgagcttgcctgtcaaacagcatttcacatgtgttgtcacagctcattggggaggaattaagtacatcctgtgtgacttcactgggagacgacttggaagcttgtcctgtttcctccctactttgctccatgcaccttttccctttgcagattttgctttatagtgtttcactgtaataaatcttagccatcagtacaactgtattctgtgtcctgtgaatcttcctagtaaatcaaacctggggatggtcttggggattcctgagacagcaagactcactggaaggactccagtagaaaacagctgctcagcattgacacagataagcacatatatttgttttaatttctatcttccagaataagacatttgattattttaggtgtatcttccttaacaactgtaactactcagaatctttcagattttaggaaggcactgaatataccatatattattaaatgccccaggaggcctggggaatacatactaatgtactcaaatacattagtatggctgcttttaatacatgaaaagtctcactaagaagaataaatagaggttatatgtagcctcacatcagtccaggtcagggctcaccaccagatgagtttctgccaaacttaggggaaaaacacttaaaatttttagagcattttgaattttcgcattgcagataagggattgtggacctgtattaccctccttcttttgcttatccggaaattaaggcttagaaaagttaattgatttgccaacagtagcacagcttgtatctgatctggatttcaaatttaggactgtctaggctacatgcccgagaactcttatctatcactctagactgtctttctagctacttattttaagaatatgtcttcagtgtctgcatactactaaggaggaagtaatgtgtgaacaagggagaatagaaaagaagaaagtaattatatttttttgacatggccatttacataatttactttccttcatgaaatggattcctaatatatatttattgttaccttctgtaagtctaactgcatgacaaggcccaaaagagaaatatccacccattctctctcctagggtatgtctgttatatccttatagtcattctcagagtgtgagtgagagagtgtgtgtgtgtctgtatgcatgtgtgtgtgtgtgtgtgtgcccctgtatttgcattttgccttccaaggcagcaggagtgtgtcttattttctctctgtttctcttttattgcataatgctcaataattcatttaagttgatatgctttcattaaattgagtagaaaattaccttggctgaatgaagataactcccagatttctctgcatggggaggccagccacctcgcacttactggagaaagttcttaatagacttacccacttttaccctcattgtggcaacaaagaaatggtttggagaaaagagaaacaacaggactccttccagtaaaacaggaaaatatattttacataggtatttgctgtgaggaggatttgaagggacaggaaatcactatcaaatacatgtgaactgccaagtttcattttgacttttctgctcctacctgcctctcactttaaaaaataagtgcttgcttacccatgtttaggcaatagaaaaaataaaataaaaaaaaataaatgctgtatcaattagatagatgtcggtaacccagttttctgaatcctgacatcccagaatgtaagaatttgtcattctaataagtctgttctgcctcaacttgtaaatcagcttaattcaattctaagtgaaatctctcgtttttcattatgtctgacacaagcttagtaattctcagaaaatagtccttgtgaaatgaagctcagctggaaattctgatattcgatgatgcttacactaacaactgtcattcttggcaatggcttcattattcagtgacacagttaagagccttgttttacttttattcaaaaatgtctttgtctttctctgcttgttccagcaacagttttcctggagttttggaaaagacggcgagcagtaattgcttatgactgggatttgatagactgggaagaagaggaggtttgtatcatttacctcagaatgttgtaaaaagcaaatcacccagaaccacacgacccccccccaaaattgtcactctctgttctgtgacggaagtcaggtgtactcataaagcattttcaattgccttttcagaaaatttcaagcagtataaaaatggactgacaatttttgtaaatttttgattccttagtggaatcaaatcccttgattaagtggagaattccacttgtaggtagaggcaccagaagaattggtggtgtagctttttttttccattttcttaaaaatcatccttttttctctaacttcagcagaaaaagagcattcatttgacatctccaggtacatggaagcaatccttccaagagaattacccaaaggcagtgtgtctgtgagcagcacccaggaccgtgcccaggtgtgcacaggctctgaagtatgacatcaagtgttccgtgctggggacaatccactctgaagcggccaccttgggagacgtggttaaatggagggccagctctagacaaaactgccaaggagggccagactcagcccaccactgtcccttagcgtcttctaggccagtccgttgttctcctcctgacctgtcttgttctaatagtctcttcttgcccctattcctgtcggaagtctgaagtacccacactaggcgtggtcaccacggtcccctcttggaccctgcttcccttgacagttggtccaggcctcagccccactctcctccctctcgttcattatctcttacccctcctgagtctcatttcctcagagccttgctgtgccagtaaatcagataaaccactcatatgtgtaatagttttttgatcatggctattaatatgtgttttccttgaagggaacacatgtatatattttcatgtataaaaaagaatctttcagaaatatgaacgatgtgaattttagccctgtggtaggcttggtgggggaagtaattctgagaggtatttttgttgttgttgtttgtttccttcacactatgcctcctcaatggctgcctgttccccttctcccatgaacatgtttgggtagttttttggtttggtttggtttggttttgaatgtacttcaggtgtacaacaggaggttttgatacatgacactgagattttcagcaatccttgttctcctgataaggctttctttcatgtttttataaatattctccaggccaggtgcggttgctcacacctgtaatcccagcactttgggaggccaaggaaggggtaccacttcaggccaggaggaggatttgaggatagcttatagatggccatcttctccctgtgtcttcaggccaggagttcgagaccagcctggccaatatggtgaaaccccatcactactaaaaacacaaaaattagctgggtgtggtggcatgcagctgtgatcccagctacttgggaggctgaggcacaagaattgcttgaacccagaaggtggaggttgcagtgagccaagattgcaccactgcactccagcctgagtgacagagtgagaccctgtctcaaataaataatgtgtatatatattttttctaggttctagatatatatatatatatattatatatatatatatatacatacacatatacatatatataaatagattttcttcaagtggccaattttcaaacatatatatatatgtgtatatatatctagaacctagaaaaaaaatatacatatatatatgtatgtgagtgtgtgtatgtgtgtgtgtgtgtgtatacatatatattctaggtttgaagaagcttcccaggctgactatgacatctattggtagcagccggactgcattcagaaattcctcttgtgtggtgccattctgctgtttctggttatatgtgttcatgggaacagttcccagtgggatggaaaatattctttcctgggaatcaccttgggcaatttacttcacctttggactttaaaaatctctaatgaaaagaagtgggactaaattttccccttctatctgtaaagtgtggccctatttgagtaactttgactaaaccagtctacaatcattgttggcgtttgtggtgggcccctgatgtgggcacccttctggggaacgtatgtatcccttataagtgtggagccttctgtcttcccagcccctgataaaaagcgtggagtgctgaattgtcctctcactctgcatacctttgtacaggagcctacatacgtagccattcccagcttgggattccttgtggaaatgcctcacttctagcccatgatttctaccttattgtgcagaaaaacccagactcgctgcagaccttctggggcaacctcgcacattagtttgtcagggctgccataacaaagtaccacagactgggtggcttcaacaatagaaacttacatgctcacagttctggaggctagaagtccaagccaaggtgtcagcagggttggttctttctgagaaccatcagggaaggatctgttctaggcatcttttcttggcttatagatggccatcttctccctgtgtcttcacatcgtcttccccctgggtgtctctgtgtccaaatttcctcttcttataaagacaccagtcatattggagtagggtccaccctaatgacctcatttgaacttaattaccactataaaaaaaacctgtttccacatatggtcacattcagtactgcgggttaggacttcagcagatgaatttgggggaagcaagacacaatttggcctataacacccagcgatatggtttggctgtgtccccacccaaatctcatctttagttgtagctcccataatccccatgtgttgggggttggacctggtgggaggtaattgaatcatgggggtgggtttttcctgtgctgttctcatgatagtgaataagtctcttgagatctgatggttttataaaggggacatcccctgcacatggtctctcttgcctgccaccatgtaagatgtgtctttgctcctccttcaccttccaccatgactgtgaggcctccccagccatgtggaactgtccattaaccctctttttctttataacttacccattcttgggtatttcttcatagcagtatgaaaatggacagatacatccaggaacacagacctgtctccatgattggccttagttctcggatgactagctcaagggctcttgatgacacttatggcccaataaattgaaagtttcccaaagaagcagaagattctaggtctgctatgtttatctcctcaagtataactgcctaaaataaatgaaagacagagcctgctcctaatgtatctcctgctgatcttacccatgacctacccctgagggaagtccagccttgggctaattcagtggcaggagccaggctgagccatgtgaaggccatccttcatgctacatgggcaggctgctgccaaactgggctctctctccatgacctctcttctgtcagctcgttccttgctttctgccagtaccttcatccgaatcttgaccatttctgcctggattaactcaatctccatttcagcagagtttctgctcatttgccatcctctcccaacactctcaaacataatgcatgcttaattaacgggaaccacatcaggttcccttgctgattgccttttcctaatctcataattggtttttagtcagaagcttttcacattcaggaggctcagctaaatgaaataaaatctcagtttgatttagaattggaggaaccttgattttaactggttttgaaaggtgcttaccttgttttcaattaagaattaagaatatacctaaagtctattggttaaagatgaatgactcctataggaacttattaaaaagtagattcaccatgtttttagtgaactaaacctaaaaatgcaaaaaaaaattgctggagaaaactaagaattatattgtcattataacttacaaaatggattttgaacattttcctgtagagaagccttctttgtcctggtgtttcttatcactctctggtaataaaagtaaaagcttattagttgttccaaaccattaggacaggacagcttgtcccttttaaaataccattctcagggtggttttttcttcaaggttagttttataagataacagataaatgtaactgttagtccaaatttctttgcttttgatgatagtaaatcttgatcttcactctttagattttcttcaagtggccaattttcaaacatttaagcctgggcacccaaacccacttcattggttgactaattagtgtggcagctgttgactctgttttatggtggggtaaaatgatatttctttttttattgtgtgagcacctctttagtgcattaaaatgtgtctgcttgtcctttaggaagaaatacgaccccagtttgaagccaagtattccaagaaagagcggatgaatccaatttctggaaagccagaaccttatcaagcatttacagataaatgcagcagacttatcgtttctgcatctggaatattttttatggtttgaaacttttaaaaaaatatttgtttcataaaatacaaacctatagcataataacagtaatcatattgggcatttgcattgttctacaaaatatttttgcactttgttatttattcctcacagtaacttcgtctggtggtcagggatggtattgctatccccatattacagatagaacaactgagactccaacaggttatggggcttgcccgaggtcagccagtaggtagctaagagctgagaccctctaatctgatattctttcctcttgccatattctactgtgtgatgctgaaaggagtcaaaaatgtgagacaggatgtacagtagtgtttttcaaacttttcaccatgcccatacagtaagaaatatattctctgtcataaccccgaatatgccaagcaagtagatgtataaaacagtgtaagtaaaacagtgctcacctttataatatgcataagctctgattttgttttattatagtatatttttaatgacagattagcctcctaaaattaatttcctgactcactaatgatcatgtcagtttgaaaaacagacctcagtttttagcttttcctaaaaagcagtcttagtaattaactttaacactgttaattactgaacaaaacatatgcagatgtttctgaaatgtcattttagaacagtaaaggatgattaggatcctcctttccttttttcaaatgatgagtatataaatatatgcctagaccattagagtaggaaggacaagactatagcaaattcagacaggctactccctttttccagtgaagaaactggggagatgaagggctgggcagcttacccagactccttggctcagaccaagattcaaatccatgcctgtctacagatactgcttttaagcaactgtgtcatgctttgccttctatgtacatattcatatttattgtattgtttcttacaaagacccatagacatagattaagcttttcctgttctatggatggggaacttggaacacaggaggctggagctatggaaaggacaagcttgcccaaggtcacactgctgggtgatagctgagctagggctctaatctctcttctgactttgaatccagccagctgtccatcctacctcattgccatccttgtctgaatttcagcatagattttacctgtctcctgatcaacagcactacaattaagatctggacaggtttttgtttattttattgttattttggccagtctgagctaggacttgtacttgagcttttagaacatatctcccttaaaagtaagcagaaaataaattatgtgcaaaacaggaatacttttgtgaagaaaggaatctctaaatcagcagaggccttcctgaggcctggcttcaaggtctagcctttgataattaagtgggttaaggtctctaagacatgttaatattaggtaatcatctaatgaaagtcacaaaactttttggagtctcagatttgcattaaagtcagccctatgtgtctgtgggttctgcatttatgaattcaaccagccacagatggaaattttttttaaaaaaaggttagttgtagctgtactgaacatgtacagctacatgtcattatttcctaaacaatacagtataactatttacataacatttacattgtatcaggtattataagtaatctagagatgatttaaagtatataggaggttgtgtacaggttatatgcaaatactacactattttatagaatggacttgagcatctgtggattttggtatcatggtgttggggggtggttctgggccaatccgtcatgaggatactgagggacaactgcatttcatagagaaagaagatatgctgtattgttctcaaatgccatgaaatcttcagggaaacatgcttcagtctgtgtgaatatcagattaacaagatatgtacctatcacgtagttggttcactcaacagcaaataactgagcacttactatgcatctgtaattatgctaaggtgctgtagaaaccatgtgagcaaaaaagactccttccctgtccttatggagcttactttctagtaggggagcctgagaatagtcaaacagattgttagaaattataagtagtgtcctgaaaaagatgtaaccatatggtatggctaccacatgacaacacgaaaaacaaatagtctgggagtcatgaagaacttttattatgaagtggtgtttgagctgagaagtgaggaaggatgagtaggtgttaactaggctgtgtgtgtgtgtgtgtgtgtgtgtgtgtgtgtgtgtgtgtgtgttcggcaagagattgggtgggtaggtattacaggcaaaggaaatagtcttggcaattaagggtgcttagcccgtttgatgtaatgagagaagctgtggggaccccagagggaaggaagaatggtgcccaaaggggctagagagagggtcttgcaggctgcgtaagggttttgcttttatcctagaataataggaaactaataaacaattttaaaccgaagagtgacatgataggatttccatatgaatatttgtccatctgctcaatgtatattctgcattaaaaagtgttgtcccatagcttacacagattctcaactttcaagcgtgtagttcttttattttaattaaaaaaaatagaaaaaggcaagagaaagtattaaccacaatgaaaagtatgcatttgattgtgatctcttgagcagtactgccatggtgttacttccttttcccatcagaggatgttccaggaatgtgaatcctcttcctgtaacattccaccaagaggttcaccgggtgtcttgtcttcctgccagatctgcgtggtgattgctgccgtgttcgggatcgtcatttaccgggtggtgactgtcagcactttcgctgcctttaagtgggcgttaatcaggaataactctcaggttgcaaccacagggactgctgtgtgcatcaacttctgtatcattatgttgctgaatgtggtaagtgagctgcagtggctagccaaacggatcaaaatgtgtgggctgcaagtgacagttttcttctgttgctaaggggatctggcctcagagaggtgggccattcacatagcactgatgtcctggcagcgaagtgcctggcatgaagatgcacttgggtctgagtgcttaaaagtcttgattcaaatctagactccgggcttttctgcagtataagattgggcaaagcacataacctctctgaacattagttcccttatttatccaataagattatattgtgaaccccttaagtaaatttagagaaagaatttagaacactcagaacctgtgacacagcattgcaatgttggttcctgtttctttttgattatcaatgataggaagatagacagtatccaaagcattcctggctaggtacaggggctcatgcctataataccagcattttgggatgctgaggccagaggatcgcttgagcccaggagttcaagaccagcctaggtaacatagtgggaccttgtctctacaaaaaaaaaaaaaattaattagctggtcatggtggtgtgcccctgtagtcccagctgctttgtggggctgaggtgggaaggtcacttggttcaggaaagtgaaggcttcagtgagcagtgacagggccactgcactcagcctgggtgacagagggagaccctgtctcaaaaaaacacaaaaacaaacaaaaaccaaagcattccttgatataaccctgcaaggaaaccgccaagctggtacatattgcttttgttgatttccaggctttttcagatagcatatttcagcccagatttctttcctgaatccccaaactcacacgttaaactgcctgcttgaccatctccacctaacactttcaaacccaactcctcatcttccctccagaatcagctcctcccacagccttcctaattgtacttgcccagactaaaagtcgtggcattctactggactcctctatttctctggctgtctaaatgtatccagaatttgatcactttctgcacatcccgaagtcccaccctggtccaagtctgcagtgtctcttgccgagattattgcagcagcttcctaactggtctcccagctttcacattgctcccttcaatctaggctcaacatggaagccagagagagcttcttacatgtaagtcagttcacatggctcctgtgttcacaaggtgtagtggctttcctctctctcacagtaaaagcctgcgaggccacatctacacagtggcctcacgggctttcgctcatctggtctgtgtgacatctctgacctcatcttttcttttactcactgtgattcacctgctccagccgcacttgtccttttgatgctctcaccccaggactttttttatttgctgttctctctgcctggagccttttcctcccacagggtctgcatcgcttagtccctcacctccttccagtctttgttcaaatgtcacttctctagtaaatgcttccctggtcactctgttttaaattgcagcccactcctgctatctgacaatttcccatctgcttgcctgtgttttttctatagcatttatcaccatctaatatgctatatattttacttatttattttgtttatctgccatttcttttggaatgtaggcccataagggcagaagcttttctttattttgtttgtttgtttatttttttttcactgttgttattccctagtgtctggaacagggcctggcacatagtagatgctgtgtaaattgttgttgctattttttgtagaacaaaagtagtgcctgacatggtcggctgctgaggtcaacctatacataaaaatatggccaggcactgtggctcatgcctgtaatcccagcaccccatctctacaaacaaaatttttttttaattagccaggtggcacacctgtagtctcagctacttgggaggctgagatagggggatcacttgagcctaggagttcacgactgcagtgagtcatgattgcaccactgaaccctagcctgggtaacagagcaaggacctgtaaaaaattaaaaaaattttaaaagctgaccttaaaggtttgtagtgtaaataagtaaaacaatgtacatagagtgccaaggacagttgttaggcatggagtagatgttcaattaattatagttcccctatccttatttatactgcgtcttaaatctgggccataatgctgaaatgcttacatctttgaaaaaagattttccaaaggccaactaatttaatactattatccatacaggtttatctatgtagcttatcatttctagttctttaaacaatcctgagttccataaccaataaaacttgagtgattcctaagagaattcaacctacccaataacaaagaacttaatttatgatcactaggttaactagtaatcaatgagctaattaaatgcaggtagctcattattagtattaaaatacataaaacatctttattattttaggaaaaaagtttcaagactcagaagtaataaaaaaaaaagggcagttgctgatcattttgacgtgatgtttgtgcgacagcttagcaagtggagattgaaagtagatggttagcacttcctgtacctcccccttttgaccccccaccaggactcggtctgtgttaactgtggaatacacattgtaggtagagagtgattcctagtgaaattaaccaaacagccataggtgaaatgttttgcatcccattaggatgcaatgaattaatgcctactatattgttatcatctatttcctccaatgtcttaaaatttaatttatacatcttcttaacaaataaatgcctgtgtggcatgggcaaaggcttcatgactaaaacaccaaaagcaatggcaacaaaagccaaaattgacaaatgggatctaattaaactgaagagcttctgcacagcaaaagaaactatcatcagagtgaacaggcaacctacagaatgggagaaaatttttacaatctacccatctgacaaggggctaatatccagaatctacaaagaacttaaataaatttacaagaaaaaaacaaacaaccccatcaaaaagtgagcaaaggatatgaacagacacttctcaaaagaagacatttatgcagccaacagacacatgaaaaaatgctcaccatcactggccatcagagaaatgcaaatcaaaaccacaatgagataccatctcacaccagttagaatggtgatccttaaaaagtcaggaaacaacaggtgctggagaggaggtggagaaataggaaagcttttacactgttgatgggactgtaaactagttcaaccattgtggaagacagtgtggcgattcctcaaggatctagaactagaaataccatttggcccagccatcccattactgggcatatacccaaaggattataaatcatgctgctataaagacacatgcacacatatgtttattgcagcactattcacaatagcaaagacttggaaccaacccaaatctccatcaatggtagactgcattaagaaaatgtggcacatatacaccaaggaatactatgcagccataaaaaaggatgagttcatgtcctttatagggacatggatgaagctggaaaccatcattctgagcaaactatcgcaaggacagaaaaccaaacaccgcatgttctcactcataggtgggaattgaacaataagaacacatggacacagggtggggaacatcacacaccagggcctgccgggggtgtgggtgaggcgggagggatagcattaggagatatacctaatgtaaatgacgagttaacgggtgcagcacaccaacatggcacatgtatatatatgtagcaaacctgcacattgtgcacatgtaccctagaacttaaattaaaaaaaaagaaagaaagaaatgcctatgtacaggaagtgaatctgtaaatacacacttgcccatatgtttcgagcaggtgccagtgttgtcagagtaaaacacttcatttaactggaaatcattgatccagcaatatctatttcaagacacagcctagataagaggaagtaaacaaattcaaaatgaagacgggagcatagggagtggcaaaagtacgtagttgctgatgttacaaagcacctgctatatgctgggagctaggctgctaggcattttacatcttttgtctcccagagtgttttagactagccaacatggatgaggtagagttcacactcgaaagctaacacatattattcttagggatgcccttgtggtttttcatttattttagatataacatgaacatctttggtactctgattttcagccaacatcaaactagaataacataaggttgctaacgcaagaatactgatgagaacagggaatgacaagccatagcaaagagagggaaagaaaagaaaaaatgtacataagaactctaaaagcagcatcaaccaggacctctttgtgcaggggccagttatcttaccctcctcagctatctgtgatgatgtctcatccccgcacacacatttacactcctgtcccctgaggttttgtgggtaccattatgagggcaaccaaatgtgtaatatagttggaatggtttcatcagaacatcttaaaaaaattttaagtcgtttctatcagcataagggatgacagactaaaggttgtaatatagctttgaccagttcagaagtaaactctccagtggcttctgaaattactcaatgtgagatattatcgtgacccaatatagattttttacagctgtctattgttttcaactacttaacatattgaccatacttttcttccaaaggtaatcattatttagacattaattattaataatttttatcaactaaatataaaaaccttgagagctagattaaagactctgattttttaataattattataaatcacatatcccatttctgactttttgctagatttgtccagtgctaactaaaataactaaaatatttttatatagtatttactttaaaatttatattatttttacaaaagccctctaggtcctaatgaaatattatgcctcttaatggctggttaaggggcacttagtagttcacattttattccgtgtcttgaaaaataaatatttcaaagatagagtgaatagaagtgaataggatggaatttcttgttcccgatcatattgtctcaattctgttctgcttcactagtgaccgaaaaacatcccaatatggtggttgcaagccaaataggccaacaaaggctatatcccaggaatagactaaaaagttattatcatcctttttatccagccatgccaatctgaatcagatatttaattatactataaacacatctcatcttccaaaaaaaaaaaagtaaaagtacaccagataatatagcttgcatcagagcaagtccacatttattgatcagcctggcaagataaaagtagaagtacacacagcttccttttggacatatctgtaagatcagaaagctttctgccggttacagatattcacaatgagaatttgcagcatccagtttggaaacttagattttccactgctcttagcagaacaaacttcccgtggtttatctctcaaccgtctaatgagaaatcagacatttttccagaaaccactcatgtggagatctctgagcggctgtgagtccctctgtgtgtgtgcccttccctcctgcatcctgtccaatgtctcacagtccatatccttatatgtatatccttcagcatatatatgaagtagtcacagatgccatggatccctactgtgtccctgtatgctttaccttatttttcacaaggttaatattactcatatgttgactcttatgttgttcctttttttaaaattacaatgttttcagtgttcacacccatgtaacaaaggcatatcctcagctccgagggccttttagacaagtgtgcaaagtgaggtactgtgacctacacatcattgtgaaagacataaaagataaaccagttaatcaagaattgtatttttgagaaaggttgtctcatcagtcaaattaattttccctgataattacataattaaataattgtaatgttataatgccttcgtaatacattgtaatattaaaatatatttgattagaacatctgttcttatctgttgtttactaggattttgtttttatgatcaaatgggtatgactaacctatgtcacaaggtttcttatggaaaatgacaccaatctccattaccactggactccaagagtctgagatttctagacataagatttgttcctatgccatattaatatatcctaatatagcaaaccataattgttgctgaaagtttggagtcatacatacagattatgttgtttatttctgtaattagcagaaatctcagataagagaattcaaaaattaagcaggacaggaaggtcagtaagttcaatacccatcctgcccacatataaagaaaaggatggtctgaagaagagataaggaacttgccaaagtcctgtagcttgctggatggtcaagctgtaattccagcctgggcaattttaaccagtgtgtttttactactttcatctaaatgtgttcttaatcttcatattgttccagtctattaaactacttttccttttcattttcacttaccgtcttttgttttagaaacagcacttgatgtttcaattatacccactctggggaatttcctagagctggatttaccctagactatactctctgctccttggtacacacacgcacacacaaacacacatacacacatgcatacatgtaccccaccctcagaaccatctattgaccagatggctgggtgagttaaggatgcgtgagttaaggaggcatcgggtccaccaatggaaaagtggagtaccataagctctgggaatttccagtaatgtttaatcacttcagtgcttttgaatgctgtaatctagagtttacagcagtccataaagaataggattgcaggatcttaccatcagaagcgggcttagagattttacgttcaagatgcagaggttcagcaatattatgactacccagcactgcctagaaagctggtaatgaatagcagctagccttgttgccataaaattattcgccccaaaataagaagtgagattttataaatagttagataggaccttgtacatttctttcttgccctgaaaattacgctaatctccattaccaatggactccaagagtctgagatttctatacacaatgttttcattggttgagcaatggatgcttaatgaaattattttgactcgtgatttgactccctatttcctttgtgattatagattttataatacgtgcagttcatttattaaatgcatgaaatttattttacagctctatgaaaaagttgccctgcttctgacgaatttaggtgagtggaatcctttctatttcatagaactgtactgtgggctagagagtatggttcaaagattcctttctctaatactgctggaaagaaatagtccctttattttaaaattcatacaacaagttttttctttgccttcaacagaataatttaaatatgtctagtaatttttctatataaatctttaaaatctgtcacaaacattatctgtcatgagctaatgtaatttaaggtagattttctcttcatgcacaaaaaatagcattacaaaagtacatttgtataaagtatccagtataatttaggaaagtgttcatttgctattgcctataatttttgtttaattaaaaatgtatcaagtttttatggtatataaactcacagcaaagttagtttctttgaagactggaaggccaggcatggtggctcacatctgtaatcccagcactttgggaagctttggcaggaggattccttgagtccaggagttcaagaccagcctggataaaataacaagaccctgtctctacaaaaaaattaaaaaattagccaggcatggtggcatgtacctgtagtctcagctactccagaggctgaggcaggaggattgcctgagcccaggaggtcaaggctgcagtgagtcatgatcatgccactgcactccagaacaatctggtaaccagtaataacttgtacatttatcacattttcaaaataaagaaattgtcccaattttattaacaaggtattggtcattgtgctccatgcagtttgagaaaattacatgctcccgtccacaacttgctttaatgcattccataagaagcttgtccagaggagaaaaaactcacaaaagtgttcctatttttattcatcattctgacaacagatagcatttactgaaactttctatgagctggatacagagctaggcactttaccttatctcttttaatgtcattgaaatcttccatcaccaccagttcttgcccaaaaagatagaagaggtttatgtccatggaagaggtaactgcccattggtagacaatgtaccctgtggtagcttgatccaggctagcagaaatgccattggaggtacagtcctggtccatccacggtggggacacctgggaacctagctggtgaccaggagacctttccatgtaaccaggagttcagtagcagaagtgaaaccctttaagaaaaccctttaagaatcctgtgtctttttggccctccgcaacagtatggccttgtcctaaaactgacattttaaaccattttaaatcagatttactttcattctcccttcccttctcagacatgctccctaaaagcattttgagttataatttgtggaaatgaattgattaaatgaagtattaaatgagaaatcagacactcagggaatgtggaagcagacaaaatgctactgtattaaatacatttcattagacattgcttgctcatagaatgtagctcctgtgaaaggataaattcattcgacatgagatctctagctggagatttgatcttaagggcaaatggatccatgttttggttcacaccattatgtccagagaacatttgctttatggaagttgaaatatatggagatgagattggcccctgactgaggtcaggaaattataagacacagatggtgatatgaattaaaacctctaaagatgatgccacctccttgatatttgtccatgagaatggaaaatgggggataagggtaaaagcaaatgagtcaaatgctcttagccttctatgataggcatttgactccctcttaagcagtaggttggtataatatgagaactagaagttgagaccaaggaactctttggagctgggaggaactaagcctgcatagattaagaggaaaagaaaaggctactgcagagagccacgactgggaatgaggcctcgacagcctggctgtctatgctgctggctctccaggtatcctgtaagagtggaacagtctaggtattcaattctatcagattcttccatagccacttctcatgagacccttgttgggtctggtctgtgagcttgaggatcctatgagtggtctgttccaccacacgccatccgtgggtaaactggagtctcctgcagcctcctcaggactcctgcgtccccaccctgtgtgtgtggggagggaaagagagggagttgagaggggatgagattcagcctttcaaactctgctcaccttttgtccacagaacagcctcgcacagagtctgagtgggagaacagcttcaccctgaaaatgtttctttttcagtttgtcaatctgaacagctccacattttacatcgcattcttcctcggaaggtaagaacctgacccctgcacacctccccaagctgaggacagaacacttagaaggcactgactcgtggggacagagaagccctcccttagggtgatttatacaaagtgtaaaaagggaagagcatcctcctcccttctcttcccaaatctcaaaaccacctggcatcccagggaaatcatctccactcaaaactgtctgtgcaccttttgttgctaagataagcagaggaaaatagtttgtgcatgtgagtgatgcattgaaaacttctggcctctgtctgcacctgaatcaggcccctggctttcccacctatgacggcaggtggtacaacggggagggggctgtagcatgtcctggattcctgacttcacttaaaagggaaggacatcctgacaggaaagggggcaaaaatgggatacagaggatgctgggtaacttttaaatccagcagttatgaggatttgggaaagattccctgggtagtggtaatgtcgcatgaattcccttacatctggaggcatttcagaggagatgggaacctgggaaggaccaggtatagggttttggtgagatcaacacagcagtctctccttcatttctagctattccagcagcacaaaattctaggcaaatagttcaataatttttttaacagcatgactattactcagaaaaatcaaatgtgtttaaatccaggagtaaaacttctgcttacacaggtcagagcaattgatatgcagcagaaaatgttgaaagtccacagcaagcagcaagaactggcttctgctttaggcagcctgacagaaaggccagaagagacatgtgccctggagaattccagaagctatggttatgacagatctggagggtttcctaattcccccagacctactacttatagtagcagtcattcacattggagaatgtgctaaactaaatgtaatattcgctgaaagcttggacctagagcactaatggcttgtttttctctgtgtgttgaagatttacaggacacccaggtgcctacttgaggctgataaacaggtggagactagaagaggtctgtattctcccatcattccttgtttccgacagacttgcattaaacagccttagggcaactttgtgtagattataaaccagacaccctttcttcctctccattgattctggaatttctgtgtttgcttaccttgcagtgccaccctagtggatgccttattgatctgtgtatgcaaatgggtattataatggtgctaaagcagacctggaataatttcatggaacttggctacccgtaagtaccttagtatcaataattgagaggcagcattgctcattattggcttttctaggtgtggcaagtaagataagcaatgcagactcagcagttaagccagtgcgtgcacctggaactaagtgctcacatttagacatccaaaggcagccatgaaaatcataaacattggctcttctgggagatttagcacaattcacatgaacaaacgtgaatattctttaaggagactctttaggcccctaaatattggatacttgcttgtgagccactttaaatacctctgacctttcgggctccagcattgcaagtccttagctatgtatgacacattaactacatctccactctcccatcctcatggtaaggctggtgataagatgttgacaacaatgagcaaaaccttgcatcaacttggtaaggatgaccttgaattctgctgtgtttgctcagttatggtcagttaagttttaatggggacataaatcaacaatgcttctattctgctttaattccacacctattggtttccatgtcagctcaatgtctctgtagagacaaagaaaactcaaggtttcagggaggaccactcagccagaacgattagtgggaacttggttcacttcagaaaatcttttcttagctctctgtcagaaccaaagccagtaattttctgttcttagatttatttttagaaatcttgttccaagtatttgatgttttctataaaacttttaaaaaataaaacattaaacaaaaattatcagtgttgtattctactttaagatataaatcacaattaaaatgtcatagacatcaagagaattatattttatcttctgataataaggacatagagcaaaattgtaaagtaggcagtttgtctttgatgttcattcctttatttgcttcatttcccatgtgttttgttttttggcccttctactcctggatatccttcaactttttccttgtcctgtacagaacacagacctgcctccaatctgtcatttcctcaatgctttctcatattacaaaatgcactcctgaacactgctaagggttcctgtgctaaccttaccaatgccgggtgcattttactgggagtcagagtccctgtggagagctcatgccaaaagcaaacaagtccagttgtagaactgcaggtgtttgtgtgccaagagaggaagcattttgtgggtttgcagatctttaggcccctgatgtcagagtatacagctcagcacccatgtagcaagactgctcaagggtcctaaatcaagccacttaagccagatattcctcaagatatcttggtgttgcctttgtactggggtatccatttatagatattctcagtcctctattcaaccctcataggcaatgcccaacatgagacagtttcatgaatgattaaaacaagttcatcaatcattctgtttacttgcaaatataaatacttgaagtatagactccattgttattttcttcctaacctgaggctttatttctttgatagcctgtcctgaattttttcaaactattgtttctgtattcaaactctcctttttcttattacctaagtcatatgatcagttacattttttgtaagaaattgatctttttgcccaggttaattcagaattggtggactagaagaaaagtacgacaagaacatggacctgaaaggaaaataagtttcccacaatgggaaaaggactataaccttcagccgatgaatgcctatggactcttcgatgaatacttagaaatgagtatggaaatattctactttatcttattaattataaattttagatctccaggtatattcaactaaacatatacccgttatcatcaaggtcctcagtgcgtagggattcctaaggcaaacagagaggaaggcatgtcctgcttaaactgtgctacacttacatttaaggaatcagatttctctggaatcaaaccgaagctatttctcttagcacgtatctaagaccatgggctttggaagtaaattatctgggttcaaatcccagccctatcatttattaacggtgaaactttgggcaattacttaatctctctttgtctcagtttcctcatctctaaagtgggaataataataagaggaaccatttcataaagtctttgtgtggattaaatgagttaatgcatgaacatgacttagagcaatgcctagctcactatgtacttggtacatgttacttatatcattattattctcttattctttttgtcttctggagggaaaggcaaataaaatatcttagataaattaagtatgaatatattttctttcattattaaattgaatatgtatatatttcctttcattttaagctctaacataggagtggaaatgagggaagggctgggcaagaaccatttcttctaaaggtagcagttctttctggtcaaattagaaatttaaaggaatagtagaattgatgcttaatgtttcttaaattgcttatgttctaagtatctacttatgtctttagagtttcaattatagaatggaagaatgatataacctagggaagaaatcaatttggacattaaaaataaaacttaataaagagaattcattaagagaactaaccactttgagatccttaatggattcttctcccataaagaagacaatgaacaataatgttggtatattgagtgcttaaaaagaaccttttatgtggctagaatttggtagtgctccaaatcctgaagtatctttgcaacacaaaacaaatctcagaagtatcacaagcagactgatgagttctaactgctcacttctgttcttttgtttttgctattttcttaataacttccccactttgttatgtactttaaaatgtattcactgaagtataatagtggaaaagtgtatataagtgtagagaccaatgagtttttgcaaatttacacacaaatgtaaccaaatatatgtagatgagaggttggcaaactattgcctgcaggtcagattcagcccactgcctgtttttgtaaataaagttttattggaacacagcaactcccatttatttacatattatttgtggctgctttggcactgcaacagtagagttgggtagttgtgtcagaaagtggctggtctgcaaagccttctttatttctagaaaatgttgctacccagtgagctagatcaagaaatagaatattatcaatatcaaagaagacttctttgtcccctcttccatttataacaccctctctaaccactttcctgacttctaacaccatagattaactttacctttgttattctccatttaaatgtaattgtagagtacataccctttgtagttggcttgtttcattcaacatcatctttctaacattctcccattttgctacaggtagtagaacttcattttattgctgtatagtattcctagaatgtagaccaggagccaaattatgaaacaggagtttgtctttgacacccaccctcatctttccttagtcatgtgggtttttctgtttgtttgttttgttttgtttgcatttccactcccagatgagccccaactttgtcccctgctgccctgacacagcacacagacccctataccaccatcaatccctcaaccctccacatatcatgaaatgtactcctgagcactctaaataataatatgctaggtaactgcattttaacaaaagcaaagcctctgccaagcttgagtcaggaaaaaaaaaaaggcaaattcacttgtagaagtgaagacatcagtgagccaaaagatgagctattttgtgagtttgcagatcttctaggctcctgaataataatgtactgttattgaccaggcgtggtggctcacacctgtaatcctagcactttgggaggccaaggcaggtggatcacctgaggtcacgagttcaagaccagcctggccaatgtggtgaaacgccgtctgtactgaaagatacaaaaattagctgggcgcagtggcaggcgtgtgtaatcccagctacttgggaagctgaggcaggagaattgcctgaacctgggaggcagaggttgcagtgagccaagattgcaccattgcactccagcctgggagagagagcaaaactccgtctcaaaaaaaaaagaatgtactattatttatccatccattctactgctgatagacacttgtgttgtttccaaatttaggctcttataaataatacctttacggcatttttgtacatgtattttgattaacatacgtagatgtttttattaagaatttacataagagtggagttaggaggccatagatatgcatttgtttgtctttaataaacacttgaaaacagtcttcaaaactgggctgtgccagtttatactctggctaatagtagaacagttccagttattccacaaacttactaaaacttgcgttcgtattttagccatttgggttggtatgcagcagtatctcatcatgattttaacttgaaattttatgataactaataatgctgagcaccttttcatatgcttatagttatttggataaacttgtgaatttatattcaagcccatgttttttttgtgggtatctgtcttttccttagggatttgttatttatatattctggatatcaattatttgtcagatatatatgttgaaaattaaatatcacttctcagtggttggcttgacttctcattctaatggtgtgtttaaatgaaaagaaatttcagcttcattcttcttcaaaattgttgccatataagttttagaaccagatttctaatttctataaaaatcttactgaaatattagttgggattaaattgaactcctacatcaatttgaagatatttgatgtttccccagtccatgaaaatggtatacctttgcatttatttatgtctttttacatttttctcagcaatactttttgtagattttagtatataggttttgtaaaatttagattagagttgtttctaggcaccttaggaatctttgtgcaactgcaaatgatgtttttattgttttattttctaatgttttgttactaataatatacagaaatattgttgttttgtatgtttgcttatgcaaacttgctagcatctaatgtcaattagagttgcttatatattttttgagattttctaccatatatacataattgtatcatccacatataatgataactttacattttcctttttagtcattttatatatatatatatatatatatatatatatatatatatatatatatctttttgttcttgcctaaatgcactaagaccttttatataatgctggataaaattgatgatactggacatcattgtttctgacctgagggtgaaagtgttcaatatgttaccattaagtgtggtgctagctgtattgttttgtacatactttttattatttccttaaagaagttttcatatatccctaggttgctgagagttattatcatgactagtattacattatatcatgtcatttttctgaatctattgaaatgattatgtgattttttaaaaaattttactaatgtggtggatttcattgattattttttgttgttaaaaagttgttaaactaacctagcaaacttggaaaaaatgcccacttgggtcaccatgcatttttttaattactaagttcaatttgctgatattttgcttatgatatttatatatacattcatggaagatattatagtgtagtttttctttcttgtaacgtttcatttagatttgggtatcatttttatgatagccctttaaaatgattgggtaattatttttctcttaagcagtttacataagattactattatttctttcttacatacttggaagaatttacaatgaagtagcaggacttgaaattttcttcacaggaagaactttaattatagatttattttacttaatagatataggactatttcatttttttgtttcttctagcatctgttttcataagctgtgttttagtcatgtattttttcaagaaacttgttcatttcatctaaattttcaaacttagcagcgtaaaattgtttatatatctccttattaactttttatgtatctagggtgtatagtgatgccctttctttcacttataatttcatagtttgtgcttttctcccttttttaaaacagtaccttagaggtttattaatcttttcaaaagaaaaactaactttggtctttgttgatttttctctactacacatttgccttttggttcattcatttctgctcttatctttatttccctcctttacttcctttgggcttaatttcactttttttctcagcatctcaagatgctgattttcagattttctttttttctaatataggcattcagagctataatgttctctataaatactgctttggctgtatcccacaagtttttatatattgattttattagcaaaacattttccatttcccttgtaatttattttcgactatgcattttgaaggaatgcattagtatcaaaacatctaaagagttttgatatattgctctgtcattgattctaatttaattacactgttatcagagtatattctctacgttatttcaggcttttgataatatatatatgtgtgtgtgtgtgtgtgtgtgtatgtatgtgtgtatatatatatatatatatatatatatatatatatatatatataaataaaaagatttaccttatgctcctttataccatctatgttgatatatgtttcaagtatgttctgcatttagttgtttggtataatggtctacatttttatgtcaattaggcaagattggttaattgtgtttttcaaatcttctaagtccttgttaaatattgtgcctcttatctactagttacatacttgaaatccccaagtatgattgtggatttgtcttattctatttttagttcagtcaacttttgctttatgtattttgaaactgggttattatgtacatacaagttggattattctgacttactgttgaattggtgtttttatcattatgtaaagtaattattgaataatgcaacactttgaggatatgatgggcaggaggctgaagagctaaccttaaaacctttcaaagggcagaagtgagcctcttattgcctctcagagctaaggagatagggacccagcagtttctcaatcacagcaaaggaacaagaacaaatcaaaggtggagtaagctttacaaacactctatgccagcactagcccagcttaatctgtgaccagctttaagtgatttctcttatctgcctaacatcaccaggaggaattctttctttatggtagaaaagaacatcactgaaagcggagtatcacaaatttgttcctaaagaactagatagtaaataattttggctttttgagccaatggcaaaatcaaggctattttgtagacacttttacagccatttaaaatatagccatttaaaatgtaaaaactattcttagctcacagatggttaaaaaagaaaatcagatggttggtcaaatttggccacaggccatagtttgctgacccttgatctagagcctctacatgtgtggcatacaataaaaagattactaggtatgcaaaaaggcaagaaaatgtgactaataatcaagaggaaaaaggagacccaaagatgattcagaaattgggtttagcacacagagactttcaaatagctatgatttacgtataaaaatagaagaaaatactgacaaaaatgattgaaaaattaagacttttgaaagagaattaaaatctataaaataactctagaattgcaaaatataaatctggaattaagaactcatttgatatgtttaatagcagattgaggctgggtacggtggcccacgcctgtcatcccagcactttgggaggccaaggttggtggatcacctgaggtcaggagttcgagaccaacatggcgaaatcctgtctgtactaaaaatacaaaaattagcttggtggtgcgtgcctgtaatcctagctgctctggaggctgatgcagagaatcagttgaactgaggaagtggaggttgcagtgagctgagatcatgccactgcactccagcctgggcgacaagagcgaaactctgtctcaaaaaaaagaaaaagaaaaatgagcagattgacttagcgtaagacagtaaattagtgaacttgaagacaagtcaataaaaagaaaatccaaacaagcccagagaaaagaacagaaaaacagagcagaaaacataagaaacatgcaaaacagccaaaaaggctgaaatatttgtaagagaagtcctagaaagaattaaagaatgagaaaaagtgatatttgaagatgtaatgtctgagaaagggtaaattaaaaggaggtaaacttatatattagaatataaaacagttaaaagttgaactaggtctatatagatcaagataatatctcaaaattatcatgtgatatgaacagggcaaaaaaattgtaaataatgatattatgtaaagtttaggcacaaaaattatttacatgatatatgcactatgtataatttattgatatatggatattcatgtgtgtgtgtgtgtatatatatatatatatatataaatgaactggaaggatgcatgcaaaactcatgtcagcaattgtctctatgaagggagaggaaaccactcaagagcaaaaatagaggagaattcagttttatctatatagtatttattttatttataaaaagatattaagcaggtatgacaaaatgttaccaagagttaatactaactcttccatgggtatatggaagtttgttatatcattctttatgctttccaatatttaaaagttttttcccaaagaatttttaaaaattaatctacctctatgctacaagtctcttcccttgaaaaaaaaaagcagcagttaatgggcattaatcacttcaagaccaatatcatgtgggtcacctttgtgctatgtaaaaatgattggttggtttggttttaggccataatatttaactagataatgaaactcattaggtgtcagataaacaaaaactaccaatgaattaaacacattttctttttaaacttgcagttattttcattataaatataacctgaaagaactaaactctagttgctttttctgtccataacatccattactgttagtgattgtaagaattatctctgtcagttttatttctacctgataggttttctttgtgttctggccttcgttgtaattacatgtcagtcattgaaccagcattatttggtacctgacaagtccttcccatacacaaaacccctgtagtgagtatgtaggaaaaagaaacataaagaagttgctgtttctactttcatgaagctcactgcaaaaggggaaaaaggcaaaacgccgtaaaatcaagacaaagtaagttttatggtggtgagcagagttgtggcagctacagaggaggtagtagttaattacaattatgaaagactcaagagggtatatttgagtactcttgaaggtagaatgactacttcatcaaagtagtcatagcaacactgcatatatgctgtatccccataaaatcagaagactagtgtggccagagtagaggattgtttgggaaacctgttttctgtgtggggtgtatttggacatgaggcttggaagtttgcttggagtcaatttattgagatccttgaatggcatggtgaagtttcggatttattctgcagccagtgagaacctactgaaacattttgtgtagggagatgagtgatggggttgaaccaacattttaggcacactgacagcagaatgatagggaagggagctgaaagtttggaggcaaaaaagtcagttagaaaatcagagtctgaactcaagtggggacagtggagaggagggagaaatgagagacatttttgaagagtaattgtcaggactaggaggctaatggttctgaaggctaagctagcagagacctggtttttatgcaagttgattcagaagggaggaaacgagaagggacataaaaggataaatacgttcaaggatgaggttcagagattggtttggggagtgctgtttctgtagcattacagacaactggaaattccctgaaaagagtcagggttagcgatagagaattgagaacccttatcagagagataataatgaagtcataggagtagatggacttaccaaggaaagagagaaggcaggagaaaaataaaaccaaggttgaaacagaagggaacgcccacatctatttgtgggtaaagagccacctagcacaagcactaagtgtgaatgtgaccaaagacaggggacacctggaggtggcagtgtaaccaagatgaggtagatggactctgcagaactctggagctacaacgctgggattagagtcctttcttacttaacttgttttgggcaagttacctgacctctttgtgcgtcggtttccttacctgtaaaatgaggataatagtagtacccaccacctaaggttgtcatgaaaattaaatgagttagtgtatatgaagtaattagaacaatgcctgtttttacatagaaaatgctatatatgtgtagtcattgttttgttgttgttactttctaaaataaagtttgtaaatatattttttactatttttacagtcatatatgtatatatacatagtcattcaaacagccaaatactttttgtccatgatgcccagtaaattttatttttttattttccattatgatgactggttgttttgcatcagaaaccacctccttttgaaaaaatttttattttgcaagttgcaaaaagagtagtttctataccttacttttgctaatgttaacatcttacatatttattaaaacaagaaaagttaagaatacaatgctattgtctaatccacagaccttatttgaattttgcattttcccagtaataacttttttcttgttcacaatacttccaagatccagcattgcatttagatatgttgtctccttagtttcttttaatcaatgacaattcctcagtctgtctttgtttttcatgatcttgacatatttgcagagtatttgtcagtagttttggaaaagctccttcaattcaggtttgtctcgtgcgtttgcacaattgggttggggttattcatttttggcaagaataccacttaagtgatgttataccctcctcagtgcatcatatcggggtgtgtaacatcattatgtcttgttactggtgatatttactttgatcacttggttaaaattatgttttcggctgggcacggtgactcacacttgtaatcccagcattttgggaggccaaggcaggcggatcacaaggtcaggagtttgataccagcctggtcaacacagtgaaactctgtctctactaaaaatacaaacattagctggttgtgatggcgggcgcctgtaatcccagctactcaggaggctgaggcaggagaatcacttgaacccaggaggcggaggttgcagtgagccgagatcgtgctgctacactccagcctgggggacagagctagactctgtctcaaaaaaaaacaaaaaacaaaacaaacaaaaaagatgttttccaggttcctctgctaaaaagtttctgttttgtaattagtaaaagttatgtgaggagatactctgagaatctacaaatatcctagtttcttcaatacacttccccctactaattttagcattctttgatatttcttgcctacaaaaattattactgtgatgtttgactaatggtgattttttaattttcatagttcctcctatgttgattaattagaattctaccataaggaagagccaccccttatctcccatttatttatttaatcacttatttacgtaagtatatatttacatcagtctggacttagatacttagtctttgggtcataatcccatgctttcattattaatattctttcatacaaattgttccagatttggccgttaggggtgccttcaagtttgttctgtgtcctattggcatgtccccatcatttgttgagcatttccttcctttctggcatcacaagatgtcccaggcttctcttgtattgtccctaccgtagctctggaatcaaaccatcctccaaggaacactgattcctttggttagagaatgatatttaggaaacaagatctggatcctaggtgtgctcatagctcccaggattccgttgcttccaggcccaggaagtgcctctttttccagtctcctggccatctttctggaagagatatcccctgtgcgtctgtattgggaaaaatgggacttaagacaataacatattcagattatgatccctttgaaaatagtaatggaaaaccaatactctctgctctttttccttttttcttttctagttcttcagtttggattcacaactatctttgtggcagcttttcccctagcaccacttctggccttactgaataacataattgaaattcgacttgatgcttacaaatttgtcacacagtggaggagacctttagcttcaagggccaaagacataggtaagttggatttgggtatgtttttaaaaaacatattaaacatctggtggataaaattttaaaagccacaaactttagatttttaattatgttttccatttaatataattcacctaatttttgcaaagaataattatattagttttaaataatattagacaagaagtaaagctacctatttggaagtttataatttccagtgctagagaatttgtgcttaaatagagtctcaatttgattatttctatcttaagattctagaatctaaaatttagatttattatcacttatatcctttttaaaatagatcttccatttgcttaaccttgatttgttctttcctaaatgtttgcctgatttacatgaagtataatccagtttttctaacggcagagatgaactttggtctttgactagagatgctaagttgaatcagatgcagctcgcatgagagctgcctgagatcaaagactgtcttttattcatttctgcattcagtgcttagcacagagcaggcagtcacccagccaatatgtgtggaagagaattgcatgtggatgttattgttaatgacgtcttttaacctccacatgaaacaagcacacattctgtgagcacctaccctgggtcagtgtgttattggcagggcccacaaagatgaacagaagggaccaaatccatacccttaaggagctcccagtctggtggggcttgacattatgtgtgctgatcctatcagatggtattttggtgccttatcattaaccagaattctctgcctcatgtctgatcctgactattaagtcacaagcatatagacactcccatagaaactccctcaatgccaagttgtttgcacaaatctttcctcctggttgcaactgtcagtatttggaaagatgaagaaaggacccatgaaaaggacttttaaaaattaattccattttttcataattatcacctctgttttgtgtatggaactaacacaacacttctatttgaataggaatttggtatggaattcttgaaggcattggaattctctctgttatcacaaatgcatttgtcatagcgataacatctgactttatccctcgcttggtgtatgcttataagtatggaccttgtgcaggccaaggagaagctgggcaaaagtaagtttgctataaaaccactatacagtttctatttcctagccattttttgaggttggacactcagacagaagactgcactggagaatatggaatacatgcccagaaggagaggcctgtgataggggaggtggaattatgatttattataaataataataataacactgtcagccaaagaaaacatgtcctcatctaccaaagagttggaggacatacaagtcagacaggttttagatggaatccaatgtaagagtggcaattaatcattttccccacccctgacctctgcccactatgaatttagaaatgtgtgatatgctaatgtgtataccaaaacagtagcatatgatgtatatatagttatatcattttatgagtttgcaaaaggacagttacaatctgatttacattgtgtcattatgtgtaaactctgcagatcttacataggaaatacggaactaggtactgagtacccagtaggtcctcaataagtattcgtggaataagtaagtgaatgactttttcatgggtattgacctgaccaatgcctatattaccccaagcaagctgagtggactaaactccttgggaggatcaattctatggcattgcctcaatggtttgcaaagccagggcacgctatatatggtcagataaagataagtcaaaattataacatcccctagtttcattcctgtaccttggagaaagggcaagaagtcttaacatgctttaaaaatccctgtttggttaaagccaaaatagttaaactcttattatgggattttgatgtctataggtcagagtgaggtgtgtttggggatcacagggtcttcttaataacccagaaatcaccctacatgggctgctgtctacttatacaagcagccctggtttactagcctgagccagattgattcatcctctacagccattgtagctgatcgaccccaaggagttaagtgccaccaaagcaaatcaactgaactcatgcaaacctggcctgggtccaattcattatgaatcctacataaatgggctaaggtgtggatgattgaggaatgtcataaagctcacaatccagttatttgaaaaggcttctgtaaagttcttgactactataagcatgtggccatgacacactaattatctagcaacttttagtgagcataccatcccattttaagagaaatgtaaagacatgttattttgcccaggcatttctttctaattgcaactatcgttgacattctctgcttggcttagcctgaaaaagcttactttcactcaaaccactttcacatgtgtttttagttgattctcaaaacagccctgggagtgggatgtgcattataatcttcactttgaggagcaggaagagattaaaagaggttaagtccagaatcacaaggcatagtaactctgggagcccatgtgaaggtggagcctcgactcactctccatcccgcacctcacagcccttgaggctgtcccttaacagtaaaccccctggattttccgtcgtaatggtgtttcagttctttcccaaattcaaatatggtgaaatctatcttgttttagggggaaccaaaaacaaaatgggaacctttatgcacaattgatagtgaatcaaagatttagaattttaacaacctggtagatttaagacaatgtccacagtgattaaagtgtatctcatagcctccttgtatcaattttactgggctctttggagcttttcttttctttctttcttttttaacctttctctttgacttaggagccttctgccactttcaatttatggatctgccttttgttttctaatccattagtcatttttcatgttttcaagtagttaaatttatgtatgtttcttcatgaatcttattttctgcctcactggccactctattacttttcagattttttttatttttccaatttagaaatgctttagaaattattgaactcataagagtagcagaattgtcaaggtatagaaagtcataagcctttagggtagtacagtgattgctggctcatccctttcttatgtattaaaggattgaaaattataagtggtgagtggctttcacggtagaattctcacatttaaatgagtgtgtggtcttctcagaagttacatggaagagatatgcatcctaatccaaatggcactaccctgtagaagacattttctagatctttcttggaagtgcctacagaggccatctaccattcctttaagaaaactgactttatattcacaggaaacccttcgtctgttacttttttcttggtacttctcaattctccctgatcatcagtgtagcctcatctccctctgtctcattgagagctggtggtgggtcacagtgagggtatatagcattcctgccagtaaacccagtgatagacatgggctctctactacctgtgaccttcctgctataacaatgggtcagtgagttgacacttgcatgccactagctgaattttatacagcaaaatgtgataaatctcacttgcctgaattgatgacaactttcactatttgatattgacaatagctaacagtctacaaaaggtgaaaggaattagtgaaacgtctagctgtccgtgcatcttttcccccattatggaaatgatatggaaggaagatgtacacagctgataactgtgtgttcctgtactaggtacacatttaatgctttgcactcaggagtaaccaccctctaaagacacattttcaacttggatttatgactgtcattcatgcattaggtccatgaaacaggtgttttatttaaatttaaattttcttaatggagtttttgagcagaacaaccaatggacagtagcgttagtcttgataaagcctcggggctggtctgtgagataagagtgcaggaggggttatgaatattccatttcagtgctgggcctttttttttcaccagttcccagaacacctttcccttcccacagctcagatctctagaaagactctgctaaaacttactccctctctgtgacagctaatcatcctcaaggcactaatttattttcatgtccaggtctagacagttcctaggtaagggagacatcattccaaattaccctttcagtaggggagtcctgctgccagttggattaaggcatgttacacactccctgaccatttgttttcacccacgagtgacttgacaaatgggtccttcagcttggttcattttttttaaggccatgataaagccagtgatttgtcttgagcacgataacatgcagaacccatgtgttctcagaactgtgttcatgtcatcattttggtttagtgttcagcagcttggaataatcatgccagacttgttaatgaagagaatctgaagatcatgatttattcattcaatcagtaattacttattgaccccctgctagatgcaagaaataaataaaatgaataatcaccactcatgtttatcttacttataggctaagatcttatcacatgctatacattcattgtttaatataatcccctcaaggaccctatgaggtgggaacttctgtcactttaagaagttacgtaaatcgggtgtggtgacacatgcctgtagtcccagctattcaggagtctgaggtgggaggatcgtttgagcctgggaggtcaaagctgcagtgagccatgatcataccactgcactccagcaatgagcaacagagcaaggccctgtctcagaaaaaaaaagaagaagtaagaagttatataacgtgccaatattacatgactagaaaccagcagaactaagatttgaccccaaaacccaagcttttgtatgtaaaacactatttaaagaaaaatgtatacaggatgtatctaagtgctaatttcacccaaagtttcaaacattgttatttcagtaagtgcatgtgttaaccacaatgttcaatatgtaaaactgtttagagacttggagaaaagatgtttctaagagtgctacttgctatgatacttttaaaatgggctttttcttgaatggaattattgacagaatgattaaatcttgattttatctacccattcaatctagaatgatcaatagaatctcatactttagtttcctccaatcagatcgattcaatatttatgggattcctacactgcacaagactgtcctaagtcataggatacacaaatacctaagatacctgctctgctcccaaaaaattgcagtccaaaggagagggcatacatatatgctgccaactctagtacaagcgatctggtaatggtgaactaagtaagtatggtggcactacagagagagggaaaggagtgagatgttgtgactggagtgattaggttgtcttcctagtaggagtggtgtttcagttggccgctgaaggataaatactatttccacttgtaaaggaagaggtagggaattctaacagaaaagataacaagcagaggcatgaaaacatcagaagctttcagggaatatagtctaacaggactgtagcatgggatatgagttggggggatcatatgcacaccaatcatatttggaacattttgagaatatctataaatatatatgaaaccattaatgaggaactgtgtttatgtgtatcatcaacaaaagaagctgtggcttacatacaatttatgcccatcatgtaatgctgctttttacctatttcactgaaacattaattggggtagagatgttctatatgatgattctgcagaaaaaggatgagaaccaaaacaagcaacttgttcctgattcaacatgcccagggctttccagcgtatcccaacctgagtcctggttgacaaggaagggccagttaaaggcatttacaattgcagtgacgtctgggaagcagggtcttcagggaactggatacagagaaggtgatgagtgttctaatggtagaatgtgcctcctcttataggtgcatggttggctatgtgaatgccagcttgtctgtatttcgaatttctgactttgagaaccgatctgagcctgaatctgatggcagtgagttctcggggactcctcttaagtactgcaggtgagtgtggcacccagcgtggctctgcctgagctgggctggctccaccgtggggaggttttactctgaaggccccttctggctgagtgtgtttaaagcagtgactgtcaatctcaacagtgcattaaaagcacatgaagaattttcaagccttctcttgcccgggatacaacccaaaccaattaaaacagaatgtcagggagtggaactcagaaaccaggtgcagtcagaattgagaactgctagcttaaagggaaaaactaaaaatatagtagtgaaggttataccgctgctccagggactcagggacagacaatccccaggcgggttgagcgacagctgttgagggcacttgtctttgttctgcttctctctcttgcccagagtatatcacatcacatttctaaatgttaaacaactcagaagcctgtggaaagaggcccagttcatttcaggttccaccacagtagcctctgcaacatgtgctcattctctctttctttctctccctctaaaaggaaatgaattaaactgtgcctcttgatgtgtatctatacaaacgtacatgaaggagaatttgttgagcacctactctgtgccagaaactgttactccatttaatcgtcacatcagccttctaagttaggcaatattatctcatctgacaaatgataaaaccattcactaaaagctcaatgagattacttgtgcacagttcttgaagagtccagatggcacctttttctcttaatactttgacgttataagaattttgtgggctcacacctgtaatcccagcacttgaggaggccaagttgggaggatcacttaagtccaggcagtcaaggctgcagtgagctatgatagcaccactgcattcaaactatggagcaagaccttgtctcaaaaacaaaacaaagaattttggagattccctatcatgacattctatgttctccctgtaatcaaagccacaaggaagaacagccatggagtcctagatgctttgacatagggacttttgtaatgatccacttcagtccctcatcttacagaaggtgaaggtgagagaagccaggggctccccatttctgtgcagtgacagcataccctccacccctttaaacactcatgccaagttcccaggtctcattggctgtcacatctcatcagatggcttatttcctttcccacatggagtaacaagtaagatggggagaaagactggctggaatataatctagtgccgctctctgttggggtctagtggagaagcaagcaattaagcaacaattgatactttcttcagtagatttcccacttgcttgtccagaccatttcgtacatgaaattatttagcaagcattgttagacatatacaggatcctaagtatgaaatgcttcaaaataaaatgccaactattatttggagttaaaaactttgtaatcatttgaaaataagataaaaatacagagtctttctcctcttctgcttcctggctcataattcttcctgcctgtctcacatagtatcataaaagtatattccagaaattattaatgtgaatggaggtattaatgctggcaccattaagttaaattatgattgttttgtttagcatttttcttaaaagtcccccaaagaaaacattttaaaatttctaattaaaatcatgtaaaataatattttcaggtttgttttcagtcatatagcaggtgaggcacccagatcagcttgcgggctgaaaatatctaaacatgtagagaaaaatttaaaaacaccttctcaaatacattaatgacctgggaagaatatttggtattctaaggcagaaagaagtggtacacagagcattgcagccaacttttacccaaagggaatttgctgaagtgagtggactggagctttctttttatttatttatttatctttttatactttaagttctagagtacatgtgcacagcatgcaggtttgttacatatgtatacatgtgccatgttggtgtgctgcacccattaactcatcatttacattaggtatatctcctaatgctatccctcccccctccccccaccccacgacaggccccggtgtgtgatgttccccttcctgtgtccaagtgttctcattgttcagttcccacctatgaatgagaacatgcggtgtttggttttttgtccttgagatagtttgctgagaatgatggtttccagcttcatccatgtccctacaaaggacatgaactcatccttttttatggctgcatagtattccatggtgtatctgtgccacattttcttaatccagtctatcattgatggagctttctttttcaaagctttccatggttagggaaagtgaaagaaaatatagaggccaggtgcagtggctcaccctgtaatcccagcactttgggaggctgaggtgagtagatagcttaaggtcaagagtttgagaccagcctgggcaacatggtaaaaccctgtctctaccaaaaatacaaaaaaattagccaggcatttttgtgcacacctgtagtcccagctacttgggaggtaggagtatcacttgagtctgggaggcagagattgcagtgagccaagatcgcaccactgcactccagcctgggtgacagagcgagattctgtctcaacataaaagaaaagaaaatataggaatgaccagcctgtaagtgtatacttatatgctatataaaacaaccataatatagtcacactagagtctattatacagcaataaaaataaaccacatgcaataatgtgaatgaatcttagtgacataatagtaaaaaaagcaagccccagcaaactacatatagtatagtaccctttctataaagttcaaaaacaaactaaatagtacaatattcagacaaatgcatatacatataagttaaaaataaaaatgaaattcagggtaagggaagcaattgatgtaagttcctggtaatgttttagttcttgggcttcatagtggatttatgagagcttgttgtattattaaagtattactttaatggagtcacatggattaaagttctctgaatagtgcctggtccccaacaggtattcggcaaacatttgtggcattttatgccgactcaaaagtgatagctggaggatacattaggaaggactcttctagtggcaagtggcagaaatccagggtaaactgacttaaacaacaaaaaattgttcagttagctgggagagtcaaggggtgatatgagcttcagtaatggccggatcccaggcctcaagcagtgtcagcaggatgctgcctctctgctgtctctgctttgttttcttgacttccttctcaagcaggctctctctctccatacaaggccaccaggagtcccaggcttttgccttctgtgggcttagtgatcattcactaagtgatagttctggcagacatcttgatgatgtcactgatcaggtctggctcatcttttgagctgagatcaggcaggtggagggggaagtcctagtcaacccacacagatgattccccagagaagagatattattttatcagaagaaaaatgctggacaagcaaaacaacagatatctagtatagagaaacttcaaatttccctcctattgaatgaggactatataatgagaatggaagagatttgagaatcagaaaaatcatagtttgaatgcaacatttttctgtgtctttatagataccgggactaccgtgacccgcctcattcactggtgccctatggctacacactgcagttttggcatgtcctagctgctcgattagcttttatcattgtctttgaggtaagtttcctcagccaaattctttatttcctttgacataatgaagtcagtaggagtaatgaataaaaataagtgatggggattttgaatgtgattatctatatttccagaagtagtagtgtcatattatgtaacctctttttgatcttttttcttaattgaagtatttgatttttccaagacatatttgaaagtccatagttggtttttaatggacaaatctgaactcgttgctcctaaatgtaattttctggggccatagttcttaaactttagcaaaaatgcagtttttccatcctcactcccagatattctgacataccatgtctgtggcttgtttttcatgagctcgttgtaatgattctgactataggcattctgggaccataatttggaaacatttggaaaacatcagcccagtaagattcattctttttttctttttctttttcaacttttattttagatacagtgggtacatgtgcaagtttgttacaaagttacattgcatgatgttgaggtttggggtgcgactgaacccaccacccaggtagcgagcatagtattcaataggtagttattcagcccttgtcccctccccctctcccctctatagtagtccccagtgtctgttgttctcatctttatgtccatgtgtacccagtgtttagcttccactctaagtacgtacaataagaacttgcagtgtttagttttcagtttctacattatttcacttaagataatggcctccagctacatccatgttgctgcaaaggacatggtttcattcttttttatggccacatagtattccatggtgtatacataccacattttctctatctggtccaccattgatgggcacccaggttgattccatgtctttgctattgtgaatagtcctgtgattgacatatgagtacatgtgtctttttggtagaatgctttattttcttttgagtatatacccagaaatgggattgctgggttgaatggtagttaagccctttgttctttgagaaatctccagactacacagtagttggactaatttacctttccaccaacagtgtgcaggtgtccccttttctctgaagcctcgccagcatctgttaatttgtttactttttttttttttttttttttttttttaagactgattctctctctgtcgcccaggctggagtgcaatggcacaatctcggctcactgcaacctctgcctcccaggttcaagtaattctctgcctcagcctcctgagtaggtgggattacaggcacccgctaccacacctggctaatttttgtatttttagtggagacggggtttcactgtcttggccaggctggtcttaacctgacctcatgatccatccgccttggcctcccaaagtgctgggattacaggcgtgagccactgcacttggcctgactttctaataaaagccgtactgactggtgtgagatggtgtctcattgtggttttgatttgcatttctctaatttccttagagattctgagcattttttcatattattgttgtctgcttctatatcttcttttgagaagtatctgtttgtgtcctttgaccactttttaatggggttatttgttttttacatgttgatttgtttaagttccttacagattctgggtattagacctttattgggtgcatagtttgcaaatattttctcccattctgtacggtgtctgtttacttctttgacagtttctcttgctgtgcagaagctctttaattagatttgacttagcaatttttgtttttgttgcaattgcttttcaggacttcaccataaattctttgcccaggccagtattgagaagggtatttcctaggttttcttctagcatttttatagttgaggtcttacatgtaagtctttaattcatcttgagttaaattttgtttatgatgataggtagaagtccagtttcattcttctgcatatggatagccagttatctcagcaccatttattgaacaaggaatccttcccccactgcttgtttttgtcaagttggagattcactctttctaaatgtctccaattattgccatcatcattaccacacatattgaaatatactgattcatatagttaatttatgattttcaaatagttatcaggatttcccaacatgatcataagcattttccaataggactgggtattacaagtggtatttctggttgtgtatcatcacggaattatttatattcaagcatccaagtaagtatttattagctaagactcaaaatggaattataaagtaaaatctgtctagcaattgtctatattatatgtcaataaaaatatattatctattttctttcagggtttaagaaaattgctgtaaaaatagtttgcatttctatgactctagtcataagtggaaatttcatctcttgtcacatatattaaagccagattaataaaagccaaggttgcctctcggcttggatctaaagtttcctagacctcttcaagactattctatcactgctttttccttcagtccagggaaccaaaagaagaaaatattaagctgctcttccctggaaattatcttaccaatggcacactctctctttaaagaagatatttttaacccatcactgtcttaaaatttttcagacaaaacttcttgttgtttgtttgggatttttttattttaagttccagggtacatgtgcaggacatacaggtttgttacacaggtaaatgtgtgccacggtcatctgctgcacagatcaacccgtcacccaggtattaagctcagcatcccttagctattctttctgatgctctcccttcccccacccccacccccaacaggcccctttgtgtgttgtttcccaccatgtgtccatgtgttctcatcattcagctcccacttataagtgagaacatgtggtatttggttttctgttcctttgtcagtttgctgaggataacagcttccagttctgtccatgtccctgcaaaggacattatctcatccctttttatggttgcatagtatttcatggtgtatatgtaccacatttttttatccagcctatcattgatgggcatttgggttgattctatgcctttgctattgtgaatagtgctgcaatgaacatatgcatgcatgtatgtttataatagaatgatttatattcctttctaataagcgccatactgactggtatgagataatatttcattgtggttttgatttgcatttctctaatctccttagagattctgagcatcttttcatattatttttggctgcttgtatatcttcttttgagaggtatctgtttgtgtcctttgccatacaagttatagaattgctgggtaaaatggtatttctgcttgtaaatcactgaggaattgccacactgtcttccacaatggttgaactaatttatactcccaccaacagtgtaaaagtgttcctttttctctgaaaccttgccagcatctgttgtttctggacttttaaataatcaacattctgactggtgtaagatggtatctcattgtgatttttatttgcagttctttaattatcaataatgttgagctttttttcatatgtttgttggctgcatgaatgtcttcttttgaagaatgtctgtttatgtcttttgcccactttttaatggggttgcttggtattttttttgtagatgtgtttaagttccttgtagactctggatatcagacctttgttagatggatagattacaaaaatgttctcccattctataggttactgtttgctctgatgatagtttttttgtgctgtgcagaagtactttcatttaattagatcccatttgtcaattttttcttttgttgcaattgcttttggtgttttcatcatgaaatttttgcccatgcctacatcctgaatggcattgcctagattttcttctaggatttttatagtttggggctttacatttaagtctttaatccatcttgagttaatttttatataaggtgtaaggaaggggttcagtttcgattttctgcatatggctagccagttctcccaaaaccatttattaagtagggaatcctttcccccattgcttgtttttgtcaggtttttcaaagatcagatggttgtagatgtgtggtcttatatctgagatctctaatctgttccattggtctatgtgtctgtttttgtactagtaccatgctgttttggttactgtagccttttagtataatttgaagttgggtagtgtgatgcttccagctttgttctttttgcttagtcttgtcttggctatttggactcttttttggttccacatgaattttaaaagagtttcttctaattctgtgaagagtgtcaatggtagtttaatgggaatagcattgaatctataaattactttgggcagatggccgttttcacaatattgattctttctatccatgagcatggaacatttttccatctgcttgtgtcctttctgatttccttgagcagtggtctgtagttcttgaagaagtcattcacttttcttgttagctgtattcctaggtattttattcttttgcagcagttgtgaatgggagttcatccatgatttggctttctgcttgcctgttgttagtggttaggaatactaatgatttttgcacattgattttgtatcctgagactctgctgaagttgcttatcagcttaagaagcttttgggccaagatgatgggattttctagacacgggatcaggtcatctgcaaaaaaaagataatttgacttcctctcttcctatttgaataccctttatttatttctcttgcctgactgcctgggccagaacttccaatactgcgttgaaaaggagtggtaagagagggcatccttgtcttgtgccggtttttaaggggaatgcttattgagaatttttaacatgaagggatgttggattgttatcaaagaccttttctgcagctattgagataatcatgtggtttttgtctttagttctgcttatgtgatgaattacttatgcttatgtgatgtttactgatttgcatatgttgaaccaactttttatcccagggatgaagccaacttgatcatggtagataagctttttgatgtgctgctggatttggtttgccagtattgtattgaggctttttgcatcaatgttcatcggggatattggcctgaagtttttttgttgtctctctgccaggttttggtatcaggatgacactggcctcataaatgagttaaggaggagtccctcctttttaattttttggaatagtttccatagaaatggtatcagctcttcattgtacctctggtagaattctgctgtaaatctgtcagacaaaactttttaaaaggctgccttatttggcttttcaaatagaattttccattttcttttaatattttgttattaactatttgaaaatatgagaactatgcagaaaagcttcttaattttgtgccatccatgcatcaccaaatttatcaagttttaaataaaacgaagaatacttagcagtatcatttgaacatgatttagtctctatttaatactttagaattgtaatagcccttaaattgtcatctagtacttccttggtcaccattatatagatgagcagaagtgacagtgactctagaattccagctattagtatttcaagtaaagaatttgtgactgtttaccaaaaagaaaaaagcttcttcctgaaatgatcatttccctaggcccactgataattcttataaccaagatttgtaaagcacttgacagtctacaaggcatttttaaacattttctcataattctcacaatactcactttatagatgaggggaatgaggctcagataaattaaataattcatcctcaggtagacagacagcccttaagcagtgaaagctaccagcttcaacctgggttttctgactccacagaatacattcttctggctctcctttgaattaattatctgaccattcttttcccaccttccttccagactcctctttctattccttaggtggtgccatcagaccagttcaggcctcacctgtcctatcatcttgcattacacacgcctcccctggtcactttgcactctccacataccccagagggtccacatccttcttcagccaactctctaacctcattcaggatgcacagtagacctgacgctgttacattctcctctgttttagcacctcgtgttttgtataaagcacctcatttcatatctgatcccagacctcccaaaagacctaagggatcgaatgagaagagagaagtacttgattcaggagatgatgtatgaagcagaactggaacgtctccagaaggaacgaaaggagaggaagaagaatggaaaagcacaccacaacgagtggccgtgaccatgtaggtgagaggtgtgctcagcgtctgaggccattccgaggttgaatgggtgctttaaactccctgaagcaaagcttaccattgttgcagtaacagggatcaaaataaactccttagaagcttcccaatccaaaagaagcttgttttttactttaatcgttgcaaattttgcttgatcttcccctcccacataccttctgcaacacttctctgccttcttgccagactctggcctatcagtcaaggtcttcatgaattggcctaggagttccctgaaacaaagcgtcctctctcttttcctccagccgggctgttttctttaatatccccagggaaacatgccccttctttctaggtgggtgggaggcagacattagcaaagagaattcttcctgaaagcctcagcggccagagaccaaggtgcaacagggctgtcctgggctgcaggaccagtaactgatgaagaatttcttctggccccaccactactggctgctttcttcccaaaaaggccatttctaatttttgcttgaaagcatagtatctgcctgcctgtttctatttccccaatagttggcaggatgtgatgttgctttagactgcccttctgactcagtctgttcacccataaagcaagcataaaaatgtttataccatccctgactccatttggggttacaaattctttgaatgcctttggtgcatggtaagtacaaactattgcacctcatgttttaaagcaattgtgtatgcataagatctttatgccttcttttctctttccagaaaatagtccctttccaggccaaggacctgaattctgtttacttcttctggctgtgcaaaagcacactcaagtgaatgactaaaaatgcaaccacagtgcatgttgcagataccggcggccgcaggaggggcagcatccagtagaggactggcgttggagtcacactgctgtgaaatcacgttgcagtccagcgcacaattgctatctatccatagaccattcttgaccaagcaagcatgcacattatgggcagttacattctcaagtttttaaaatcaaggggaacttgtatactgggcctgtttttcagcctgtttgctaccttttttgcattctatcccatgtgaattttacagacactgggctaaaaagggtattcagacacatggacacacattcctagaatgtcatcatatggtcctaatt

SEQ ID NO: 15417 - DNA, 50618 bp, Homo sapiens
ggctggcgccggtgcctttaagacctcagcgcgcggccctgattgagaaatccgcgcgcagcctccgccgctgcacactgcagcctctgctgaacccctgccgcgccgccgccttcgccagcccggaccggaccggcccgccttcccttcctccgctccagccggcctccggccccgcaacctcctcctcggcgaagtctccctggccgccccatgtcggccgcccccgcctacagcgaagacaagggcggctccgctggccccggggagcccgagtacggccacgaccccgcgagcggcggcatcttctcctccgactacaagcggtgagggagcccgccaggaagctcgcgggagggttggggccggggaccgggcgaggcgcgcgggcaccatggacagcgcccggccccagcgccggccccgccccggccgcgccgaccggaagcccgcccggccccctcctgcggcctggagccccggcccagcgcgggcagcgctggcaccccggctccaggggccggcctaggacgcggaggggggcagataggggctggcgggggatgggccagctcagtttcgagaggagaaaccctccggttccaggtgtttctccggtttgcggcgttgcgttaggggttcccttcctttttcgtgctaggcgggttggcttcccaaaaatgtgggggaggggtctgagtcagcgaacttgagcttgagcctggggcctcttcaggaaggcgggccctggatgtacttgcacagcctcccagcttggccctgctgcaaattcatttcccctccctctggtccccatctccatctgaccctcacatccctgctcctggcattgcccctgtagttcagctccaccttcacaccctcccccacctttgattcgttcgtttgtttcttcatttgtttattcgtaaattctgcaacaagcatttatgaaaagccaactgtgtcgagtcctgaactagtcacggaatacaactgtgaacatgagacccttcttgtcctcacgatgctctagaggggagcacagatgaagaagcagtcagggacagtcgagtgtaatgggggcagtgggagcagggagaggacctagtctctggcgccggagagaaggaagacaggagcgtgaggtatgttccaggcagaggaaagggctttcaggaaggttgagagccaggccacaatctgtgtgagccactggactgaccagaaaagagggtggggaggactcctgaaggattctaagcaggcgacataatcagatttatattttagaaggacgtcaggctgctgcattgtggagaagagattggaggtgggccagattgaacaagagacaagggaggtgggtcttgaagttcacaggcctggcatgattgtggcctagaccaggggagaggcagaagatttgaggctgtggaagaggtggaagcctcagacctgatgattaattggatattgggtgggggtttagagggacagggggagaagatgaggattttcacgcacgtccatgtgaagagaccaccaaacaggctttgaacaataaagctttttaatcacttgggtgcaggccagctgagtccgaaaaaagagtcagcgaagggaaatggggtgggaccgttttacaggatttgggtaggtagtggaaaattacagtcaaagggggttgttctctggcggtggggggacacaaggtgctcagtgggggagcttttgagccaggatgagccaggagaaggaatttcacaagataatgtcatcagttaaggcaggcacaggccattttcactcttcagttacttcaggccatctggatgtatacgtgcaggtcacaggggatatcatggcttagcttgggctcagaggcctgacattcctgtcttcttttattaataagaaaaataacataaaatagtgttgaagtgttggggcagcaaacattttggcggggggtggtatggagagatactgcttctccatagccttgaagggctgcttcgagcgggattggggtggcgtgggaacctagagtgggagagattaagctgaaggcagattctgtggtaagggatgatattgtggggttgttagaagaaacatttgttgtataggattattggtgatggcctggatacggttttgtatgaattgaaaaactaaatggaataagagaaggagaaaaacaggtattaaaggactaagaattgggaggacccaggacatccaattagagagtgcccaaggaggttcagcatagccctgccagcaaagattatttatttactttaagagggagttaagactggcagtttggggatagcaccaggagatatcagctgtaatggtttggagaaacagtgtaaaccggcagtgtaaacaagagcagggcatgtatgagtagttgagtatggtgaataggagtatgactagtcagaagatagtagggatgacaagttttctggggcacagtccaagttggtctggtgtctggaatgagactggggcctaataaaaaggagcatctatacaggagcttgaatgggctgtaccctgcagcattccgaggacaggcccaaattctgagaagggcaagtggtaaaagtattgtcagtcctttttaagttggtggctgagcttggtgaggtgtgtttttaaaagaccattagtccgttctaccttttctgaagattgaggatggtaaggggtatgaaggtttcactgaataccaggagcctgagaaactgcttgggtgatttgaccagtaaaggctggtctgttattggactatatagaggcgggaaggccaaactgaggaattatgtctgacagaagggaagaaatgaccgcagtggccttctcagaccctgtgggaaaggcctctacccatccagtgaaagtatctacccagaccaagacgtattttagtttcctgactcggggcatgtgagtaaagtcaatttgccagtcctgggcagaggcaaatccccaggcttgatgtgtagggaagggagggggcctgaacaatccctgaggagtagtagaatagcagatggaacactgagaagtgatttccttgaggatagatttccacaatggaaaggaaatgagaggttctaagaggcaggctagcggcttgtaacctacatggaagaggttatgaaatgacgaaagaatagaatgggcctgtgaggctagaaggagatattttccttggtctgagaaccatttgccttgtgtgggaagagattcataggtgtaagtttcattgggggagtaggtaggagtgactgatgagaaggagaaaaactggccatgagggacagaagttggaatgctagctgcttttttagctaccttatcagcataagtgttgccctgagcgatgggatctgatgccttttgatggcccttgcagtgaatgactccagcttcctttggaagtaaagcggccttgagaagagtttttattaaagaggaattaatgatggaggacccttgtgtaatgaggaaagctttttgcccatataacagcatggaggtacaggatatggaaggcatatttagagtcagtataaatattgacacatagtccttttgcaagactgagggctcgagttaaggcaatgagttaagctttctgagaggtagtggaggggggcagaaagtatatgcgtcaggtgtgaggaagaaaatagattttggaagttatgagaactgtagagagtgagttgagcatagtttgtgattttgagggcctctgaaagtattaaagcagcggcagccgctgcacgcagacatgagggctaggccaaaacagtaaggtcaagttgttcggacagaaaggctacagggcgtggtcccagctcttgtgtaagaattccaaccgcacagccctgcactttggctgtgtgtgatgaaaaagggttgggatgaattagggagacctagtgtgagagcagcttctacggctgtttttaaggaatggaaaggagtggcaaaaggatttaggatctgtggggtcagctaggtttgcttttgtgagtttatataatggtttagtcaggatggtaaaactaggtatccaaaggtggaagtacctaaccatcccttgaaaggaaaggagttgttgctttgtagaagggattggggttcgggagattagccggacatgatcagcagggagagcacgtgtgttttcatgagaactatgccaagataggtaatggatgaggaagaaatttgggcttgactgaagtaatgggggctgtccgtgaagccttgcggcagtacagcctaggtagtttgctgagcctgatgggtgtcagggacagtccaagtgaaagcgaagagaggctgagatgaagggtgcaaatgaatagtaaagaaagcatgtttgaaatccagaagagaatgatgggttgtggaggggttgtggagggaggtattgaggaggagagtatatgagtttggcaccacggggtggataggcaaaacaatttggctgacaaggcacagatcctgaactaattgtaagacttgtctggtttttgaacaggtaaaatgggggaattgtaaggagagtttataggctttaaaaggccatgctgtaacaggcgagtgataacaggctttaatccttttaaagcctgctgggggatgggatattgacattgagcacggtaagggtgattaggttttaatgggatggtaaggggtgcatgatcagtcgccaaggagggaatagaggtgtcctatacttgaggattaaggtggggagatacaaggggaggatgtgaaggaggctttgaactgggggaaaaggtggcaatgaggtgtggctgtagcctaggaatagtcagggaagcagataatttaaagtgtctcggcctaataagggaactgcgcaggtggggataactgaaaaggagtgcataaaagagtattgtccaagttggcctcagagttggggagttttgagaggtttagaagcctggccatcaatacccacaacagttatggaggcaaaggaaacaggcctttgaaaagaaggtaatgtggagttggtagcctccgtattgattaagaaggggacggacttaccctccactgtaagagttacccaaagcatctgtgatggtccaggaagcttccaaggcgattgggcagtgtcagtcttcagctgctaagccgagaagatttgggaaggagtcagtcaggcagccttgggccagagttccaggggctctgggagtggctgccaggtgagttggacagtccgatttccagtggggttccacacagatgggacaaggcttaggaagaatcctgggctgtgggcattccttggcccagtggccagatttctggcacttgaagcaagatcctgatggagaaggtcctgtaggaatgcttgactgctgcagcttaggcattttgaagttcttgtgtactggagatgtggctggggtttctctcacagtggaggcaaggaactacaactcagaaatacattgctacttggctgcctttactctattattgtacaccttgaaggcgaggttaattaagtcctgttatggggtttgagggccggaatttaatttttggagttttatttaatgttgggagtggattgggtaataaaatgtatattgagaataagactgccttttgaccttttagggtctagggctgtaaagcgtctcagggttgctgcccaacgagccatgaactgggctgggtttttatatttgatgaaaaagagcctaaatactaactgatttggcagaggtcggataaaggaaaaggagcgttaaccttgactatgcctttagctccagccacctctttaagaggaaattgttgggcaggttggggagggctagtcgcagaacaaaactgtaagccggactgggtgtggggagaggaggtgatagaaggattatagggtggaggagcagaagctgagaaagaattggagtctgattcagcctggtggggagtgacctgaggagcattctggggattaggtgagaggtcagatgggtcggtagaaaaggaagattggaagattgaaaagacgcagcgacgcttggggttgggactgaggggacaggcgggagggaaagaaggaggatttgggatgagtcgcattgggaacagagactagggagggaccgatgtgtaaaagaatgcctggacatcaggcacctcagactgtttgcccattttacaacaagaattatctagatcttgtaggatggaaaaatcgaaagtgccgttttctggctatttggaaccattgttgagtttgtattggggttaagcggcattgcaaagaaaataaggcatttaggttttaggtcaggtgtgagttgaagaggttttaagttcttgagaacacaggctaagagagaagaaggaggaatggagggtggaatgttgcccacagtgaaggaggcaagcccagagaaaagagagggtagagacacggagagaaggggtggggggtgctttgccccccaggaaagtggagagaaaagagagggtagagacacagagagaaggagtcgggggtgcttgtcccccaggaacgtggagagaaaagagagggtagaaacatggagagaaggggtggggggtacttgccccccaaaaagtggtgtttgccactaagggtgaaagatcaaggcaggcatcctcgcggtgatcagacaactctgaaacgtgggtgaataatcaagcaggcgtccccgcagtgattaaacaccaagggaagactgtcttcctgagtccgtgatcggcgccggagttttgggttcacagataaaatgcatttcctgtctctaccagaaaaggaaaggaaccgaaattaagagaagggagagattgaaagatggcaccaagattgaaaggagaaagaggttgagggatagtgagagaggttggagaagagagtaaaaagaggccgcttacctgatttaaaattggtgagatgttcctcaggctggttggtctgaggacccgaggtcattaggtggatctttatcatgaagcaaagagcaggaggacaggggattgatcttccaagggtggtcccccgatccgagtcatggcaccaaatttcacgcacgtccatgtgaagagaccacccaacaggctttgtgtgagcaataaagctttttaatcacctggttgcaggccggctgagtctgaaaaaagagtcaacgaaaggagataggggtggggccattttataggatttgggtaggtagtggacaattacagtcaaaggggggtgttccttggtgggcaggggcgggggacacaaggtgctcagtgggggagcttttgagccaggatgagccaggagaaggaatttcacaaggtaatgtcatcagttaaggcaggaacaggccattttcacttcttttgtgattcttcaattacttcaggccatctggatatatacgtgcaggtcacaggggatatgatggtttagcttgggctcagaggcctgacaaggatgttactcaggttactagttcctgcaactggatggatgatggtgttattcagtgtaattggaaataaagatgttacaagcaaatttgtggaaaattaatgttgagcccagctttggacatattgagattgtaaactctgagggacatattaccctattaggtagctggatattacgatttgggttccaggagagagattagggaattattaacatatgtatgttaattaaagccacagaagtgaagataactcagggaggaggtataaaatgagttcagacactgcacaagtctgaaccctgaagacaccaacattagaagtgaccagagaacagtggaaagtgtttcaaggtacccaagaggtgaactaaaggctgaaagaaaacaatgtaatttcaagaaggagggagtggtcagtagtttcaatgcccattaaggtcaaatcaaacaaggaaaaaaatcatgaccattggttgacaaagaagagctcaattcctttctactctattccccacctcctgccctgggagataaattctggcaaagtaaggagaacaggagctagattatttctttcccagcattctgttgtggatgatttaaaacatacagaaaaatgaaatgaataatacaatgaacacatgtatatcatccatctagattcaactgtcattgacatcgtaccttatttgctttatctaaccatctattcgtatactttttttggttgaaccatgttaagttgcagagatcatgacccttcaaccccacattctaagtcgacatctaaagccagattaaaatgaataaaggagcacacaggtggtaagtagataaaacagtgaatggaaattttgctttcaagaaatttgactgtaaaagagaaagctgctggaggagaacctcactcagttcaaggaagtttgtctattttgttattttgggtttttttttttgtttcttaaaatgtatgactccatatttttgtttattattaatattaggcgggagagcctagagcaagtttaactgctgatgggaaggagcgattggtgggagagaggctgaagggaagaaaggaagtacagaacactgagtgatgggaggggaggcttactgagctgggtgggaggactagcctgggagcagggaggaccaactctgcccagagggaagagggcaggaggagaggagagtataaatgcagatggagactgggtacagtggctcatgcctgtaatcccagcactttgggaggctgaggcgggcaggtcacttgaaatcaagagttcaagactaacctggccaacatgtcaaaaccccgtctctactaaaaatacaaaaattagccagttgtggtaacgcatgtctataatcccagctactcaggaggctgaggcaggagaatcacatgaacccgggaggtggagattacagtgagccgagatggcaccactgcactccagcctgggcaacggagtgagactccatctctaaataaataaataagtaaataaatgcagatggatgggagtctggggcagggggctgcaggggatttcatctaaagactttccctttttcgggaaccaggtggtgaagccataagggcaaggctgggaatggggacttgagggtcaaaggggtttcaaatacaatgaagaaagccaaccaggccaggcgcggtggctcacgcctgtaatcctagcactttgggaggctgaggcaggcatatcacctaaggttgggagtttgagaccagcctgaccaacatggagaaaccccgtctctactaaaaatacaaaaattagccaggtgtggtggtgtatgcctgtaatcccagctacttgggaggctgaggcaggagaattgcttgaacccaggagacggaggttgcagtgagccgagatcacgccattacactccagcctgggcaataagagtgaaactccatctgaaaaaaaaaaaaaaaaaagccacccaccactggcaggccagtggcattggagaccagtgggacaagagggccaaggatgtgagagcagttggagggatagacacaggggttgcgggggagggtgctaggaggaagtagagataagagaaggttgatgggaaggaataaatcaagtattggctctggaaaggcaggtgaggattaagatgcctagggtcagtgagaagagggtatatgagatttctcaggaggctgcagtctaattgtggcagtgggattggagctgaagagggcatctctcacctctctatcaactccactgaccatctagtcccttgcccagagactaggggtaggcttggtctcctgtccctgcccttctttccctctagaggccttgtctctgagcagtgaagaggaaaccggagcatccctccctgccagtgtccggttaccaagttttgggggcgggccatctggtgactgtgacaggagccccagcgccctggccagctcagtccattcctggagaagaacctgatgcagcgattcctgcagctcccgggggccgtggtgaggcctggggtcagaggggcctgcggagctgatcaagaggctgctagccctgtgctggctcccgaaggtgggcccccactccggtaccaggccttggagcctgaggagcttcggtggctgcaggcccaggaggaagacacgaccccagaagcatctctggaaggaccttgcccagaggccagccagagccagagccagccactacggtatagaggaacccacaggaaccccctacccacacagccaggaaggccagggatgggcagttgcactctcagcccagacctcttccggtcccacctcctctgatggaggcttaggctggcatttagggtccaggctgggcggagaaggtggtcaggggcaccgtatgggggctgagggtatgagtgaggagagatgaggggcttaactccctggaggctctgaggggaggaggatagtaaaatatttgagggttgaggtcccaccttgacctctttctccccacaggcccccactggagtgggctctggacgaggtttggggacaggatacagcacagacagggtttggccagccactgcctgccagtggactggaacttaggtggtaagaggtgacagcgaggtgtatatcaagggaggtgagcatgactgacccccagtgccatgccaggccccctggctggctccagccacccccagaagagtcccttaggctaggtcagactaggggtcaggtcagagtgagtgcagcagcgtaaggggatctgactatgggagataatgtttcatggccttagggtgttgtgccttagtccctgcctctgcctcttgggaacagaagttggtgggagtgaggacgagaggcccagggcggtctcacctcaggtggtggctgcggtctgtgtcagtgcatattctgtgtcagtgcatattcgacagtcaatcttacctgtgctggctgctttaggcccagtggtcctgccccctttcattccccttctcctgcaggggcctggaatgtactcactaggctgggtggggaggatgccctggggtgtgtgcatttgacaggcgcatgtggcatttgtgggtgtggtgaggaagggaatacccagagttaaaggagattgggcaaacttggccctccttccacggaagcccagggaaaagccatcccagggtgactcctcagaagatcagaggacccttggggctggatatatttgatcttagaagcctacatttatcatcaaaaatctcaactaggagtccactgaccattttggtgaatgagactggagaggccaagtttggtccaagttatctgtgtattagatgtgatgcggcatgtgtgtgtgtgtgtagggggacgtgtgtggggtgtgtgtgtctctatgagggtgtgggggagcggggagaggtcttgtgatatatgtctgtaggggacatgtatgggatatgtgtgtctataagagggtgtgggagagtggggagaggtctcctggtggtatatgtctggggggtttgtaggtgtgtaggtgagttgtgtgggtggtttatgtgtgtagagtttttctgtgggaggtgtctgtatgtgggggagtgtgtttctctgggcgttgtgtaggcaggattttgtgggtgtgcgtgggtttatgtatggattctactagtgtctgcgggacctgtaggtatgtttgtatgagctgtccgtgaggtgtaggtatgtcgggggacatgggagtgtctgaggtatatgtgggtggtatcaatgtgtagttgtctgtggggtgtgcgtatgaaggatcctgacgtggagtgttgtgcattcatatctcagggaagctggtgcccagctctgtcatttttcctaggccctcggtgctgcccacgcctacccagctcaatggtctgtacctatgaccatgcccctggtgtcctgagctcagcctcctacccactaagaaactcaacagtctggtctgtgtttggcagggtaagagggtgattgtcttctggccctggcctgaccctggaagagtagaaggtgtcctctgatttggggggcatccccccaggtgagggagtttcagataacatgatggggctggatattttcttctgtcctcacatgacagatagcgagggcctcagataatgctggaaggcatcatctttctattttgctttccatcaaaaatctctttgggaaagacagtttctaacattcttgggatagtgacttcttagtgcccctcttcttgtctgacgtcaggtactcacgcatttctgcagccctgtgactaagttgcgtgttctgtctggttcttctcttcctctcagcattcatcacttgtttctcagcattagcagcagtcatttgccactttatgattgttatcatgctctttcctctcctaacagtgctatccccaatttctgattttctgtcatttctaaatgttgcatgtctgtgactaactttgcacacattgattttttttttattttttatttttgagatggagtctcgttctgttgcccaggctggagtgcagtggcgcgatcttggctcactgcaagctccacctcctgggttcacgccattctcctgcctcagcctactgagtagctaggactacagacgcccgccaccacacccggctaattttttttaaattttttagtagagacggggtttcaccatgttagccaggatggtctcgatctcctggccttgtgatccgcctgccttggcctcccaaagtgctgggattacaggcgtgagccaccgtgcccggcctgatttttaatttttatcactgtgatatttctcaagctgggttcttgtgcctgggtcaaagctgtgggttatcagagtgtcatctgggaaattagtgtgtgtgagtccccacacacagctgctcaccacattttggaattgtcttggcaacatatgagtgcatcagtttcacacaattctatcagctatatatagacacatttttttcatgggtttattaacaattctctgatcacttcgtgatcaccagttctgcatcctctgagtatggttagccacattgttcactgcacaagggcatctggccaaggaataccagcccatgctccacacacagaatggggagcaacagctcagggctgtgtctatctgtaggggcatgcagattgaaaatgggcttgtagcagccctgacagtgaatgctgcaaagagaccttatacatgtatatcagttccttttttaaatttttttgagatggagtctcactctgtcacccaggctggagtgcagtggcgcgatctcggctcactgcaatctccgcctcctgggttcaagcgattctcgttcctcagcctcctgagtagctgggattacaggtgtgtgccaccatgcccggctaatttttgtaattttagtagggatggggtttcaccatgttggccaggctaatctcgaactcctgaccttaagtgatctgcccaccttggcctccaaaagtgctggaattacaagcgtgagccaccacacctggcctctatttcgaatattaaactttaatttaccatatcccaaatatttttccttttgttgctattatgggctgaattgtgtccctccaaaatgcatatgttgaagttctagcccccagtacctcagaatgttacctttgaggtgattaagttaaaatgaggttattaaggggggccctaatccaatatgactgatttctttataagaagaggaaatttggatataggcacgcagaaggaagaccatgtgaagacagagaagatggttgtaagagacagaaaaacccaaagtgtgtttctcctactctcatacacaccgctcaccagagagtgcttcacctctggccacaaaaatgggtggagatttctccccaccaacaacctgttctccagcagacactaactgggtgttctctaattcaagtcaatctagtgttagattttttaggttaagggctcagtgccacaagactgctctctgcttcagatgccaattccaagtggtaagttgtcagctatacttctgaccaactggctataaatcaggggttcccatgccaccctccttgggttcaactctgtgagtggctcacagaactcagggaaactttagttatatttacccatttattataaagggtagagacaaacaccagatgaagagatgcatagggagaggtatggaaggaggggtgcagagctcccatgccctctccaggcaccacaccctccaggcaccttcacatgttccacagtctggaagctctcgaaaccctatcctcttgggtttttatgaaggcttcatgattgatcgcatctttggccatgtgatcaactcaaccatcagccccactccccattccccagaggtcaaatagtgggattgaaagtttcaaccctcagctgggcacagcagctcacgcctataatcccagcacttttggaggccaaggcgggtggatcacttgaggtcaggagttcgagaccagcctgaccaacatgatgaaacccatctctattaaaaatacaaaaatttgccaggtgtggtggtgggcaactgtagtcccagctatttggaaggctgaggcaggagaattgcttcaacccagaaggtggaggctgcagtgagccgagattgcctcactgcaccactccagcctgggcgacagagcaagactcagtgtcaaaaaaaaaaaaaaaaaaagaaagaaagaaaaaaagttccaaccatctgataacaaaagatgcttctatcacccaggaaattccaagggatttccatgtcagttgttcctctcactcaggaagttataaaggtcttaggatctctgcgtgaggaactgggtggaagaccaaatattagaacagaagttctcctagcatccctattgtcaagagttttaggagctctgtctcagaaatggggtatagagaccaaatatatatttctttacaatatcacaagaatcatctacaagccaaagaaagaggctatagaagaaaccaaccctgctgacactttaatctcagccttccagcctccagaactgtgagcaaataaatttatgttgtttaagccaccatctgtagtacttcttgtttttttttttttttagagacaggttcttgctctgttgcctaggctggagtgcagtagcacaatcatagctcactgcagcctccaacatcttggtgcaagcgatcctcccacttcagcctcctgagtagctgtgactacaggcatgtgccaccatgcctggctaattttttttatttttgtagaaacaggatctgactatgttgtccaggctggtcccaactcctgagctcaagcaatccttctgcctcagtctcccaaagtgctgggattacaagtgtgagccaccatgcctggcctgtggttctttgttatggtggttctaggaagctagtatagttgccttatttttctcataaatttagtttttagataccaaagtttaaaaattaaacctaggcctggcacagtggctcacacttgtaatcccagcactttgggaggccgaaggaggcaaatcacttgagtccaggagtttgagaccagcctggtcaacatggcgaaaccccaactctactaaaaatacaaaaaatttgccaggcatggtggtgcacacctgtaatctcagctatttaggaggctgaggcatgagaatcacttgaacccaggaggttgaggctgcagtgagccgagattgcgccactgcactccagcctgggcaacagagcgagacttcgtctcaaacagaaaaacgaaaaaaaggcctgggcgcagtggctcacacctgtaatcccagcactttgggaggctgaggtgggcggatcaactgaggtcgggagtttgagaccagcctgaccaacatggagaaacctcatctctactaaaaatacaaaaattagctgggcatggtggcgcatgcctgtaatcccagctattctggaggctgaggcaggagaattgcttgaacccaggaggtggaggttgcagtgagctgagatggcaccattgcactccagcctgggcaacaagaacgaaactctgtctcaaaaaacaaaaacgtaccaattaaacctagccatattgttgctgctaataattttatgaccttaataaaatcttcccttccttcttttgtatttaaaaataattaactgttaagcaaatgcgggatttattttggggtgaaatatgtatacaagttaaattatttgctgctggccaggtgtggtggctcacacctgtaatctcagcgctttgggaggatgaggcgggaagatcacttgaggtcaggagtttgagaccagcctgaccaacatggtgaaaccctgtctctactaaaaatacaaaaattacccgagcgtggtggtgcatgcctgtaatcccagctacttgggaggctgaggcaggagaatcacttgaacccaggaggcagaggtttcagtgacccgagatcgtgccattgcactccagcctgggcaatgagagcaaaattccatctaaaaaaaaaaaaagtgctgcaaagcagttgtcccaatagcatttatttaagtggggcgggggcgggggggtgggggcggggggagattcttattggttcgtaatttatcaagttagaccttttatgaaattccccccatgacctttgaccttctgtttttaacctggtaccaaacagcttttatcatcgtctcgtggtgtttatgttttgaagtccaatagggtgagttgtctatgattgtttccttcttttcccaaaaatattctttggagttcttacctactgattttttttttccagatgaattttgctgtcacttaagtttgacaaaatgttccctttgaaatttcaaatttttgaaatgaagtatgagatctaaaaaaaaaaagaaacctgtgtattggctcagcattacccttattcctctcagccaagtgcaagggatcacttactcaaatctttattcatcccactagagtttaatgacttccttgaatggctgttcaatgttcagtgacaggtctggcttttgttgtgaggccatctatggagtctctgggacccttccagtccctggaatcagtttggtctgagaggtcaggacttggaaacatactggaggcagggcaagggcaccctgctcttgttttggcatctacctcttttccgctggtccttcttatccatccaactagtccttttccctgagccaggtccatactttcccaccccaaacccttcctcttgtttcctggctctctgtttctggctacattcatttcctacactcctgtatcaaaagtaccacaattgcttctcgttcccacagtgcagtgcggctgagcgcctcagagcccgcggggacgctgcggggggattgcggggagggggcgttgggaggtgccgatgttgggctgggcggatgagcgcatctgcgtggtgagccttccaacgtgcgcgagaaggacgtggaagaccttttctacaagtacggccggatccgcaagatcaagcttaagaatgggcactgccttgtgcccttcgccttggtgcgctttgaggacccccgagatgcagaggatgctatttatggaagaaatagttatgattatggccagtgtcggcttcgtgtggagttctccaggacttacgaagtcggggtgggtggccccgtggtgggaggaatgggccttctgcaagaagatctgatttccgagttcttgtttcaggacttcctcaggcagctggcaggacctgaaggatcacatgcgagaagttggggatgtctgttatgccgatgtgcagaaggacggtgtggggatggttgagtatctcagaaaagaagacatggaatatgccctgcataaattggatgacactaaattccactctcatgatagtgaaacttcctacatctgagtttatcctgagagaagcaccagctatggctactcacagtctcggtttgggtcaaggggccgtgactctccatactaaagccggggttccccacaccacttctctcctttcaggccctactgagacaggtgatgggaattttttctttattttttaggttaactgagctgctttgtgctcagaatctgcattccagattgaggatttagcgtcttaggaaattattttaattttttttttttaaagaagaaaaaaaaactacatactttctaccagggccatattagcagtgaaacattttaaactgcagaaattgtggttttggttcagaaacaagttgtatatttttcactcctgaatatgggtaaaaaatcagttccgtctttgtgggttgctctgctatggagatcaacagttactgtgactgagttggcccattctgcttaaaaatatgttttaaacgtttaagaaaaatgctcatcatcactggccatcagagaaatgcaaatcaaaaccacaatgaggtaccatctcacaccagttagaatggcaatcattaaaagtcaggaaacaacaggtgctggagaggatgtggagaaatagaaacatttttacactgttggtgggagtgtaaactagttcacccattgtggaagacagtgtggcgattcctcaaggatctagaactagaaataccatttgacccagtgatcccgttattgggtatatacccaaaggattgtaaatcattctactataaagacacatgcacacgtatgtttattgcagcactgttcacaatagcaaagacttggaaccaacccaaatgtccatcagtgatagactggattaagaacatgtggcatggctgggtgcggtggctcatgcctgtaatcccagcgtggctcatgcctgtaatcccagcactttgggaggccaagacgggtagatcacgaggtcaggagatcgagaccatcctggctaacacggtgaaaccccgtctctactaaaaatacaaacaattagctgggcgtggtggtggcgggtacctgtagtcccagctactcggtaggctgaggcaggagaatggcatgaacccaggaggtggagcttgcagtgagccgagattgcgccactgcactccagcctgggcgacagagcgagactccatctcacaaaaaaaaaaaaaaaaaaaaaaaaaaagaagaagaaaatgtggcacatatacaccatggaatactatgcaaccataaaaaaggatgagttcgtgtcctttgtagggacatggatgaagctggaaaccatcattctgagcaaactactgcaaggacagaaaaccaaacactgcaggttctcactcataggtgggaattgaacaatgagaacacttgaacacggggtggggaacatcacacactggggcctgttgtggcgttgggggaggagggagggatagcattaggaggaatacctaatgtaaatgacgaattaatgggtgcagcacaccaacatggcacatgtatacatatgtaacaaagctgcacgttgtgcacatgtaccctagaacttaaaagtataattaaaaaaaaaaagtttagtaattgaaaaaaaaaagtacaacaattgggttggttggaacagcagaaatgaattgtctcacagctctggaggccaaaagtctgaactcaaggtgtcggcaggaccatgctccctctgaaacccatagggaaatccttctttgccccttctagcttctggttgtttgctggcagtctctggcattccctggcttgtagacgcatctttccaatcgtctgccttcacatggtagtctccctgtgtctgtctctttaagtggctgtcttttgttttttgtgtttttttaatttcaatttaatctattttttgtagacacattgtttcaccatgttgccaggctggtctcgaactccagggctcaagtgatcctcccgtctcagcttcccaaagtgctgggattacaggcgtgagccgccacacccagcccacatggctgtcttcttatgggaaaccagacatgggattagagacccactctattagagtaggattgcatttaactaattacatctgcaacaactctatttccaaataaggttacattctgaggtactaggggttaagacttaaatatatcctttttaggaaggacacagttcaacccacaatattagctggccacatgtttcccctgatctgtactttacttgttccccctggctctggtccctcctcgggtcaggtcctgcctgagcctcccctggccatgtcccttctttgtgcctggaccctcctgattaataccccatccccacccttgtgccctcagctgacttcttgtacctcccaccaggcatgatgacctgaaggagatgctggacaccaacaaggattctctcaagctggaggccatgaagaggattgtggcggtaagaggggaaggaggaggcctccctccgggcggggcctgggtggccaagagcagctctccttagctccttgtagaccttccctctagttagtgctgtgcctctcgctttgtccctcttcccctaccttgaccccaccacccagatgattgcccgaggaaagaatgcttcagacctgtttcccgcggtggtgaagaacgtggcctgtaagaacatagaggtgagcactacctggtgagggattgcttgtccccacctcccccaggaccacactcaagcttggggtgaggaaggaaatgatttagcccctgggggcccgacctgctgagaaatgtctctgagccaggagaagacactgtctccatgtccctgaactggatgtggatcaaggtaaaggacccggatacactcaggggtgctctcccccactgggagagtttgtccccatggaccgcagctggctggggagatgacatcccaggggtaggggggtgggcacaggtgcctgctgagaagcgttctgctgagaaacgtgctctccccaaggtgaagaagcttgtctatgtgtacctggtacgctacgctgaggagcagcaagacctggccctgctgtccatctccaccttccaacgtggcctaaaggtcaggggtctcagtttgcctcccagggcctgggcctcgttggcgctgtatcggaggagtaggcctggggagaggccatgagcatgggagcgggctctgcagaccccttcctacctgcctaaaattgggagggtcacagtcagaagaggccagccagaccctcagagagtggaagctgggctcagaaggggcgtaagagatgaagtgggtacccagggcccctgtctctcttcccaggagcctgtggtaatggctgcttctagtatgaaccacttgagcccccggagagtggagagtctctagcaatggagaacccctcaaccctcacccccctttgtgtaaaggtgtgaattgtggtccacagccaggtagatttcaacctttagcagtggcctgaatcccccacaccattctcaccttttgtttcattttgcccaaggcctctagttggatttacatatgttaggtgcatgtataagtctcccccctaagggcttttctggttagtctaagacatcttgagggtaaagacagccatttcaaggccattctctccatattggatttttcagctctgattacaaccattaactcctctatttttgcatacctttatttatttatttatttatgagacaggttctcactgtgttgcccaggctggagtgcagtggtgcaatcatggctcactggagcctcgacttccctgagctcaggtgattctcccacctctgtctcctgagtagctgcgactactcagcctgcatcaccatgctcggctaatttttttgtagtttttgtagagatggggtttcaccctgttgcctatgctggtcttggactcctgggctcaagtggcctcagcttcccaaagtgctgggattacagggatgagctaatactcctagcctggatacttttagttcaaatttctgtgagagagattgtgaaaggtccagctcatcttttcatatccagaagttctgtaggttgctgggtagacaggattgctgctcaaatccagggcccaccccttgtccaatctgctatggccagcaagaggggttgacagtcggcttctttggggtgagagtagaaagcatggtcacttgaatatacaattcattcatttagtaaatacttgggtgtctctatgccacacattgtgctagatttctttttataagtcaaaaccatggaatccgtcttagattggcaagtaatcttttggtttgagtaagggttaagtataaaaactaatctgaaattgttgtacagattttcacctatagtctctaccaactgaccctgtcccccttttagaaaaccagagctcatttagttcaactcaatgtgataatttctttctgcaaagtgccaaatagtattttaggttttgtaggccttatagtctcaactatgcaactactcaattttgcccttatggtgcaaatgcagccattgacaagtgggcgtggccgtgttccaataaatctatataaaaaacaggcaatagacagattttatccaagggctgtagcatgccagcctttgctctagaacatgtctaacaggtcatcttttctgatagggacctcactccttcataaggcaacttgctccatctcaagacaactaccactatttggggtgttttttaaaccattctcttttgttgaaacctccacaactataatttttaaaaattgatttcaggctgggtgtggtggctcatgcctgtaatcccagcactttgggaggccgaagcaggcaaatcacaaggtcaggagttcaagaccagcctggccaacatggtgaaactccatctctactaaaaatacaaaaaattagcttggcatggtggcgggtgcccataatcccagctactcaggaggctgacgcaggagaatggcttgaacccgggaggcagaggttgcaatgagccgagaacgtgccactgcagtccagcccaggcgacagtgtgagatccatctcaaaaaaaaaaaaaattgatttcaggctgtactgcattatgactgcacctgtgaatagccactgtactccagcctgggcaacatagggagaccctgtatctaaaaaataaaataaaatttactacaggttcacaaaaggcataaagaataatataatgaatatccataagaaatgacacatttctcaaatagccaaagcctcctatatatcttctcttgtttatcattcataggtatgtatttattcctgtgctagtaatttgcatattgttaagcaatataaaatgttttgtaaatggtgtcatcgtactacatatgtattcctttaaaacttgttttcttttttgttgtcactggcttttggtctctcctgcatgttggaaccaatcatttcaatccagccttctcccttctttcaatcctagcccaggctagggccgtgttcactttcttaggagatccctcatggaatcaaacctctgactggcaagcagataatccaggtctccctacatcctgtctttgtacagttggtcccttgaaccccctatgaaaccctactctatttcattttatcagtttagcacagggtccaaaccagggtgattctgaatcttaattatgtccctcctgattttgtgtcttctttcaagatactgataagctatttggaccagggcaaaagactgaggcatagcatgtttccaggttgacactgatctgttaataaaccttctccaagtatatttcaccacgttgtagacccacctgactgtacagacagctggcatttttctatcttgttaggaaggatcttattcaatagcaataaataaataaataaataacacctttcatgtgcaaagggttgtgggtgacacagagataaaacagatgtgaattctgctcttaaaaatgcttggctattaggtgaaacaaaaggcctacctaaaaaatagcaatgcaggaaatgctatgagacttccacaaacatatcactgaaatcaagatactaatatccaccggcctagttaccccatcaaaaaggaaaacacattttttttgataactttctgtgaatctataatcatttcccaaataaaatgctcacacacaaaaaaggaaaacaggtttaagcagatgatgtgactatttgtctctaagaaaacagagactccttccttttcaataaatgtttctaacccatctgtttaaaagtcaattccagaattttgtcaggaattagcatcaattttacctgcaattgtgaggatcttgtcttgtctttttccatttcagaaagtcagggtaatatctacccttctttagtgttctattcccgtcattctctaagagtaatagtacaggcacacctcattgtattgcactttgcagatattgccagatattgcactttttacaaattgagggtttgtggcaaccctacatcaatcaagtctatcagtgccatttttccaacagtatgtgctcacattgtgcctctgtcacattctggtaattctcacaatattccaaactttttaatgattattatatgttatggtgatcagtgatctttgatgttactattgtaattgttttggggtgccacaaaccatgctcagacatgaaagtgaaattaatcaataaatgttgtgtgtgttctgactgttcccccatctccttcaccttgggcctcttcattccctgagacacaacaatattgaaattagatcaattaataaccctacaatggcctctaagtgttcaagtgaaaggaggaaccacacatctctcactttaaatcaaaagctagaaatggttaggcttagtgaggaaggtatgttaaaagctgtgataggctgaaagctaggccacttgctccaaacatttagccaagttgtgaatgcaaagtaaaagttcttgaaggaaattaaaagtgctactccaggctgggcgtggtggctcacacctgtaatcccagcactttgggaggccgaggcaggaggatcacttgagaccaggggttcaagaccgtctctataaaaaatttttttaagttagcctgatgtggtggtacgcacctgtagtcttagctacttgggaggctgaggtgggaggatcacttgaacccagaagtttgaggtgcttctccagtaaacacatgaatgataaagaaagcaagacaggattattgctgatataggaaaatttaagtggtctggatagacgatcaaaccagctaccacattcccttaagccaaagcctaattcataggcaggtcttaaatctctccaattctatgatggctgagagaggtgaggaagctacagaagaaaagacggaagctagtggaggttggttcatgaagtttaagtacagaagccatctccataacaaaaaaatgcaaggtgaagcaaaagtgctgatggagaagctgcagcaagttgtccagaagatctagctaagatcattgatagatgtgactatgttcaacaagagatgctcaatgtaaatgaaacagcctcttactggaagaagatgccatctagcactttcctacctagagagaagtcaatgcctggctttaaaaaacaggctggctcttgttaggggccaatgcagctagtgactttaagttgaggccagtgctcaatgaccattctgaaaatcctggggtccttaagaattatggcagatctcctctgcctgtgctctataaatggaacaacagtgccatgacagcacatctgtttgcagttatggtttactgaattttttaagcccactgttgatacctaccgcttaaagattcctttcataatattactgctcattgacaatgcatttgttcactcaagagctctgatggagaggtacaaggagattaatgatttcatgcctgctaacacaaaatcagttctgcagcctatggatcaatgagtaattttgacttttaagtcttattatttaagaaatacatctcgtaaggctagagctgccatagatagtgattcctctcatggatctggacaaagtaaattgaaaaccttctggaaaggtttatagaaaccttctggaaaggtttaccattatagatgccattaggaacattcatgattcatgggaggaggtcaaaatattaacattaacaggagtttggaagaagttgattctaaactccatggatgactttgaggggttcactacttcagtggaggaagtaactacatatgtggtggaattctacctagaagtagaagtagaattaaaagtggagcctgaagatgtgactgaattgctgcaatctcatgataaaacttgaatggatgaggacttgcttcttatgagtgaacaaagaaagtcctttcttaaaatggaatctgccgggtgcagtggctcacgcctgtaatcccagcattttgggtggccgaggtgggtggatcacgaggtcaggagatcgagaccatcctggctaacacagtgaaaccccgtctctactaaaaacagaaaaattagccaggcatggtggcgggcacctgtagtcccagctactcgggaggctgaggcaggagaatggcgtgaacctgggaggtggagcttgcagtgacccgagatctcgccactgcattccagcctgggcgacagagcgagactccgttacaaaaaaaaaaaaaaaaaaaaaaaaaaaaactcctggtgcagatgctgtgaacattgttgaaatgacaacaaaggatttagaatattacataaacttagttgataaagcagaggcagagtttaagaggactgacttcaattttttttttttttgtagagactggggtctccctatgttgcccaggctggtcttgaactcctaggctcaagcaatcctcctacctcagcctcccaaagtgttgggattacaggcacaagccatcacgcccagcctacattgtttttttaaagacataatgctattgcatgcttagtagactacagtatattgtaaacataactttttttttttttttggagataggatctcactctgttgctcagtctggagtgcagtggcatgaacatatgtagctcacttcagcctccaactccctgggctcaagtgattctcccacttcagcttcccaagcagctgtaactataagcataacttgtatgcaccaggaaacaaaaaatttatgtgactcgttttagtgcgatatttgctttattgttgaggtctagaatcaaacccacaatatctccgaggtatgcctgtaatatatagctgctgctgctgatagtgggaagacagtcctaagccccatgatcacaatacagtgtaaggaatgcttttatacgttctgtataggatgcagtaggaataaagaagaagggcttggggccgggcgtggtggctcacgtctgtaatcccagtactttgggaggccgaggtgggcggatcacttgcggccaggagttcgagaccagcctggccaacacggcgaaacctaatctctactaaaaatacaaaaaattagctgggtgtggtggtgcgcgcctgtagtcccagctacttgggaggctgaggcaggagaatcgcttgaacccaggaggtggaggttgcagtgagccgagattgcaccaccgcactccagcctggcgacagagcgagactccatctcaaaaaaaaaaaaaaaaaaaaaaaggaagggcctacacccctattttgttttaaacactgtggaagaacagcagcttttgcaatgatttctgggagaaaggagtgtaaggttgaactccggaagggagaccagcttgcatctgctgggcggtcacctcaggcattaaaacaggcacctccaaaaaaacccttacaaggaacaggaagtgtttcaggtgtttcagcaattttaggtgttctgaaagtttttcagtgtttctggaagtgaagctacccattgcaacacctgttcaggtgtcagatttctgcaaccagagccaaaattaagtgtcccccagatacccatcactggcacaccatccaggctccagtcaagcggcagggaagcaagagctagtggtcgctggggacagtgacttccaaaggtgtggcctccccccatcagggcacctggtgccctttcatagctctgcctccacctctgcctttaggatcccaaccagctgattcgtgccagtgccctccgtgtcctctctagcatccgtgtgcccatcatagtgcccatcatgatgctagctatcaaggaagccgcctcggacatgtcaccctatgtgcggaaaacagctgcccacgccatccctaaactctacaggtatgccccagccctgtcccacgctccccaggaggctggttcctaagttctcaacccacccctggcctttcctaagtcttgcctgctgcttctcagagggtttgaggagggtagtttgggggactgacagagatggaggagaacaataaggctggggtgcaggaggtgagcatggcttggacagatattgggaaggctggggctgagagtggcaaattcccctcaccgatttctccctcagtttggactctgaccagaaggatcagctgatagaagtcattgagaagcttctggctgacaagaccacggtgcgtgtataggggcgctccgggaggggtggtgaccggcagccggccttccacccttcgcgttcaccctctcgtctttgttctttccccagctggtggcgggcagtgtggtgatggcctttgaggaggtctgcccggagcgcatcgacctgattcacaaaaactaccggaaactctgtaacctgctgatcgacgtggaggagtggggccaggtggtcatcatcagcatgctcacccgctacgcccgcacgcagttcctgagccccacccagaacgtaagtgggcccagcccaggcagagcgggccgaagtgtgtcccggggaggcgcccacagacccgtcggtctccccgtccaggaatccctactagaggagaacgcggaaaaagccttctacggctcagaggaggacgaggccaagggcgcggggtctgaggagacggccgccgcggccgccccctcccgaaagccctatgtcatggaccccgaccaccggctgctgctgcgcaacaccaaacccctgctgcagagccgcagcgccgcggtggtgatggcggtggcgcagctctacttccacctggcgcccaaggcggaagtgggcgtcatcgccaaggcgctggtgcgcctgctgcgcagccacaggtgcgctccgcccccagccccgccccctccctcgcctcctgccccgccccacgggctgcccggctccgccccctcacgcccaccagccgcttccacctctgcccacccgctccacactgaccgtagtcctgccctccgcactggtcctctccccgcaacgacttgccccaccttttcccctcatccgctgacccttgccccaaccgaggggcccggggtgctctgacccgtcctctccgcagtgaggtgcagtacgttgtgctccagaacgtggccaccatgtccatcaagcgccgggtgagcctgcgacggcgggctgtcctcgctgtccgagggccgcttctgcgggcactggaggcgttgtcggggctgggaccggggccggggaaagggaagatggaggaataccctggctgtgcagaggatggggcaggggaggctccaaatacagatagggagcagggcctggatcctgaggggccgctgaggggatgtccagtggaaaaagagctagtcagatctgagatggacgagggaagacttgaggagtggagggcagtggtgaggaggcaaggatcctgggcgctgggtcaggataggaggggtgtctctgggcagcgaggcaggcctggggcttcggtggagctccctagctgcctctcttgtgccagggtatgtttgagccctacctgaagagcttctacatcaggtccaccgaccccacccagattaagatcctgaaggtgagtgagggacagaagtgcatgtgcttcccagccctccccaccccatgtacccactcaaataactcacagtggcccccctggtgcctgcctattcctggggctgagcccaggagcccatgactgccccagctggagctgtttgttcagggagctgggctaaggagggtcagggggagaagggaactgctctttgcctagtacctggtatacacctgctactcttcataaatgaagtaacctgatatcacctcataataatcccaggatgtgtacattatattccttttataaaaatatagactctggccaggcacagtggctcacgcctaatcccagcactttgggaggccgagacaggcagatcgcctgaggtcaggagttcaagaccagcctggccaacatagcaaaacctcgtctcaacgaaaaatacaaaaattagccaggcgtggtggcaggtgcctgtaatcccagctactcgagaggctgaggctagagaattgcctgaacctgggagacagaggttgcagtgagctgagattgtgccattgcactccagcctgggtgacaagagcgaaactccatctcaatctaagaaaaagaaaaaaagactctgggaggtaactgccccaggtcacataattctgctgactccaaggttcacacttttctctcccacccacagtgttatggcccccacacacctgccccctcaggctctcctgcaaacattcacggacaaggaaagtggcgggagcccatacctccatttgattcctgctctgctgcctcattattgagtgatttccttcagcaacagttaatcttcctaacccttgtgaacatccactatgttctaggggtacatgatgagcaaactaatcagggaccctgcctttgtggagcttacagatgtggggaggaggagacattaagcagttaatcacaaggcaaatgtaaaagtccacttacaaaatatggaagaaagtgtggagagctataagggcataaaatagggagacctcatctagtctggtgccagggaagttttcccggaggatatgagacttgagctgaagcctgagagatgaacatgaattatgcagggacagaaatgggaagaactgctccacgcagaggaaacagcatctgcgaagaccctgggttaggaagtggagtgggattggggcctggaagacaagggggacagtgatgggagatgggaggtagacagcaagcagatcattcagggacttacagaccatggtgaatacgatggtctccatcctgaaagcaataggaagctttaagttttcaatgcagtagggaggtgacatggtcatactgtaagcatactgtgtagggaatccacttaagaggcaaactggtcctcttgctttttagacaagtttcataacctgtcaattccctcatcagtgtgaggatgatgcagggctgtcatgaggattgttttctggtctatgaagtgtatttggaatgaaagcacagaaagtccactggccaacccacccattttctgcctctccaaccctccctgcagctggaagtgctgaccaacctggccaatgagaccaacattcctactgtcctacgggaattccaggtacaggccagctcccagccagaagggcctgggagaggggcccatcagatccttgtgccctggtgggtaaacctcctcttatgagcccaaggctggagaaactattatcttacattcccgttccaatgtgtttggctggctttgggccaaggaatcactggattgggggtggagttgtcaccccctttcccaagtcttagtcaccggcatgataagccataaaatgaaaggccacagccttcttgaaggtcaccctcaagcctgcagagtcactgagggatttctttgtcatatcccacagacctatattcgcagcatggacaaggactttgtggcagccacaatccaggccattggacgctgtgcaactaacatcggccgagtccgtgacacctgcctcaatggcctggtgcagctgctgtccaaccgtgatggtcagtgtttccctgagtgtctaaccgtgatgatcagagggtgtctgcctgcaggtctgactctgctggccactggatatccaccagtctgcctagacacaatgtgtatccattggtctgtctgtcttgatcagggcccaagtgttcctacacctctgagggctgctagagaactgaagggggttgagagaaagagccaagggcctggggcactgcaggtgtgtctgtccacctgagtgtggccatctgactgtcttggggtccacacactcatttttgttctgtagagcttgtggttgcagagtcagtggtcgtcattaagaaattgctacagatgcagccagcacaacatggagagatcatcaaacacttggcaaagcttacagacaacatccaggtgagggagaagccatattttcactccccacttcaaggtcctccccatgatttcaagactgtataattacatatgctagccttatcaaaagtaacttccaaaccttaggtcttcaggtggaaggagcagagacactggaccatgtgaccctgaccttgttacccctgatttgctttccctttggagaccctcaatgagcacgatggactttactactactcttgttttctctctaaagctctagccaaccatggttgagtgacaaatcttgtgtttttctatcgcactgctaagctgaaacatctaaacaaggcattcccaaagattctggagagtaacatggaaataaagtactgagggtacaatgaatccagaaaatcaatcttttacatcatgactgacttagggtcttgaaagctctatgctaatgaagccctagggaagaggggaaatgctgtctaggaaatgtctaccttttaacctctctctatctcaccacccccaactcccatttccagagaacccataatacaacaggccagcacagatgaggagtgctgtttccctggaagtccacaatcctacccacccactttcccgtatttacccatcttcactcctctcccacaaccacaggtgcccatggcccgagccagcatcctgtggctcatcggagagtactgtgagcatgtccccaggattgcacctgatgtcttaagaaaaatggccaagtcattcacagcagaggaggatattgtcaagctgcaggtcatcaacctggcagccaagctctacctgaccaactctaaacaggtaaagattaagagatgaccccccagatactctggtccccagaaactccctagacagtattcttttggccctccctaggcagggctgaactctagctcctattttggaaaagaagaatcagggaaggtggctggtctgcccacataaccaatgctaccccagtgcccacaaagaccttgtagtgctggtggtcactgttgaagagactctcctatgaagctgtgacctccagtctgctagtacaagagtcctgtctgccaccttggaactctggggctgtgaagaaccacagttgattgggataagggaagggcccaacagtggcaggtactgatgggagaacatgcatcccagatgtggtctgtgcttctttccaaagcttgacaatgcttggccagtctgtgccaaagataagggggtgagtctctgcttgggcttgggtggtgctggtggccactgtcattcccaaggtgaaaggttataagagatacacagccaaggatgaggctcaactaagttgtagtatcagggtgttcagagcctcctagctgtctggcatctcctgagatggttccaggagattctcctaaaatgaagcataatgtgctgagcttttcaaggtgtcagggacatcaaacaccatgacgatttccacactctcccactcagttaagcaggacagggattggcaaactactgcccataggctgaatttggcctattcctgtttttgtaataaagttttgttggaacacagccctgctcattcatttacaaattacctatggctgcttttgtgctacaacagcagggttaactagttgcaacagactgtattgcccacaaagcctagaatagttattctctggcccttttataaaaagactctgccaatccttgaagcaaaacctctggctaggtggctggggtctacagatttatagcagggatatcccctggagactgtagcatccctgccatgtccactgtgcgtgggagtctttggatggtggcacttatctttttcagtggcttctttgatccattgtggccagagtgagccccagaggctcaaggtgaggtaggcagggccaccaagtgctgtgactgtaatcaggagtcaaaggacagcagcaacatgtggaggcaactgagtctgtataattaaatatgctagccttatcaaaagtaacttccaaaccttaggtcttcaggtggaaggaggagagacactggaccatgtgaccctgagcttgttatcagtgttgtgggcaaagcagattggagagagagaagttagagggggagagagagaagttagagggagaaagagcaccatggggaagcgttcaatcgttgaaaaaatatttgtatacttcctttgttcaggtgggaggaaggagcaagtgggaggaatgtttgaaaagatgaagcagcctgggtggggagccacccaggtaggtgggagtcttgacatgctcagcaatgagccagagtcctaaaccccaggatggtgaggttggcatgttttcataagcctgggcctgtccacatgtcatttcccccaagttgtcactgtgagctacatgtgcatttgttcatttatttaacatatatgtaggtgggagtctgacatgctcagcactgagccagagtcctaaaccccaggatggtgaggttggcatgttttcataagcctgggcctgtccacatgtcatttcccccaagttgttactgtgagctacatgtgcatttgttcatttatttaacatgtaggcctactatttgcctggtactgtgctgcgtcctgaggatatgacaatgagtgagacacatttacaggtctccagatactcacagccaagtaggagaaacaggacaaaaataaacattttaaacacagcagtaacagctgtcatcagggttggcacagcgagctgtgggtatatacagctgaaccctcccctaggaatgacccctgtcagggaacccagagtaggctgttcaggcaaatggacactcacctccagggcgcccttcacctgcaagtgagtttttgcaggccccttagaatggttatttgattcaataaagatttttgtcctccctttctttctcctttcttcccagcctcttctgggagtggtaaagaagggggagtccttggggtactaggagggaggtggtttggatgcgcacatgaccatgcttgcaaaacagtagtgatgcttcccatcctgggaccatgagtggcaatctgcccagctaaaaggccacagtaatctcagtcattctctccaatttggacatgggcccacggcatgccagatcctggcccaggatgaggccaaggaaatgaccaagatgaggcctctgccctgctattgatcagcagataatcagatactagaccagaggccacaaaggcataacatgcaggtggcgggggatgggggggttggtaatcaaagtggctattacatccacctggatatagaccctggggaaactgcctagcaggttagtttgcttttatgtgtcaggtgagatgtgtggcaggagggtctgccaggggcacagtgggatctacaaccctcccatgtgaccgcctttacagtgaatagaagattctgacaaattttgcagaattgcttttaaaaacgtaaactttttttaatatgctaaaggtaatacatgcttatcatagaacatttggaaaactcagaaaattataagtttaaactattaataagtccaccatttagaagaccaccattaattatatatttccttattttttattcctatatatagtcattcagaagttgtacttttgtctattgtccaatattttaaacttttctgcttcttttcaatgctttcatatttaatacttttttttccccattcacatttcaattaaacttttcacttagaattttctccaggctgggttcagtggctcacacctgtaatcccagcactttgggagcccaaggtgggtgggtcatttgaggtcatgaattcaagaccagcctgaccaacatggcaaaaccctgtctctactaaaagtacaaaaaaattagctgggtgtggtggtgcgctgaaatctcagctacttgggaggctgtggcaggagaattgcttgaacccaggaggtggaggttacagtgagctgagatggtaccaccacactccagcctgggccacagagcaagatccatctcaaaaataaataaaaattaaaaagaatttcctccaaatttttttctactttcacatttttaaatcaattgtattagttttctgctacataataaattactataaatttggtggcttcaaacaacacacgtttattttctcagtgtctatgggtcgagaattcaggtatggcttagttggatcttatgcaaggctacaactgaggtgtcagccaaggctgagtttttatctggaggctgtactggggaaaggtccacttccaagtcacatggtgccacgatccacttccttgcagttgtaggattgtggccctggcttcttgctggctgtcagctgggggctgcccttgccttctagaggccgtccttagctcattgccataggggcctcccaacacggatgcttaatttctccaaagccacaagggagaaagtctctagagccagtctgctagcaagaccgtcttctttttattttttaatttttatgggtacatagtaggtgtatatatttatggggtatgtgagatattttgatacaggcatataatgcataacaatcacatcagggaatggggtatccatcctctcaagcatttatcttttgtgttacaaacaatcaaattacactctcttagttatttataaatgtataataaattattgttgactgtagtcaccctgttgtgctgtcaaatactagatcttacacattctatctaactataattttgtacccattaactatccccacttcccccacccactacccttctcagcctctggtaaccattattctactctccaactccatgagctcaattcttttaatttttagccctcacaaataagtgagaacatgtgaagtttgtttttctgtgcttggcttatttcacttaaaataatgacctctagttctatccatgttgttgcaaatgacaggatctcattcttttttattctttttttatagtactgcattgtgcatatgtaccgtattttctttatctatttgtctgttgatagacacttaagttgctttcaaatcttggctatggtgaacagtgctgcaataaacgtaggtgtgcagatataacttcaatatgttgatttccttacttttgggtatatacatagcattgggattgctggatcatatggtagcactatttttagtttttgtttgtttgtttgagatggagtcttgcactgtcacccaggctggagtgcaatggcatgatctcagctcactgcaacctccgcctcccaggttcaaacgattctcctgcctcagcctcctgagtagctgggattacaggcgcccgccaccaagtctggctaattttcatatttttagtagagatggggtttcaccatgttggccaggctggtcttgaactcctggccgcaagtgatctgcccgactcggcctcccaaagtgctgggattacaggcgtgagccactgcacctggcctatttgtagtgtttttttttgagatggtgtttcactcttttttcccaggctggagtgcaatggcgtgatcttgcctcactgcaacctctgcctcctgggtgcaagtgattcttcttctgcctcagcctcccaagtagctgagattacaggtgcctgccaccacgcctagctaattttttgtatttttagtagagacagggtttcaccatgttggccaggatggtcttgatctcttgacctcgcgatccacccacctcggcctcccaaagtgctgggattacaggtgtgagccaccgtgcccggcctatgtttagttttttaaggaacctccaaactgttctccagacatttccactaacagtgtacaagggttgccttttctccatgttcttgtcagcatttgttattgcctatcttttggatataagcctacttggggtgagatgatatatctttttttgttttgttttgttttttgagacggagtcttgctctgtcacccaggctggagtgtgcagtggtgcgatcttggctcactgcaacctctgcctctgtggttcaagtgattctcctgcctcagcctcctgagtagctgggactacaggcgtgcgtcaccacgccccgttaatttctgtacttttagtaaagatggggtttcgctgtgttggtcaggctggtctcaactcctgatctcaggtgatccgcctgcctcagcctcccaaagtactgggattacaggcatgagccacccgtgcctggcctttcattgtagttttgatttgcatttctctgatgctcaatgatgttgatcaccttttcatatacgtgtttgctatctgtatgtcttcttttgagaaatgtctattcagctcttttgcccatttttaaattggattattgaatttttttttcctattgagttatttgatctccttacgtattctggttattaatcccttgtcagatgggtagtttgcaaattttttcctcctattctgtggcttgtctctttgttgattcctttgctgtgcagaacctttgtaacttgatgtgatcccatttgtctacttttgctttggttgcccgtgcttgtggggtatcactcaagaaatctttgcccagtacaatgtcctggagaatttctctaatgttttcttttattagtttcatagtttgaagtgttagatttaagtttttaatccactatgatttgatttttgcatatggtgagagataggggtctggttttattgttctgcatgtggatatcccgttttcccagcgccatttattgaagagactctcctttccctaatgtatgttcttgatacctttgtcaaaaatgaattcacggccaggcgtggtggctcatgcctgtaatcccagcatcttgggaggccgaggctggtggatcacctgaagtcaggagttcaagagcagcctggccagcatggcgaaaccctgtctctactaaaaatacaaaaattagctgagcgtggtggcgggtgcctgtaatcccagctacttgggaggctgaggcaggagaattgcttgaacccgggaggcggaggttgcagtgagccaagatcgcgccactgcactccagcctaggggacaagagcgagacttcatcttcgtccccccccgccaaaaaaaaaaaagccactgatttttttttttttttttttttttggagacggagttttgctcttgttgcccaggctggagtgcaatgggtttttttttttttttttttttgagatggagttctcactctgttgcccaggctctggactgcagtgacgcgatctccactcaccacaacctctgcctcccgggttcaagcaattctcctgcctcagcctcccgagtagctgggattacaggcatgcaccaccatgcccagctaattttgtatttttagtagagacagggtttctccatgttggtcagactggtctcgaactcctgacctcaggtattctgcctgcctcggcctcccaaagtgcttgctaggattacaggtgtgagccactgtgcctggacaatgctactgattttttttttttttgaaacggagtcttgctctgtcaccaggctggagtgcagtggcgccatcttggctcactgcaaccttcacctcccgggttcaagcggttctcctgcctcagcctcctgagtagctcggactacaggtgtgcatcaccacatccagctaatttttgtatttttagtagagacaggatttcatcatgttggccacgatggtctcaatctcttgatctcacgatctgcctgcctcggcctcccaaagtgctgggattacaggcatcagccaccgcacctggccaatgctactgatttttatgtggattttgtatcctgcgactttactgaatttattagttctaatagttttttggtggaatccttaagattttttaaatataagatcatatcatctgcaaacaaggataatttgaattcttttccaatttggataccctttatttctttctcctgtctgattgctctagatagaacttccaatacagagtcttcttaataaaacataatcataggatcatatatagtcatataccacctttgccatatcctgttggttagaagcaagtctcaggttttgcccatacccaaggtgagggattgcacaaaggcatgaacaccaggaggcagctactggtggggaagaccttagaatctgtctgccacatccatctagagcttaaacttactcatgtgtaatgtgtgaattgaggatatatttcaattttttttaacagccagttttctaagcatgattagcaggcatctgcaaggtagcatgtatgttggcataggttatggaaaggaagtcagtgtttcctgcttaaaattcctctctgacaactggagcctgttggtgagggggagccttgttctgttcttggcacactggagtgtatctcagaggccttcttgaacagcctgtaattcctgcacatcctggctagatgaggtgggggtcttggtggtgcacacaggatgccacaatccacagggaatggccccttggggtggagaagggtaatgaattattataggcaaatcctgcagtgttgaggtggtgggccagccccttcctgtgttggttgttaacatgcagttaaggctgtggacagatggatccaaataccaaacagttctttctagaactaggcaaggacttgaaggagggagtctgtgatcagccagctgggaaatctgtggaggaagacattgtccaaaccaaaagagggatcagcagcctcttgataattgactatgttggtaagggcatccactagccctggccatttagatggtgtctggccaagagaggggcaggttggtgatgaaatctgttgtgatggcatcttattttcatatttttaagtctattctattagcggtgcatgggattgggattgcttatctgtgactataacagtatcgcaggtgctgctttgctggaagggactgagctgaagagggcctgtgggccagattggaggtaggaatgtggaatcatagtggctctctagagtggtgtggggcaattctgccaaagcagctgctcagactctgggtcagcatctgaggggctttgccccttatggacatctgcttgatgtccctgccagattagctgggttaaccatgtccaaggctacacgtaacagtatgtcaccataaacctcaggaagaacagagtcagttccaggctccctcctgccggcccctgatgcccttgggcattctgcttgttgaccacttggtggttttgatcttggtcacaagtgatggaaacatggagacctgggccagggcaggctccttatgtcagcaggtaggcagtgaagggaagcagatggggtgcagctccagcagatgcaggcctaggtgcagtactgatgggctccttggcctgggaaaagccccttaatgatcctgcttcttttctgtaaaatgggggcaataatgcctacttctcagaaggcttggggagattagatgagctagtgtggagcacctagcacagagttggtgccagaaggcacttgataagtgatggctgctaccgctgttgccatgttaaggcaggttagattaggccaagatcatggcagaaatggagatattttaggtctgcagttgtagcttccctgactgcagactgtgaaccctacatgaccttggcaaatgcatgggcagctgcagtttgccctgatgtcattagaagcttccagggaaggataaagacctctgagacccctgggctgctcagaatctactaaatgggtggatagggcatgagggtggcccctgccaaagggacccctgtttatctgccctgtctttttgttgtctaattccccctgggtggtggagcctggaaactgtgaggtccagcagagcattccatacttccacataccctgctgccctagagtaaagaggctggacaggcctggagtggtagggaccacaaatctagggaagaatggagtccagagccaggagtggggaaagtccaaaaggaaaacctcttttgttggcccaaggcagttgtcaaagttgggatcatcaggaggcatgtccagagagatgagagaaaattctgagcccagaacaagggcaggtggggagggacagctgggtggaagcgccggtcctaagcagggagaggagacgttctgcctgaaagtgtcggcttaaagaatctgtttctgagcctcctgtgtccccatccccccgtcagctgacccacctcttcctgttcctccagaccaagctgctgacccagtatgtgctgagtctggccaaatatgaccagaactatgatattcgcgaccgggcgcgcttcacccggcagctcatcgtcccttccgagcagggtggggccctcagccgccatgccaagaagctcttcctggcacccaaaccagctccagtcttggagtcatccttcaaaggtgggagctgaaatcaagggtaaccttcctaggggaatggaaaggaactggccagagtctctgccccagaccttcctgaggcccctagccaggcaccaggcttctgtggacagtcctgctccctggctcactccttttgtccctcctgtggcaccaggaattactctttcaccctcccataaccactgccagcatcatctcacctgagggtctgccttcctggccaggatggacttgtgcctcctctcctctcaggctcccttttccatctccctccctgagcagacactaggctttggaatacataccaagatcttaaataccaaggacccaggaaggcagaaagcaaaacaacacacaaaggagaggtgtatatttttataaaggtcctgagaaagcagttgcctgcattctgtgagcttagtcactacagtcagtccaaatcccaggccccagggcttcagccttgcctctgttcctgggcttggcccttaaggcctcttttcccaagacaacggccttgagatgggcctgggagggaagggtcctcccgctgcttctccgggccccaggagtggaagccaggaacctacacagaagagagcctccttcacaaagctcagttcttctgggtatcttttcgttctttttctcttccctggacctcacgaatggggagattctgagggtgggcacagctttgaaattctcccaggaagaaggcaacagtccctttctccccgacaccatcctcactcacaggcctgtgctgccctcctccagcagtgcctcaactctgatccagacttctacacactcatgctctgactgttcatccctccctgctgagtccagagcctgactagacgtgcatgctgagcagacaggtcggcagcatctgtgggcccagagtctcctcctgcccacctctgtaggctgcctttccctggccctcagtccctgctctggcctggccagacagccttttcttccagcatgtgggcctaaaggtgcagtcagggtggaagagccattagggcacacatccatctccttcccctacccacctgggaagtcccaaccagaatcaccacccagccccacctggaaaacagctcccagagctttccctcactgctgctacctgcctgacctctaaacctatccctagaccgggaccacttccagctgggctcactgtcccacctgcttaatgccaaggccacaggctaccaggagctcccagactggccggaggaagccccagacccatctgtgcgcaacgtggaggtcagcggggtggagggttgaagtgtgtgtgtgtgtgtgtgtgtgtgtgtgtgtgtgtgtgtgtgtgtgtgtgtgtgtgttggtgggggcagacagtagggagccctggcagtgccggcccagccctcctaacaccctcccccacacacacaggaagaagatctctcccttattgagactcacgtgggcctgttgggcgaatacactgaggtcccaccttcgtgtgacgtgtgctctctcccctgccctgtctgtgtccctcttcttcccctgtgtgttgtgctcctgggccttcccatactctgtttccaccttggtttggcagtgctcctctgtgagcagcattccctcccctccatggacagtgcccctttcttcctcctctgttattccctttgtgggacagaccaggtagggcctcacaaagaggtggaataaagggtaagggcttgtgcctgcctgccttctccccaaccatgatgaaatgaccctgcaccctacccccatctccaggtacctgaatggaccaagtgctcaaatcgggagaagagaaaggagaaggaaaaacccttctactcggactctgagggggagtcaggccccacggagtccgcagacagtggtgagcagatggcagagctggggtcctctgtgctctgcccatgcatctgtgtgactgactatatgaggggtatatgtatatggttgtgtgtctaggggtgtgcacctgcttgtgaattgtttgtgcacctgagggattcatgttccaggtgtgtgtgcttgtgcaggtttctatccatggagtccatctgtgtttctgtcagttccagctggcatgtagggctgggggcaggtcagagaggtttgagggttcagtactgaatgtgaaggtggaacccaggtgtctgctccagacccaaggaggcctgcatatgagggaggaggcctcatattgttcctccacagaccctgagtctgagagtgaatcggacagtaagagcagcagtgagagcggctctggggagtccagcagtgagtccgacaatgaagaccaggatgaggatgaggagaaagggagaggcagtgagaggtgagaagggagctagccagatggctggtggggttcagggggctttcctggaaagagggctagcattgagctttagccagtctcctaagagcccctgagcccctcgtgagctgggtggggctgtcagctcacatgacgcctactttcgctggctgcaggagatctctgaggcctcatgggctggtgtggagaagcaaccagagtcctagagcctgagctggcacaagctggcttcaagctctcacggggtccctgctataggacctcaggtgtgaaccctcctggctcaggctccccacaccactccagcttttcagcatttctcctgcttctgtgaagcaaggagggagtgtccaggccaggcctgagccaacctttcccactccttcagtgaacagagtgaggaggatggtaagaggaagacaaagaagaaggtgccagagagaaaaggagaagcgtcatcctctgatgagggcagcgattccagcagtagctcatcagagtccgagatgacatcggagtccgaggaggagcagttagaacctgcctcctggagcaggaaaacagtgagagccttggggcagagtcagggtgtgctcatgggccagggccctccccaacctctgggccaggcccagacatctatctccctaccatccagaacagaacatgacatcttctacccaacccagaacatgccaaggtgctccccttccccacacccacatcccatttttctctttcagcctcccagcagcaaaagtgctcctgcaaccaaggagatctccctgcttgatctagaggattgtgagtttgggtggtaaaagtcacaggggaaaggaggcctggggagcatgaattagaacagcccatagggactctggatcgggttcctcaggtcttgtgggagcaggggagcagacagaacatatcttcaggcctgagagggcagcagggctgacctccccaggtctggggttgaggtctaggaatgggtattttgcgagagcctccaggcagccatgtgccccgctgtccatggtgctgaaatgcgtgctccttgatccctaggctccctgctcaacccaagccacctccactttgcctcctcatagtcttatctactcccacagtcacccctcccagtgtccagcctgtgtctcccccagcaattgtgtctaccagtctggctgctgacctggagggcctgacactcacagactccaccctggtaccgtcggtgagtgggatggaggaggggaccgggctggggcagggacacatccctgtgctgcatcctatggtgtggatgtgtgtggggggtgggtgtgatggaggatgtgatagctttgagtcccagctgctggatggccctaggggacaatgctgggacaggctctctccatcttgctcagttctgtccttccctacccctccactctagcttctgagtccagtatcgggtgttgggcggcaggagctgctgcaccgggtagctggcgaggggctggctgtggactacaccttcagccgccaacctttctccggggatccccacatggtgtccgtgcacatccacttctccaacagctctgatacccccatcaagggcctgcatgtgggcactcccaaactgcctgctggcatcagcatccaagaatttcccgaaattggtgcgaagggctttggatggggtggaggaggaggctcctgggcagagtcagtctttctgtggttgctgataccctccttgtgccaggccaggggccaagctataggggcacagagatagcatctaacatgatcaacactctggtggacaagacagatgatgaaataagcaagttcacatcagggcgggaggtgcttgcagcagcagatttgggccttggttgtttcaggactaacttaaatgtggtgagggtgagtgggggaaagggtgcttagagttcaggaggaaaccgggaacagtctccagcagccaagaaagccaagattctgtagagggctggtcagctgtgacagtggagaggagagtagggctaggctgggttctagacctatcaggtgatggtggccctccctctccccttcactgccttataccacttcagagtccctggcacctggagaatctgccactgctgtaatgggcattaatttctgtgactcaacccaggcagccaacttccagctgtggtatgtgcccaactcgaggtgggggtgagaggatgggctggaaagggacagggtaacaatgaactggaaatggaggtggtgcttagtggggatacatcatgattgggtgggtctggaagccatctcaggccctcattcctgacctcactctttcactgcctccaagctgtgcctctacacagggtgggaagtgaggggagagatgacagccttaattcttctccgtttcctcccacccctcccagcacccagacccgacagttctacgtctccattcagccacctgttggggagctgatggcccctgtgttcatgagtgaaaatgagtttaagaaggaacagggtgagtgctccctgggagtgggcagagagggaagtatagaagctgactccagaatgtccagcttggatggtagggagaatggtggtgtccttcatctagaccaggggtcagcaaactttctgtaacgggccaaagataaatgttttaggctttgagaatcatgtggtctctgttgcagttacaacacgactgtggctgttgaaacatagaaacatccacagacagtatgtaaatgaacgagtatggctgtgttccaagaaatttccatttatatttatagatactgaagtttaaatttcatgtaattttcatgtgtcatgaaatattaatcttttgattgctcccccaacacttaaaaaatattaaaaacattgtgggccatataggtggtgggctggatttggtctggaggctgtaatttgcaaaacctctggcctagaagaaagaagagtggcttgggcaagggaggagggaagatcatggttagttttggataagctgattttgaaatgcatttgggaaattcaggaggagctatttagtatgcaactgaaaatatgggtctatgcccaggaaacactttgaagctggagtcatgaacatagaggtggtaatggaagctgtgaatatgaatgagatcactctgggaggtgggagaaaataggaaggccaaggacagaaccttgggggaaaacctgaattctgcagaagaaagaggaggggagggataagagaaggagcacagggagaggtgggaggagaaccaggagagacaacaaggcagaaggtgtctgcaaaccacagttacctaagaccttcagagtcagcatataaaaggctactgccaacctgagggagagagggtcattgctaaaggagggacagaggccaactgcagtgggttgagggagaccacggctcaagtacatgcagtcctctttggaggactttagccatgaatgaggagggagacagggcattggcacgatgaaggatctcacttctggaaaggattttttggagacggggacacttgaacatgaacagattgaaggaacaaaaacaagaaaatgttattagtcatgaatgaaggggatagaagaaacaggagagggatgtcagtttctaaaaggaggtgaagaataggggaagcagtggagggaggaaagaggctgaagagaagactgctggtgtgcaggagagcagacggaggagctcccatggggggcctggatcatgtgagtggagagaagtcagccttgcagaatgaggagttctgggggtgctgtgaaggtttggaggcttcaggagccctggctaggtctggagctgctactgcagaggtacaattaaaaatgtacctgtgaatgctgcatgtgactactggattctggctgagagatcacagcagccacctgtgatctttttgtgagggcttagcttccaggagctgagtgggagttgaatgtgggttggagggccccccaggaaagatcaaagggtgtgaggttcaggatgggcgaacctcttaagaactgactggccactctcaaggggctggtagcccagatgtctgatggaggaagcgccaaatcagtctttggtaacaacatggataaaggcctgggtgggaggggtagagaggctgacaaaggcttcctgagggagggcccagtctgagagggaagtaccttctccccaagactgatgatttaaattctgacctgccctttgcatgataccttcccagcctgggagaacttgttgctcagtaagcagacccaggtgctggcctctgtacccaccatggcctctgccctcatcacgacctctacccccaggaaagctgatgggcatgaatgagatcacagagaaactcatgctgccagacacctgtcggagtgaccacattgtggtgcagaaagtgactgccactgccaacctgggtcgtgttccttgtgggacatctgatgagtacaggtactaggccaccagtagaggggaaatgatgagcatgggggccctggtttgaaggaggagccccagctgctgatccccttccaaacacagtcacccttagcagctcttcctcaccccttctattcccacctcaggtttgcagggaggacactgactggtggaagcctcgttctgctgaccctggatgcccggccagctggagctgcccagctgactgtcaacagcgagaaaatggtgattggcaccatgctggtaaaggatgtgatacaggctctgacccagtgacttccaaatgctgtgacctgtttggctcccatctatacctccccatgacacctaggctgtcagtctctctcatctttctctctctctctcatcatcctcctcatgccagatagcattcagggtgtcctctctccctctggaggaccaagccctcccctaatgccctccccatggattccttagtgatctgtgcagagagagatggcagccactcccttcagtcctcccagatttctgtagctatttatgtagcaggct

SEQ ID NO: 15418 - DNA, 50248 bp, Homo sapiens
ccttcccttcctccgctccagccggcctccggccccgcaacctcctcctcggcgaagtctccctggccgccccatgtcggccgcccccgcctacagcgaagacaagggcggctccgctggccccggggagcccgagtacggccacgaccccgcgagcggcggcatcttctcctccgactacaagcggtgagggagcccgccaggaagctcgcgggagggttggggccggggaccgggcgaggcgcgcgggcaccatggacagcgcccggccccagcgccggccccgccccggccgcgccgaccggaagcccgcccggccccctcctgcggcctggagccccggcccagcgcgggcagcgctggcaccccggctccaggggccggcctaggacgcggaggggggcagataggggctggcgggggatgggccagctcagtttcgagaggagaaaccctccggttccaggtgtttctccggtttgcggcgttgcgttaggggttcccttcctttttcgtgctaggcgggttggcttcccaaaaatgtgggggaggggtctgagtcagcgaacttgagcttgagcctggggcctcttcaggaaggcgggccctggatgtacttgcacagcctcccagcttggccctgctgcaaattcatttcccctccctctggtccccatctccatctgaccctcacatccctgctcctggcattgcccctgtagttcagctccaccttcacaccctcccccacctttgattcgttcgtttgtttcttcatttgtttattcgtaaattctgcaacaagcatttatgaaaagccaactgtgtcgagtcctgaactagtcacggaatacaactgtgaacatgagacccttcttgtcctcacgatgctctagaggggagcacagatgaagaagcagtcagggacagtcgagtgtaatgggggcagtgggagcagggagaggacctagtctctggcgccggagagaaggaagacaggagcgtgaggtatgttccaggcagaggaaagggctttcaggaaggttgagagccaggccacaatctgtgtgagccactggactgaccagaaaagagggtggggaggactcctgaaggattctaagcaggcgacataatcagatttatattttagaaggacgtcaggctgctgcattgtggagaagagattggaggtgggccagattgaacaagagacaagggaggtgggtcttgaagttcacaggcctggcatgattgtggcctagaccaggggagaggcagaagatttgaggctgtggaagaggtggaagcctcagacctgatgattaattggatattgggtgggggtttagagggacagggggagaagatgaggattttcacgcacgtccatgtgaagagaccaccaaacaggctttgaacaataaagctttttaatcacttgggtgcaggccagctgagtccgaaaaaagagtcagcgaagggaaatggggtgggaccgttttacaggatttgggtaggtagtggaaaattacagtcaaagggggttgttctctggcggtggggggacacaaggtgctcagtgggggagcttttgagccaggatgagccaggagaaggaatttcacaagataatgtcatcagttaaggcaggcacaggccattttcactcttcagttacttcaggccatctggatgtatacgtgcaggtcacaggggatatcatggcttagcttgggctcagaggcctgacattcctgtcttcttttattaataagaaaaataacataaaatagtgttgaagtgttggggcagcaaacattttggcggggggtggtatggagagatactgcttctccatagccttgaagggctgcttcgagcgggattggggtggcgtgggaacctagagtgggagagattaagctgaaggcagattctgtggtaagggatgatattgtggggttgttagaagaaacatttgttgtataggattattggtgatggcctggatacggttttgtatgaattgaaaaactaaatggaataagagaaggagaaaaacaggtattaaaggactaagaattgggaggacccaggacatccaattagagagtgcccaaggaggttcagcatagccctgccagcaaagattatttatttactttaagagggagttaagactggcagtttggggatagcaccaggagatatcagctgtaatggtttggagaaacagtgtaaaccggcagtgtaaacaagagcagggcatgtatgagtagttgagtatggtgaataggagtatgactagtcagaagatagtagggatgacaagttttctggggcacagtccaagttggtctggtgtctggaatgagactggggcctaataaaaaggagcatctatacaggagcttgaatgggctgtaccctgcagcattccgaggacaggcccaaattctgagaagggcaagtggtaaaagtattgtcagtcctttttaagttggtggctgagcttggtgaggtgtgtttttaaaagaccattagtccgttctaccttttctgaagattgaggatggtaaggggtatgaaggtttcactgaataccaggagcctgagaaactgcttgggtgatttgaccagtaaaggctggtctgttattggactatatagaggcgggaaggccaaactgaggaattatgtctgacagaagggaagaaatgaccgcagtggccttctcagaccctgtgggaaaggcctctacccatccagtgaaagtatctacccagaccaagacgtattttagtttcctgactcggggcatgtgagtaaagtcaatttgccagtcctgggcagaggcaaatccccaggcttgatgtgtagggaagggagggggcctgaacaatccctgaggagtagtagaatagcagatggaacactgagaagtgatttccttgaggatagatttccacaatggaaaggaaatgagaggttctaagaggcaggctagcggcttgtaacctacatggaagaggttatgaaatgacgaaagaatagaatgggcctgtgaggctagaaggagatattttccttggtctgagaaccatttgccttgtgtgggaagagattcataggtgtaagtttcattgggggagtaggtaggagtgactgatgagaaggagaaaaactggccatgagggacagaagttggaatgctagctgcttttttagctaccttatcagcataagtgttgccctgagcgatgggatctgatgccttttgatggcccttgcagtgaatgactccagcttcctttggaagtaaagcggccttgagaagagtttttattaaagaggaattaatgatggaggacccttgtgtaatgaggaaagctttttgcccatataacagcatggaggtacaggatatggaaggcatatttagagtcagtataaatattgacacatagtccttttgcaagactgagggctcgagttaaggcaatgagttaagctttctgagaggtagtggaggggggcagaaagtatatgcgtcaggtgtgaggaagaaaatagattttggaagttatgagaactgtagagagtgagttgagcatagtttgtgattttgagggcctctgaaagtattaaagcagcggcagccgctgcacgcagacatgagggctaggccaaaacagtaaggtcaagttgttcggacagaaaggctacagggcgtggtcccagctcttgtgtaagaattccaaccgcacagccctgcactttggctgtgtgtgatgaaaaagggttgggatgaattagggagacctagtgtgagagcagcttctacggctgtttttaaggaatggaaaggagtggcaaaaggatttaggatctgtggggtcagctaggtttgcttttgtgagtttatataatggtttagtcaggatggtaaaactaggtatccaaaggtggaagtacctaaccatcccttgaaaggaaaggagttgttgctttgtagaagggattggggttcgggagattagccggacatgatcagcagggagagcacgtgtgttttcatgagaactatgccaagataggtaatggatgaggaagaaatttgggcttgactgaagtaatgggggctgtccgtgaagccttgcggcagtacagcctaggtagtttgctgagcctgatgggtgtcagggacagtccaagtgaaagcgaagagaggctgagatgaagggtgcaaatgaatagtaaagaaagcatgtttgaaatccagaagagaatgatgggttgtggaggggttgtggagggaggtattgaggaggagagtatatgagtttggcaccacggggtggataggcaaaacaatttggctgacaaggcacagatcctgaactaattgtaagacttgtctggtttttgaacaggtaaaatgggggaattgtaaggagagtttataggctttaaaaggccatgctgtaacaggcgagtgataacaggctttaatccttttaaagcctgctgggggatgggatattgacattgagcacggtaagggtgattaggttttaatgggatggtaaggggtgcatgatcagtcgccaaggagggaatagaggtgtcctatacttgaggattaaggtggggagatacaaggggaggatgtgaaggaggctttgaactgggggaaaaggtggcaatgaggtgtggctgtagcctaggaatagtcagggaagcagataatttaaagtgtctcggcctaataagggaactgcgcaggtggggataactgaaaaggagtgcataaaagagtattgtccaagttggcctcagagttggggagttttgagaggtttagaagcctggccatcaatacccacaacagttatggaggcaaaggaaacaggcctttgaaaagaaggtaatgtggagttggtagcctccgtattgattaagaaggggacggacttaccctccactgtaagagttacccaaagcatctgtgatggtccaggaagcttccaaggcgattgggcagtgtcagtcttcagctgctaagccgagaagatttgggaaggagtcagtcaggcagccttgggccagagttccaggggctctgggagtggctgccaggtgagttggacagtccgatttccagtggggttccacacagatgggacaaggcttaggaagaatcctgggctgtgggcattccttggcccagtggccagatttctggcacttgaagcaagatcctgatggagaaggtcctgtaggaatgcttgactgctgcagcttaggcattttgaagttcttgtgtactggagatgtggctggggtttctctcacagtggaggcaaggaactacaactcagaaatacattgctacttggctgcctttactctattattgtacaccttgaaggcgaggttaattaagtcctgttatggggtttgagggccggaatttaatttttggagttttatttaatgttgggagtggattgggtaataaaatgtatattgagaataagactgccttttgaccttttagggtctagggctgtaaagcgtctcagggttgctgcccaacgagccatgaactgggctgggtttttatatttgatgaaaaagagcctaaatactaactgatttggcagaggtcggataaaggaaaaggagcgttaaccttgactatgcctttagctccagccacctctttaagaggaaattgttgggcaggttggggagggctagtcgcagaacaaaactgtaagccggactgggtgtggggagaggaggtgatagaaggattatagggtggaggagcagaagctgagaaagaattggagtctgattcagcctggtggggagtgacctgaggagcattctggggattaggtgagaggtcagatgggtcggtagaaaaggaagattggaagattgaaaagacgcagcgacgcttggggttgggactgaggggacaggcgggagggaaagaaggaggatttgggatgagtcgcattgggaacagagactagggagggaccgatgtgtaaaagaatgcctggacatcaggcacctcagactgtttgcccattttacaacaagaattatctagatcttgtaggatggaaaaatcgaaagtgccgttttctggctatttggaaccattgttgagtttgtattggggttaagcggcattgcaaagaaaataaggcatttaggttttaggtcaggtgtgagttgaagaggttttaagttcttgagaacacaggctaagagagaagaaggaggaatggagggtggaatgttgcccacagtgaaggaggcaagcccagagaaaagagagggtagagacacggagagaaggggtggggggtgctttgccccccaggaaagtggagagaaaagagagggtagagacacagagagaaggagtcgggggtgcttgtcccccaggaacgtggagagaaaagagagggtagaaacatggagagaaggggtggggggtacttgccccccaaaaagtggtgtttgccactaagggtgaaagatcaaggcaggcatcctcgcggtgatcagacaactctgaaacgtgggtgaataatcaagcaggcgtccccgcagtgattaaacaccaagggaagactgtcttcctgagtccgtgatcggcgccggagttttgggttcacagataaaatgcatttcctgtctctaccagaaaaggaaaggaaccgaaattaagagaagggagagattgaaagatggcaccaagattgaaaggagaaagaggttgagggatagtgagagaggttggagaagagagtaaaaagaggccgcttacctgatttaaaattggtgagatgttcctcaggctggttggtctgaggacccgaggtcattaggtggatctttatcatgaagcaaagagcaggaggacaggggattgatcttccaagggtggtcccccgatccgagtcatggcaccaaatttcacgcacgtccatgtgaagagaccacccaacaggctttgtgtgagcaataaagctttttaatcacctggttgcaggccggctgagtctgaaaaaagagtcaacgaaaggagataggggtggggccattttataggatttgggtaggtagtggacaattacagtcaaaggggggtgttccttggtgggcaggggcgggggacacaaggtgctcagtgggggagcttttgagccaggatgagccaggagaaggaatttcacaaggtaatgtcatcagttaaggcaggaacaggccattttcacttcttttgtgattcttcaattacttcaggccatctggatatatacgtgcaggtcacaggggatatgatggtttagcttgggctcagaggcctgacaaggatgttactcaggttactagttcctgcaactggatggatgatggtgttattcagtgtaattggaaataaagatgttacaagcaaatttgtggaaaattaatgttgagcccagctttggacatattgagattgtaaactctgagggacatattaccctattaggtagctggatattacgatttgggttccaggagagagattagggaattattaacatatgtatgttaattaaagccacagaagtgaagataactcagggaggaggtataaaatgagttcagacactgcacaagtctgaaccctgaagacaccaacattagaagtgaccagagaacagtggaaagtgtttcaaggtacccaagaggtgaactaaaggctgaaagaaaacaatgtaatttcaagaaggagggagtggtcagtagtttcaatgcccattaaggtcaaatcaaacaaggaaaaaaatcatgaccattggttgacaaagaagagctcaattcctttctactctattccccacctcctgccctgggagataaattctggcaaagtaaggagaacaggagctagattatttctttcccagcattctgttgtggatgatttaaaacatacagaaaaatgaaatgaataatacaatgaacacatgtatatcatccatctagattcaactgtcattgacatcgtaccttatttgctttatctaaccatctattcgtatactttttttggttgaaccatgttaagttgcagagatcatgacccttcaaccccacattctaagtcgacatctaaagccagattaaaatgaataaaggagcacacaggtggtaagtagataaaacagtgaatggaaattttgctttcaagaaatttgactgtaaaagagaaagctgctggaggagaacctcactcagttcaaggaagtttgtctattttgttattttgggtttttttttttgtttcttaaaatgtatgactccatatttttgtttattattaatattaggcgggagagcctagagcaagtttaactgctgatgggaaggagcgattggtgggagagaggctgaagggaagaaaggaagtacagaacactgagtgatgggaggggaggcttactgagctgggtgggaggactagcctgggagcagggaggaccaactctgcccagagggaagagggcaggaggagaggagagtataaatgcagatggagactgggtacagtggctcatgcctgtaatcccagcactttgggaggctgaggcgggcaggtcacttgaaatcaagagttcaagactaacctggccaacatgtcaaaaccccgtctctactaaaaatacaaaaattagccagttgtggtaacgcatgtctataatcccagctactcaggaggctgaggcaggagaatcacatgaacccgggaggtggagattacagtgagccgagatggcaccactgcactccagcctgggcaacggagtgagactccatctctaaataaataaataagtaaataaatgcagatggatgggagtctggggcagggggctgcaggggatttcatctaaagactttccctttttcgggaaccaggtggtgaagccataagggcaaggctgggaatggggacttgagggtcaaaggggtttcaaatacaatgaagaaagccaaccaggccaggcgcggtggctcacgcctgtaatcctagcactttgggaggctgaggcaggcatatcacctaaggttgggagtttgagaccagcctgaccaacatggagaaaccccgtctctactaaaaatacaaaaattagccaggtgtggtggtgtatgcctgtaatcccagctacttgggaggctgaggcaggagaattgcttgaacccaggagacggaggttgcagtgagccgagatcacgccattacactccagcctgggcaataagagtgaaactccatctgaaaaaaaaaaaaaaaaaagccacccaccactggcaggccagtggcattggagaccagtgggacaagagggccaaggatgtgagagcagttggagggatagacacaggggttgcgggggagggtgctaggaggaagtagagataagagaaggttgatgggaaggaataaatcaagtattggctctggaaaggcaggtgaggattaagatgcctagggtcagtgagaagagggtatatgagatttctcaggaggctgcagtctaattgtggcagtgggattggagctgaagagggcatctctcacctctctatcaactccactgaccatctagtcccttgcccagagactaggggtaggcttggtctcctgtccctgcccttctttccctctagaggccttgtctctgagcagtgaagaggaaaccggagcatccctccctgccagtgtccggttaccaagttttgggggcgggccatctggtgactgtgacaggagccccagcgccctggccagctcagtccattcctggagaagaacctgatgcagcgattcctgcagctcccgggggccgtggtgaggcctggggtcagaggggcctgcggagctgatcaagaggctgctagccctgtgctggctcccgaaggtgggcccccactccggtaccaggccttggagcctgaggagcttcggtggctgcaggcccaggaggaagacacgaccccagaagcatctctggaaggaccttgcccagaggccagccagagccagagccagccactacggtatagaggaacccacaggaaccccctacccacacagccaggaaggccagggatgggcagttgcactctcagcccagacctcttccggtcccacctcctctgatggaggcttaggctggcatttagggtccaggctgggcggagaaggtggtcaggggcaccgtatgggggctgagggtatgagtgaggagagatgaggggcttaactccctggaggctctgaggggaggaggatagtaaaatatttgagggttgaggtcccaccttgacctctttctccccacaggcccccactggagtgggctctggacgaggtttggggacaggatacagcacagacagggtttggccagccactgcctgccagtggactggaacttaggtggtaagaggtgacagcgaggtgtatatcaagggaggtgagcatgactgacccccagtgccatgccaggccccctggctggctccagccacccccagaagagtcccttaggctaggtcagactaggggtcaggtcagagtgagtgcagcagcgtaaggggatctgactatgggagataatgtttcatggccttagggtgttgtgccttagtccctgcctctgcctcttgggaacagaagttggtgggagtgaggacgagaggcccagggcggtctcacctcaggtggtggctgcggtctgtgtcagtgcatattctgtgtcagtgcatattcgacagtcaatcttacctgtgctggctgctttaggcccagtggtcctgccccctttcattccccttctcctgcaggggcctggaatgtactcactaggctgggtggggaggatgccctggggtgtgtgcatttgacaggcgcatgtggcatttgtgggtgtggtgaggaagggaatacccagagttaaaggagattgggcaaacttggccctccttccacggaagcccagggaaaagccatcccagggtgactcctcagaagatcagaggacccttggggctggatatatttgatcttagaagcctacatttatcatcaaaaatctcaactaggagtccactgaccattttggtgaatgagactggagaggccaagtttggtccaagttatctgtgtattagatgtgatgcggcatgtgtgtgtgtgtgtagggggacgtgtgtggggtgtgtgtgtctctatgagggtgtgggggagcggggagaggtcttgtgatatatgtctgtaggggacatgtatgggatatgtgtgtctataagagggtgtgggagagtggggagaggtctcctggtggtatatgtctggggggtttgtaggtgtgtaggtgagttgtgtgggtggtttatgtgtgtagagtttttctgtgggaggtgtctgtatgtgggggagtgtgtttctctgggcgttgtgtaggcaggattttgtgggtgtgcgtgggtttatgtatggattctactagtgtctgcgggacctgtaggtatgtttgtatgagctgtccgtgaggtgtaggtatgtcgggggacatgggagtgtctgaggtatatgtgggtggtatcaatgtgtagttgtctgtggggtgtgcgtatgaaggatcctgacgtggagtgttgtgcattcatatctcagggaagctggtgcccagctctgtcatttttcctaggccctcggtgctgcccacgcctacccagctcaatggtctgtacctatgaccatgcccctggtgtcctgagctcagcctcctacccactaagaaactcaacagtctggtctgtgtttggcagggtaagagggtgattgtcttctggccctggcctgaccctggaagagtagaaggtgtcctctgatttggggggcatccccccaggtgagggagtttcagataacatgatggggctggatattttcttctgtcctcacatgacagatagcgagggcctcagataatgctggaaggcatcatctttctattttgctttccatcaaaaatctctttgggaaagacagtttctaacattcttgggatagtgacttcttagtgcccctcttcttgtctgacgtcaggtactcacgcatttctgcagccctgtgactaagttgcgtgttctgtctggttcttctcttcctctcagcattcatcacttgtttctcagcattagcagcagtcatttgccactttatgattgttatcatgctctttcctctcctaacagtgctatccccaatttctgattttctgtcatttctaaatgttgcatgtctgtgactaactttgcacacattgattttttttttattttttatttttgagatggagtctcgttctgttgcccaggctggagtgcagtggcgcgatcttggctcactgcaagctccacctcctgggttcacgccattctcctgcctcagcctactgagtagctaggactacagacgcccgccaccacacccggctaattttttttaaattttttagtagagacggggtttcaccatgttagccaggatggtctcgatctcctggccttgtgatccgcctgccttggcctcccaaagtgctgggattacaggcgtgagccaccgtgcccggcctgatttttaatttttatcactgtgatatttctcaagctgggttcttgtgcctgggtcaaagctgtgggttatcagagtgtcatctgggaaattagtgtgtgtgagtccccacacacagctgctcaccacattttggaattgtcttggcaacatatgagtgcatcagtttcacacaattctatcagctatatatagacacatttttttcatgggtttattaacaattctctgatcacttcgtgatcaccagttctgcatcctctgagtatggttagccacattgttcactgcacaagggcatctggccaaggaataccagcccatgctccacacacagaatggggagcaacagctcagggctgtgtctatctgtaggggcatgcagattgaaaatgggcttgtagcagccctgacagtgaatgctgcaaagagaccttatacatgtatatcagttccttttttaaatttttttgagatggagtctcactctgtcacccaggctggagtgcagtggcgcgatctcggctcactgcaatctccgcctcctgggttcaagcgattctcgttcctcagcctcctgagtagctgggattacaggtgtgtgccaccatgcccggctaatttttgtaattttagtagggatggggtttcaccatgttggccaggctaatctcgaactcctgaccttaagtgatctgcccaccttggcctccaaaagtgctggaattacaagcgtgagccaccacacctggcctctatttcgaatattaaactttaatttaccatatcccaaatatttttccttttgttgctattatgggctgaattgtgtccctccaaaatgcatatgttgaagttctagcccccagtacctcagaatgttacctttgaggtgattaagttaaaatgaggttattaaggggggccctaatccaatatgactgatttctttataagaagaggaaatttggatataggcacgcagaaggaagaccatgtgaagacagagaagatggttgtaagagacagaaaaacccaaagtgtgtttctcctactctcatacacaccgctcaccagagagtgcttcacctctggccacaaaaatgggtggagatttctccccaccaacaacctgttctccagcagacactaactgggtgttctctaattcaagtcaatctagtgttagattttttaggttaagggctcagtgccacaagactgctctctgcttcagatgccaattccaagtggtaagttgtcagctatacttctgaccaactggctataaatcaggggttcccatgccaccctccttgggttcaactctgtgagtggctcacagaactcagggaaactttagttatatttacccatttattataaagggtagagacaaacaccagatgaagagatgcatagggagaggtatggaaggaggggtgcagagctcccatgccctctccaggcaccacaccctccaggcaccttcacatgttccacagtctggaagctctcgaaaccctatcctcttgggtttttatgaaggcttcatgattgatcgcatctttggccatgtgatcaactcaaccatcagccccactccccattccccagaggtcaaatagtgggattgaaagtttcaaccctcagctgggcacagcagctcacgcctataatcccagcacttttggaggccaaggcgggtggatcacttgaggtcaggagttcgagaccagcctgaccaacatgatgaaacccatctctattaaaaatacaaaaatttgccaggtgtggtggtgggcaactgtagtcccagctatttggaaggctgaggcaggagaattgcttcaacccagaaggtggaggctgcagtgagccgagattgcctcactgcaccactccagcctgggcgacagagcaagactcagtgtcaaaaaaaaaaaaaaaaaaagaaagaaagaaaaaaagttccaaccatctgataacaaaagatgcttctatcacccaggaaattccaagggatttccatgtcagttgttcctctcactcaggaagttataaaggtcttaggatctctgcgtgaggaactgggtggaagaccaaatattagaacagaagttctcctagcatccctattgtcaagagttttaggagctctgtctcagaaatggggtatagagaccaaatatatatttctttacaatatcacaagaatcatctacaagccaaagaaagaggctatagaagaaaccaaccctgctgacactttaatctcagccttccagcctccagaactgtgagcaaataaatttatgttgtttaagccaccatctgtagtacttcttgtttttttttttttttagagacaggttcttgctctgttgcctaggctggagtgcagtagcacaatcatagctcactgcagcctccaacatcttggtgcaagcgatcctcccacttcagcctcctgagtagctgtgactacaggcatgtgccaccatgcctggctaattttttttatttttgtagaaacaggatctgactatgttgtccaggctggtcccaactcctgagctcaagcaatccttctgcctcagtctcccaaagtgctgggattacaagtgtgagccaccatgcctggcctgtggttctttgttatggtggttctaggaagctagtatagttgccttatttttctcataaatttagtttttagataccaaagtttaaaaattaaacctaggcctggcacagtggctcacacttgtaatcccagcactttgggaggccgaaggaggcaaatcacttgagtccaggagtttgagaccagcctggtcaacatggcgaaaccccaactctactaaaaatacaaaaaatttgccaggcatggtggtgcacacctgtaatctcagctatttaggaggctgaggcatgagaatcacttgaacccaggaggttgaggctgcagtgagccgagattgcgccactgcactccagcctgggcaacagagcgagacttcgtctcaaacagaaaaacgaaaaaaaggcctgggcgcagtggctcacacctgtaatcccagcactttgggaggctgaggtgggcggatcaactgaggtcgggagtttgagaccagcctgaccaacatggagaaacctcatctctactaaaaatacaaaaattagctgggcatggtggcgcatgcctgtaatcccagctattctggaggctgaggcaggagaattgcttgaacccaggaggtggaggttgcagtgagctgagatggcaccattgcactccagcctgggcaacaagaacgaaactctgtctcaaaaaacaaaaacgtaccaattaaacctagccatattgttgctgctaataattttatgaccttaataaaatcttcccttccttcttttgtatttaaaaataattaactgttaagcaaatgcgggatttattttggggtgaaatatgtatacaagttaaattatttgctgctggccaggtgtggtggctcacacctgtaatctcagcgctttgggaggatgaggcgggaagatcacttgaggtcaggagtttgagaccagcctgaccaacatggtgaaaccctgtctctactaaaaatacaaaaattacccgagcgtggtggtgcatgcctgtaatcccagctacttgggaggctgaggcaggagaatcacttgaacccaggaggcagaggtttcagtgacccgagatcgtgccattgcactccagcctgggcaatgagagcaaaattccatctaaaaaaaaaaaaagtgctgcaaagcagttgtcccaatagcatttatttaagtggggcgggggcgggggggtgggggcggggggagattcttattggttcgtaatttatcaagttagaccttttatgaaattccccccatgacctttgaccttctgtttttaacctggtaccaaacagcttttatcatcgtctcgtggtgtttatgttttgaagtccaatagggtgagttgtctatgattgtttccttcttttcccaaaaatattctttggagttcttacctactgattttttttttccagatgaattttgctgtcacttaagtttgacaaaatgttccctttgaaatttcaaatttttgaaatgaagtatgagatctaaaaaaaaaaagaaacctgtgtattggctcagcattacccttattcctctcagccaagtgcaagggatcacttactcaaatctttattcatcccactagagtttaatgacttccttgaatggctgttcaatgttcagtgacaggtctggcttttgttgtgaggccatctatggagtctctgggacccttccagtccctggaatcagtttggtctgagaggtcaggacttggaaacatactggaggcagggcaagggcaccctgctcttgttttggcatctacctcttttccgctggtccttcttatccatccaactagtccttttccctgagccaggtccatactttcccaccccaaacccttcctcttgtttcctggctctctgtttctggctacattcatttcctacactcctgtatcaaaagtaccacaattgcttctcgttcccacagtgcagtgcggctgagcgcctcagagcccgcggggacgctgcggggggattgcggggagggggcgttgggaggtgccgatgttgggctgggcggatgagcgcatctgcgtggtgagccttccaacgtgcgcgagaaggacgtggaagaccttttctacaagtacggccggatccgcaagatcaagcttaagaatgggcactgccttgtgcccttcgccttggtgcgctttgaggacccccgagatgcagaggatgctatttatggaagaaatagttatgattatggccagtgtcggcttcgtgtggagttctccaggacttacgaagtcggggtgggtggccccgtggtgggaggaatgggccttctgcaagaagatctgatttccgagttcttgtttcaggacttcctcaggcagctggcaggacctgaaggatcacatgcgagaagttggggatgtctgttatgccgatgtgcagaaggacggtgtggggatggttgagtatctcagaaaagaagacatggaatatgccctgcataaattggatgacactaaattccactctcatgatagtgaaacttcctacatctgagtttatcctgagagaagcaccagctatggctactcacagtctcggtttgggtcaaggggccgtgactctccatactaaagccggggttccccacaccacttctctcctttcaggccctactgagacaggtgatgggaattttttctttattttttaggttaactgagctgctttgtgctcagaatctgcattccagattgaggatttagcgtcttaggaaattattttaattttttttttttaaagaagaaaaaaaaactacatactttctaccagggccatattagcagtgaaacattttaaactgcagaaattgtggttttggttcagaaacaagttgtatatttttcactcctgaatatgggtaaaaaatcagttccgtctttgtgggttgctctgctatggagatcaacagttactgtgactgagttggcccattctgcttaaaaatatgttttaaacgtttaagaaaaatgctcatcatcactggccatcagagaaatgcaaatcaaaaccacaatgaggtaccatctcacaccagttagaatggcaatcattaaaagtcaggaaacaacaggtgctggagaggatgtggagaaatagaaacatttttacactgttggtgggagtgtaaactagttcacccattgtggaagacagtgtggcgattcctcaaggatctagaactagaaataccatttgacccagtgatcccgttattgggtatatacccaaaggattgtaaatcattctactataaagacacatgcacacgtatgtttattgcagcactgttcacaatagcaaagacttggaaccaacccaaatgtccatcagtgatagactggattaagaacatgtggcatggctgggtgcggtggctcatgcctgtaatcccagcgtggctcatgcctgtaatcccagcactttgggaggccaagacgggtagatcacgaggtcaggagatcgagaccatcctggctaacacggtgaaaccccgtctctactaaaaatacaaacaattagctgggcgtggtggtggcgggtacctgtagtcccagctactcggtaggctgaggcaggagaatggcatgaacccaggaggtggagcttgcagtgagccgagattgcgccactgcactccagcctgggcgacagagcgagactccatctcacaaaaaaaaaaaaaaaaaaaaaaaaaaagaagaagaaaatgtggcacatatacaccatggaatactatgcaaccataaaaaaggatgagttcgtgtcctttgtagggacatggatgaagctggaaaccatcattctgagcaaactactgcaaggacagaaaaccaaacactgcaggttctcactcataggtgggaattgaacaatgagaacacttgaacacggggtggggaacatcacacactggggcctgttgtggcgttgggggaggagggagggatagcattaggaggaatacctaatgtaaatgacgaattaatgggtgcagcacaccaacatggcacatgtatacatatgtaacaaagctgcacgttgtgcacatgtaccctagaacttaaaagtataattaaaaaaaaaaagtttagtaattgaaaaaaaaaagtacaacaattgggttggttggaacagcagaaatgaattgtctcacagctctggaggccaaaagtctgaactcaaggtgtcggcaggaccatgctccctctgaaacccatagggaaatccttctttgccccttctagcttctggttgtttgctggcagtctctggcattccctggcttgtagacgcatctttccaatcgtctgccttcacatggtagtctccctgtgtctgtctctttaagtggctgtcttttgttttttgtgtttttttaatttcaatttaatctattttttgtagacacattgtttcaccatgttgccaggctggtctcgaactccagggctcaagtgatcctcccgtctcagcttcccaaagtgctgggattacaggcgtgagccgccacacccagcccacatggctgtcttcttatgggaaaccagacatgggattagagacccactctattagagtaggattgcatttaactaattacatctgcaacaactctatttccaaataaggttacattctgaggtactaggggttaagacttaaatatatcctttttaggaaggacacagttcaacccacaatattagctggccacatgtttcccctgatctgtactttacttgttccccctggctctggtccctcctcgggtcaggtcctgcctgagcctcccctggccatgtcccttctttgtgcctggaccctcctgattaataccccatccccacccttgtgccctcagctgacttcttgtacctcccaccaggcatgatgacctgaaggagatgctggacaccaacaaggattctctcaagctggaggccatgaagaggattgtggcggtaagaggggaaggaggaggcctccctccgggcggggcctgggtggccaagagcagctctccttagctccttgtagaccttccctctagttagtgctgtgcctctcgctttgtccctcttcccctaccttgaccccaccacccagatgattgcccgaggaaagaatgcttcagacctgtttcccgcggtggtgaagaacgtggcctgtaagaacatagaggtgagcactacctggtgagggattgcttgtccccacctcccccaggaccacactcaagcttggggtgaggaaggaaatgatttagcccctgggggcccgacctgctgagaaatgtctctgagccaggagaagacactgtctccatgtccctgaactggatgtggatcaaggtaaaggacccggatacactcaggggtgctctcccccactgggagagtttgtccccatggaccgcagctggctggggagatgacatcccaggggtaggggggtgggcacaggtgcctgctgagaagcgttctgctgagaaacgtgctctccccaaggtgaagaagcttgtctatgtgtacctggtacgctacgctgaggagcagcaagacctggccctgctgtccatctccaccttccaacgtggcctaaaggtcaggggtctcagtttgcctcccagggcctgggcctcgttggcgctgtatcggaggagtaggcctggggagaggccatgagcatgggagcgggctctgcagaccccttcctacctgcctaaaattgggagggtcacagtcagaagaggccagccagaccctcagagagtggaagctgggctcagaaggggcgtaagagatgaagtgggtacccagggcccctgtctctcttcccaggagcctgtggtaatggctgcttctagtatgaaccacttgagcccccggagagtggagagtctctagcaatggagaacccctcaaccctcacccccctttgtgtaaaggtgtgaattgtggtccacagccaggtagatttcaacctttagcagtggcctgaatcccccacaccattctcaccttttgtttcattttgcccaaggcctctagttggatttacatatgttaggtgcatgtataagtctcccccctaagggcttttctggttagtctaagacatcttgagggtaaagacagccatttcaaggccattctctccatattggatttttcagctctgattacaaccattaactcctctatttttgcatacctttatttatttatttatttatgagacaggttctcactgtgttgcccaggctggagtgcagtggtgcaatcatggctcactggagcctcgacttccctgagctcaggtgattctcccacctctgtctcctgagtagctgcgactactcagcctgcatcaccatgctcggctaatttttttgtagtttttgtagagatggggtttcaccctgttgcctatgctggtcttggactcctgggctcaagtggcctcagcttcccaaagtgctgggattacagggatgagctaatactcctagcctggatacttttagttcaaatttctgtgagagagattgtgaaaggtccagctcatcttttcatatccagaagttctgtaggttgctgggtagacaggattgctgctcaaatccagggcccaccccttgtccaatctgctatggccagcaagaggggttgacagtcggcttctttggggtgagagtagaaagcatggtcacttgaatatacaattcattcatttagtaaatacttgggtgtctctatgccacacattgtgctagatttctttttataagtcaaaaccatggaatccgtcttagattggcaagtaatcttttggtttgagtaagggttaagtataaaaactaatctgaaattgttgtacagattttcacctatagtctctaccaactgaccctgtcccccttttagaaaaccagagctcatttagttcaactcaatgtgataatttctttctgcaaagtgccaaatagtattttaggttttgtaggccttatagtctcaactatgcaactactcaattttgcccttatggtgcaaatgcagccattgacaagtgggcgtggccgtgttccaataaatctatataaaaaacaggcaatagacagattttatccaagggctgtagcatgccagcctttgctctagaacatgtctaacaggtcatcttttctgatagggacctcactccttcataaggcaacttgctccatctcaagacaactaccactatttggggtgttttttaaaccattctcttttgttgaaacctccacaactataatttttaaaaattgatttcaggctgggtgtggtggctcatgcctgtaatcccagcactttgggaggccgaagcaggcaaatcacaaggtcaggagttcaagaccagcctggccaacatggtgaaactccatctctactaaaaatacaaaaaattagcttggcatggtggcgggtgcccataatcccagctactcaggaggctgacgcaggagaatggcttgaacccgggaggcagaggttgcaatgagccgagaacgtgccactgcagtccagcccaggcgacagtgtgagatccatctcaaaaaaaaaaaaaattgatttcaggctgtactgcattatgactgcacctgtgaatagccactgtactccagcctgggcaacatagggagaccctgtatctaaaaaataaaataaaatttactacaggttcacaaaaggcataaagaataatataatgaatatccataagaaatgacacatttctcaaatagccaaagcctcctatatatcttctcttgtttatcattcataggtatgtatttattcctgtgctagtaatttgcatattgttaagcaatataaaatgttttgtaaatggtgtcatcgtactacatatgtattcctttaaaacttgttttcttttttgttgtcactggcttttggtctctcctgcatgttggaaccaatcatttcaatccagccttctcccttctttcaatcctagcccaggctagggccgtgttcactttcttaggagatccctcatggaatcaaacctctgactggcaagcagataatccaggtctccctacatcctgtctttgtacagttggtcccttgaaccccctatgaaaccctactctatttcattttatcagtttagcacagggtccaaaccagggtgattctgaatcttaattatgtccctcctgattttgtgtcttctttcaagatactgataagctatttggaccagggcaaaagactgaggcatagcatgtttccaggttgacactgatctgttaataaaccttctccaagtatatttcaccacgttgtagacccacctgactgtacagacagctggcatttttctatcttgttaggaaggatcttattcaatagcaataaataaataaataaataacacctttcatgtgcaaagggttgtgggtgacacagagataaaacagatgtgaattctgctcttaaaaatgcttggctattaggtgaaacaaaaggcctacctaaaaaatagcaatgcaggaaatgctatgagacttccacaaacatatcactgaaatcaagatactaatatccaccggcctagttaccccatcaaaaaggaaaacacattttttttgataactttctgtgaatctataatcatttcccaaataaaatgctcacacacaaaaaaggaaaacaggtttaagcagatgatgtgactatttgtctctaagaaaacagagactccttccttttcaataaatgtttctaacccatctgtttaaaagtcaattccagaattttgtcaggaattagcatcaattttacctgcaattgtgaggatcttgtcttgtctttttccatttcagaaagtcagggtaatatctacccttctttagtgttctattcccgtcattctctaagagtaatagtacaggcacacctcattgtattgcactttgcagatattgccagatattgcactttttacaaattgagggtttgtggcaaccctacatcaatcaagtctatcagtgccatttttccaacagtatgtgctcacattgtgcctctgtcacattctggtaattctcacaatattccaaactttttaatgattattatatgttatggtgatcagtgatctttgatgttactattgtaattgttttggggtgccacaaaccatgctcagacatgaaagtgaaattaatcaataaatgttgtgtgtgttctgactgttcccccatctccttcaccttgggcctcttcattccctgagacacaacaatattgaaattagatcaattaataaccctacaatggcctctaagtgttcaagtgaaaggaggaaccacacatctctcactttaaatcaaaagctagaaatggttaggcttagtgaggaaggtatgttaaaagctgtgataggctgaaagctaggccacttgctccaaacatttagccaagttgtgaatgcaaagtaaaagttcttgaaggaaattaaaagtgctactccaggctgggcgtggtggctcacacctgtaatcccagcactttgggaggccgaggcaggaggatcacttgagaccaggggttcaagaccgtctctataaaaaatttttttaagttagcctgatgtggtggtacgcacctgtagtcttagctacttgggaggctgaggtgggaggatcacttgaacccagaagtttgaggtgcttctccagtaaacacatgaatgataaagaaagcaagacaggattattgctgatataggaaaatttaagtggtctggatagacgatcaaaccagctaccacattcccttaagccaaagcctaattcataggcaggtcttaaatctctccaattctatgatggctgagagaggtgaggaagctacagaagaaaagacggaagctagtggaggttggttcatgaagtttaagtacagaagccatctccataacaaaaaaatgcaaggtgaagcaaaagtgctgatggagaagctgcagcaagttgtccagaagatctagctaagatcattgatagatgtgactatgttcaacaagagatgctcaatgtaaatgaaacagcctcttactggaagaagatgccatctagcactttcctacctagagagaagtcaatgcctggctttaaaaaacaggctggctcttgttaggggccaatgcagctagtgactttaagttgaggccagtgctcaatgaccattctgaaaatcctggggtccttaagaattatggcagatctcctctgcctgtgctctataaatggaacaacagtgccatgacagcacatctgtttgcagttatggtttactgaattttttaagcccactgttgatacctaccgcttaaagattcctttcataatattactgctcattgacaatgcatttgttcactcaagagctctgatggagaggtacaaggagattaatgatttcatgcctgctaacacaaaatcagttctgcagcctatggatcaatgagtaattttgacttttaagtcttattatttaagaaatacatctcgtaaggctagagctgccatagatagtgattcctctcatggatctggacaaagtaaattgaaaaccttctggaaaggtttatagaaaccttctggaaaggtttaccattatagatgccattaggaacattcatgattcatgggaggaggtcaaaatattaacattaacaggagtttggaagaagttgattctaaactccatggatgactttgaggggttcactacttcagtggaggaagtaactacatatgtggtggaattctacctagaagtagaagtagaattaaaagtggagcctgaagatgtgactgaattgctgcaatctcatgataaaacttgaatggatgaggacttgcttcttatgagtgaacaaagaaagtcctttcttaaaatggaatctgccgggtgcagtggctcacgcctgtaatcccagcattttgggtggccgaggtgggtggatcacgaggtcaggagatcgagaccatcctggctaacacagtgaaaccccgtctctactaaaaacagaaaaattagccaggcatggtggcgggcacctgtagtcccagctactcgggaggctgaggcaggagaatggcgtgaacctgggaggtggagcttgcagtgacccgagatctcgccactgcattccagcctgggcgacagagcgagactccgttacaaaaaaaaaaaaaaaaaaaaaaaaaaaaactcctggtgcagatgctgtgaacattgttgaaatgacaacaaaggatttagaatattacataaacttagttgataaagcagaggcagagtttaagaggactgacttcaattttttttttttttgtagagactggggtctccctatgttgcccaggctggtcttgaactcctaggctcaagcaatcctcctacctcagcctcccaaagtgttgggattacaggcacaagccatcacgcccagcctacattgtttttttaaagacataatgctattgcatgcttagtagactacagtatattgtaaacataactttttttttttttttggagataggatctcactctgttgctcagtctggagtgcagtggcatgaacatatgtagctcacttcagcctccaactccctgggctcaagtgattctcccacttcagcttcccaagcagctgtaactataagcataacttgtatgcaccaggaaacaaaaaatttatgtgactcgttttagtgcgatatttgctttattgttgaggtctagaatcaaacccacaatatctccgaggtatgcctgtaatatatagctgctgctgctgatagtgggaagacagtcctaagccccatgatcacaatacagtgtaaggaatgcttttatacgttctgtataggatgcagtaggaataaagaagaagggcttggggccgggcgtggtggctcacgtctgtaatcccagtactttgggaggccgaggtgggcggatcacttgcggccaggagttcgagaccagcctggccaacacggcgaaacctaatctctactaaaaatacaaaaaattagctgggtgtggtggtgcgcgcctgtagtcccagctacttgggaggctgaggcaggagaatcgcttgaacccaggaggtggaggttgcagtgagccgagattgcaccaccgcactccagcctggcgacagagcgagactccatctcaaaaaaaaaaaaaaaaaaaaaaaggaagggcctacacccctattttgttttaaacactgtggaagaacagcagcttttgcaatgatttctgggagaaaggagtgtaaggttgaactccggaagggagaccagcttgcatctgctgggcggtcacctcaggcattaaaacaggcacctccaaaaaaacccttacaaggaacaggaagtgtttcaggtgtttcagcaattttaggtgttctgaaagtttttcagtgtttctggaagtgaagctacccattgcaacacctgttcaggtgtcagatttctgcaaccagagccaaaattaagtgtcccccagatacccatcactggcacaccatccaggctccagtcaagcggcagggaagcaagagctagtggtcgctggggacagtgacttccaaaggtgtggcctccccccatcagggcacctggtgccctttcatagctctgcctccacctctgcctttaggatcccaaccagctgattcgtgccagtgccctccgtgtcctctctagcatccgtgtgcccatcatagtgcccatcatgatgctagctatcaaggaagccgcctcggacatgtcaccctatgtgcggaaaacagctgcccacgccatccctaaactctacaggtatgccccagccctgtcccacgctccccaggaggctggttcctaagttctcaacccacccctggcctttcctaagtcttgcctgctgcttctcagagggtttgaggagggtagtttgggggactgacagagatggaggagaacaataaggctggggtgcaggaggtgagcatggcttggacagatattgggaaggctggggctgagagtggcaaattcccctcaccgatttctccctcagtttggactctgaccagaaggatcagctgatagaagtcattgagaagcttctggctgacaagaccacggtgcgtgtataggggcgctccgggaggggtggtgaccggcagccggccttccacccttcgcgttcaccctctcgtctttgttctttccccagctggtggcgggcagtgtggtgatggcctttgaggaggtctgcccggagcgcatcgacctgattcacaaaaactaccggaaactctgtaacctgctgatcgacgtggaggagtggggccaggtggtcatcatcagcatgctcacccgctacgcccgcacgcagttcctgagccccacccagaacgtaagtgggcccagcccaggcagagcgggccgaagtgtgtcccggggaggcgcccacagacccgtcggtctccccgtccaggaatccctactagaggagaacgcggaaaaagccttctacggctcagaggaggacgaggccaagggcgcggggtctgaggagacggccgccgcggccgccccctcccgaaagccctatgtcatggaccccgaccaccggctgctgctgcgcaacaccaaacccctgctgcagagccgcagcgccgcggtggtgatggcggtggcgcagctctacttccacctggcgcccaaggcggaagtgggcgtcatcgccaaggcgctggtgcgcctgctgcgcagccacaggtgcgctccgcccccagccccgccccctccctcgcctcctgccccgccccacgggctgcccggctccgccccctcacgcccaccagccgcttccacctctgcccacccgctccacactgaccgtagtcctgccctccgcactggtcctctccccgcaacgacttgccccaccttttcccctcatccgctgacccttgccccaaccgaggggcccggggtgctctgacccgtcctctccgcagtgaggtgcagtacgttgtgctccagaacgtggccaccatgtccatcaagcgccgggtgagcctgcgacggcgggctgtcctcgctgtccgagggccgcttctgcgggcactggaggcgttgtcggggctgggaccggggccggggaaagggaagatggaggaataccctggctgtgcagaggatggggcaggggaggctccaaatacagatagggagcagggcctggatcctgaggggccgctgaggggatgtccagtggaaaaagagctagtcagatctgagatggacgagggaagacttgaggagtggagggcagtggtgaggaggcaaggatcctgggcgctgggtcaggataggaggggtgtctctgggcagcgaggcaggcctggggcttcggtggagctccctagctgcctctcttgtgccagggtatgtttgagccctacctgaagagcttctacatcaggtccaccgaccccacccagattaagatcctgaaggtgagtgagggacagaagtgcatgtgcttcccagccctccccaccccatgtacccactcaaataactcacagtggcccccctggtgcctgcctattcctggggctgagcccaggagcccatgactgccccagctggagctgtttgttcagggagctgggctaaggagggtcagggggagaagggaactgctctttgcctagtacctggtatacacctgctactcttcataaatgaagtaacctgatatcacctcataataatcccaggatgtgtacattatattccttttataaaaatatagactctggccaggcacagtggctcacgcctaatcccagcactttgggaggccgagacaggcagatcgcctgaggtcaggagttcaagaccagcctggccaacatagcaaaacctcgtctcaacgaaaaatacaaaaattagccaggcgtggtggcaggtgcctgtaatcccagctactcgagaggctgaggctagagaattgcctgaacctgggagacagaggttgcagtgagctgagattgtgccattgcactccagcctgggtgacaagagcgaaactccatctcaatctaagaaaaagaaaaaaagactctgggaggtaactgccccaggtcacataattctgctgactccaaggttcacacttttctctcccacccacagtgttatggcccccacacacctgccccctcaggctctcctgcaaacattcacggacaaggaaagtggcgggagcccatacctccatttgattcctgctctgctgcctcattattgagtgatttccttcagcaacagttaatcttcctaacccttgtgaacatccactatgttctaggggtacatgatgagcaaactaatcagggaccctgcctttgtggagcttacagatgtggggaggaggagacattaagcagttaatcacaaggcaaatgtaaaagtccacttacaaaatatggaagaaagtgtggagagctataagggcataaaatagggagacctcatctagtctggtgccagggaagttttcccggaggatatgagacttgagctgaagcctgagagatgaacatgaattatgcagggacagaaatgggaagaactgctccacgcagaggaaacagcatctgcgaagaccctgggttaggaagtggagtgggattggggcctggaagacaagggggacagtgatgggagatgggaggtagacagcaagcagatcattcagggacttacagaccatggtgaatacgatggtctccatcctgaaagcaataggaagctttaagttttcaatgcagtagggaggtgacatggtcatactgtaagcatactgtgtagggaatccacttaagaggcaaactggtcctcttgctttttagacaagtttcataacctgtcaattccctcatcagtgtgaggatgatgcagggctgtcatgaggattgttttctggtctatgaagtgtatttggaatgaaagcacagaaagtccactggccaacccacccattttctgcctctccaaccctccctgcagctggaagtgctgaccaacctggccaatgagaccaacattcctactgtcctacgggaattccaggtacaggccagctcccagccagaagggcctgggagaggggcccatcagatccttgtgccctggtgggtaaacctcctcttatgagcccaaggctggagaaactattatcttacattcccgttccaatgtgtttggctggctttgggccaaggaatcactggattgggggtggagttgtcaccccctttcccaagtcttagtcaccggcatgataagccataaaatgaaaggccacagccttcttgaaggtcaccctcaagcctgcagagtcactgagggatttctttgtcatatcccacagacctatattcgcagcatggacaaggactttgtggcagccacaatccaggccattggacgctgtgcaactaacatcggccgagtccgtgacacctgcctcaatggcctggtgcagctgctgtccaaccgtgatggtcagtgtttccctgagtgtctaaccgtgatgatcagagggtgtctgcctgcaggtctgactctgctggccactggatatccaccagtctgcctagacacaatgtgtatccattggtctgtctgtcttgatcagggcccaagtgttcctacacctctgagggctgctagagaactgaagggggttgagagaaagagccaagggcctggggcactgcaggtgtgtctgtccacctgagtgtggccatctgactgtcttggggtccacacactcatttttgttctgtagagcttgtggttgcagagtcagtggtcgtcattaagaaattgctacagatgcagccagcacaacatggagagatcatcaaacacttggcaaagcttacagacaacatccaggtgagggagaagccatattttcactccccacttcaaggtcctccccatgatttcaagactgtataattacatatgctagccttatcaaaagtaacttccaaaccttaggtcttcaggtggaaggagcagagacactggaccatgtgaccctgaccttgttacccctgatttgctttccctttggagaccctcaatgagcacgatggactttactactactcttgttttctctctaaagctctagccaaccatggttgagtgacaaatcttgtgtttttctatcgcactgctaagctgaaacatctaaacaaggcattcccaaagattctggagagtaacatggaaataaagtactgagggtacaatgaatccagaaaatcaatcttttacatcatgactgacttagggtcttgaaagctctatgctaatgaagccctagggaagaggggaaatgctgtctaggaaatgtctaccttttaacctctctctatctcaccacccccaactcccatttccagagaacccataatacaacaggccagcacagatgaggagtgctgtttccctggaagtccacaatcctacccacccactttcccgtatttacccatcttcactcctctcccacaaccacaggtgcccatggcccgagccagcatcctgtggctcatcggagagtactgtgagcatgtccccaggattgcacctgatgtcttaagaaaaatggccaagtcattcacagcagaggaggatattgtcaagctgcaggtcatcaacctggcagccaagctctacctgaccaactctaaacaggtaaagattaagagatgaccccccagatactctggtccccagaaactccctagacagtattcttttggccctccctaggcagggctgaactctagctcctattttggaaaagaagaatcagggaaggtggctggtctgcccacataaccaatgctaccccagtgcccacaaagaccttgtagtgctggtggtcactgttgaagagactctcctatgaagctgtgacctccagtctgctagtacaagagtcctgtctgccaccttggaactctggggctgtgaagaaccacagttgattgggataagggaagggcccaacagtggcaggtactgatgggagaacatgcatcccagatgtggtctgtgcttctttccaaagcttgacaatgcttggccagtctgtgccaaagataagggggtgagtctctgcttgggcttgggtggtgctggtggccactgtcattcccaaggtgaaaggttataagagatacacagccaaggatgaggctcaactaagttgtagtatcagggtgttcagagcctcctagctgtctggcatctcctgagatggttccaggagattctcctaaaatgaagcataatgtgctgagcttttcaaggtgtcagggacatcaaacaccatgacgatttccacactctcccactcagttaagcaggacagggattggcaaactactgcccataggctgaatttggcctattcctgtttttgtaataaagttttgttggaacacagccctgctcattcatttacaaattacctatggctgcttttgtgctacaacagcagggttaactagttgcaacagactgtattgcccacaaagcctagaatagttattctctggcccttttataaaaagactctgccaatccttgaagcaaaacctctggctaggtggctggggtctacagatttatagcagggatatcccctggagactgtagcatccctgccatgtccactgtgcgtgggagtctttggatggtggcacttatctttttcagtggcttctttgatccattgtggccagagtgagccccagaggctcaaggtgaggtaggcagggccaccaagtgctgtgactgtaatcaggagtcaaaggacagcagcaacatgtggaggcaactgagtctgtataattaaatatgctagccttatcaaaagtaacttccaaaccttaggtcttcaggtggaaggaggagagacactggaccatgtgaccctgagcttgttatcagtgttgtgggcaaagcagattggagagagagaagttagagggggagagagagaagttagagggagaaagagcaccatggggaagcgttcaatcgttgaaaaaatatttgtatacttcctttgttcaggtgggaggaaggagcaagtgggaggaatgtttgaaaagatgaagcagcctgggtggggagccacccaggtaggtgggagtcttgacatgctcagcaatgagccagagtcctaaaccccaggatggtgaggttggcatgttttcataagcctgggcctgtccacatgtcatttcccccaagttgtcactgtgagctacatgtgcatttgttcatttatttaacatatatgtaggtgggagtctgacatgctcagcactgagccagagtcctaaaccccaggatggtgaggttggcatgttttcataagcctgggcctgtccacatgtcatttcccccaagttgttactgtgagctacatgtgcatttgttcatttatttaacatgtaggcctactatttgcctggtactgtgctgcgtcctgaggatatgacaatgagtgagacacatttacaggtctccagatactcacagccaagtaggagaaacaggacaaaaataaacattttaaacacagcagtaacagctgtcatcagggttggcacagcgagctgtgggtatatacagctgaaccctcccctaggaatgacccctgtcagggaacccagagtaggctgttcaggcaaatggacactcacctccagggcgcccttcacctgcaagtgagtttttgcaggccccttagaatggttatttgattcaataaagatttttgtcctccctttctttctcctttcttcccagcctcttctgggagtggtaaagaagggggagtccttggggtactaggagggaggtggtttggatgcgcacatgaccatgcttgcaaaacagtagtgatgcttcccatcctgggaccatgagtggcaatctgcccagctaaaaggccacagtaatctcagtcattctctccaatttggacatgggcccacggcatgccagatcctggcccaggatgaggccaaggaaatgaccaagatgaggcctctgccctgctattgatcagcagataatcagatactagaccagaggccacaaaggcataacatgcaggtggcgggggatgggggggttggtaatcaaagtggctattacatccacctggatatagaccctggggaaactgcctagcaggttagtttgcttttatgtgtcaggtgagatgtgtggcaggagggtctgccaggggcacagtgggatctacaaccctcccatgtgaccgcctttacagtgaatagaagattctgacaaattttgcagaattgcttttaaaaacgtaaactttttttaatatgctaaaggtaatacatgcttatcatagaacatttggaaaactcagaaaattataagtttaaactattaataagtccaccatttagaagaccaccattaattatatatttccttattttttattcctatatatagtcattcagaagttgtacttttgtctattgtccaatattttaaacttttctgcttcttttcaatgctttcatatttaatacttttttttccccattcacatttcaattaaacttttcacttagaattttctccaggctgggttcagtggctcacacctgtaatcccagcactttgggagcccaaggtgggtgggtcatttgaggtcatgaattcaagaccagcctgaccaacatggcaaaaccctgtctctactaaaagtacaaaaaaattagctgggtgtggtggtgcgctgaaatctcagctacttgggaggctgtggcaggagaattgcttgaacccaggaggtggaggttacagtgagctgagatggtaccaccacactccagcctgggccacagagcaagatccatctcaaaaataaataaaaattaaaaagaatttcctccaaatttttttctactttcacatttttaaatcaattgtattagttttctgctacataataaattactataaatttggtggcttcaaacaacacacgtttattttctcagtgtctatgggtcgagaattcaggtatggcttagttggatcttatgcaaggctacaactgaggtgtcagccaaggctgagtttttatctggaggctgtactggggaaaggtccacttccaagtcacatggtgccacgatccacttccttgcagttgtaggattgtggccctggcttcttgctggctgtcagctgggggctgcccttgccttctagaggccgtccttagctcattgccataggggcctcccaacacggatgcttaatttctccaaagccacaagggagaaagtctctagagccagtctgctagcaagaccgtcttctttttattttttaatttttatgggtacatagtaggtgtatatatttatggggtatgtgagatattttgatacaggcatataatgcataacaatcacatcagggaatggggtatccatcctctcaagcatttatcttttgtgttacaaacaatcaaattacactctcttagttatttataaatgtataataaattattgttgactgtagtcaccctgttgtgctgtcaaatactagatcttacacattctatctaactataattttgtacccattaactatccccacttcccccacccactacccttctcagcctctggtaaccattattctactctccaactccatgagctcaattcttttaatttttagccctcacaaataagtgagaacatgtgaagtttgtttttctgtgcttggcttatttcacttaaaataatgacctctagttctatccatgttgttgcaaatgacaggatctcattcttttttattctttttttatagtactgcattgtgcatatgtaccgtattttctttatctatttgtctgttgatagacacttaagttgctttcaaatcttggctatggtgaacagtgctgcaataaacgtaggtgtgcagatataacttcaatatgttgatttccttacttttgggtatatacatagcattgggattgctggatcatatggtagcactatttttagtttttgtttgtttgtttgagatggagtcttgcactgtcacccaggctggagtgcaatggcatgatctcagctcactgcaacctccgcctcccaggttcaaacgattctcctgcctcagcctcctgagtagctgggattacaggcgcccgccaccaagtctggctaattttcatatttttagtagagatggggtttcaccatgttggccaggctggtcttgaactcctggccgcaagtgatctgcccgactcggcctcccaaagtgctgggattacaggcgtgagccactgcacctggcctatttgtagtgtttttttttgagatggtgtttcactcttttttcccaggctggagtgcaatggcgtgatcttgcctcactgcaacctctgcctcctgggtgcaagtgattcttcttctgcctcagcctcccaagtagctgagattacaggtgcctgccaccacgcctagctaattttttgtatttttagtagagacagggtttcaccatgttggccaggatggtcttgatctcttgacctcgcgatccacccacctcggcctcccaaagtgctgggattacaggtgtgagccaccgtgcccggcctatgtttagttttttaaggaacctccaaactgttctccagacatttccactaacagtgtacaagggttgccttttctccatgttcttgtcagcatttgttattgcctatcttttggatataagcctacttggggtgagatgatatatctttttttgttttgttttgttttttgagacggagtcttgctctgtcacccaggctggagtgtgcagtggtgcgatcttggctcactgcaacctctgcctctgtggttcaagtgattctcctgcctcagcctcctgagtagctgggactacaggcgtgcgtcaccacgccccgttaatttctgtacttttagtaaagatggggtttcgctgtgttggtcaggctggtctcaactcctgatctcaggtgatccgcctgcctcagcctcccaaagtactgggattacaggcatgagccacccgtgcctggcctttcattgtagttttgatttgcatttctctgatgctcaatgatgttgatcaccttttcatatacgtgtttgctatctgtatgtcttcttttgagaaatgtctattcagctcttttgcccatttttaaattggattattgaatttttttttcctattgagttatttgatctccttacgtattctggttattaatcccttgtcagatgggtagtttgcaaattttttcctcctattctgtggcttgtctctttgttgattcctttgctgtgcagaacctttgtaacttgatgtgatcccatttgtctacttttgctttggttgcccgtgcttgtggggtatcactcaagaaatctttgcccagtacaatgtcctggagaatttctctaatgttttcttttattagtttcatagtttgaagtgttagatttaagtttttaatccactatgatttgatttttgcatatggtgagagataggggtctggttttattgttctgcatgtggatatcccgttttcccagcgccatttattgaagagactctcctttccctaatgtatgttcttgatacctttgtcaaaaatgaattcacggccaggcgtggtggctcatgcctgtaatcccagcatcttgggaggccgaggctggtggatcacctgaagtcaggagttcaagagcagcctggccagcatggcgaaaccctgtctctactaaaaatacaaaaattagctgagcgtggtggcgggtgcctgtaatcccagctacttgggaggctgaggcaggagaattgcttgaacccgggaggcggaggttgcagtgagccaagatcgcgccactgcactccagcctaggggacaagagcgagacttcatcttcgtccccccccgccaaaaaaaaaaaagccactgatttttttttttttttttttttttggagacggagttttgctcttgttgcccaggctggagtgcaatgggtttttttttttttttttttttgagatggagttctcactctgttgcccaggctctggactgcagtgacgcgatctccactcaccacaacctctgcctcccgggttcaagcaattctcctgcctcagcctcccgagtagctgggattacaggcatgcaccaccatgcccagctaattttgtatttttagtagagacagggtttctccatgttggtcagactggtctcgaactcctgacctcaggtattctgcctgcctcggcctcccaaagtgcttgctaggattacaggtgtgagccactgtgcctggacaatgctactgattttttttttttttgaaacggagtcttgctctgtcaccaggctggagtgcagtggcgccatcttggctcactgcaaccttcacctcccgggttcaagcggttctcctgcctcagcctcctgagtagctcggactacaggtgtgcatcaccacatccagctaatttttgtatttttagtagagacaggatttcatcatgttggccacgatggtctcaatctcttgatctcacgatctgcctgcctcggcctcccaaagtgctgggattacaggcatcagccaccgcacctggccaatgctactgatttttatgtggattttgtatcctgcgactttactgaatttattagttctaatagttttttggtggaatccttaagattttttaaatataagatcatatcatctgcaaacaaggataatttgaattcttttccaatttggataccctttatttctttctcctgtctgattgctctagatagaacttccaatacagagtcttcttaataaaacataatcataggatcatatatagtcatataccacctttgccatatcctgttggttagaagcaagtctcaggttttgcccatacccaaggtgagggattgcacaaaggcatgaacaccaggaggcagctactggtggggaagaccttagaatctgtctgccacatccatctagagcttaaacttactcatgtgtaatgtgtgaattgaggatatatttcaattttttttaacagccagttttctaagcatgattagcaggcatctgcaaggtagcatgtatgttggcataggttatggaaaggaagtcagtgtttcctgcttaaaattcctctctgacaactggagcctgttggtgagggggagccttgttctgttcttggcacactggagtgtatctcagaggccttcttgaacagcctgtaattcctgcacatcctggctagatgaggtgggggtcttggtggtgcacacaggatgccacaatccacagggaatggccccttggggtggagaagggtaatgaattattataggcaaatcctgcagtgttgaggtggtgggccagccccttcctgtgttggttgttaacatgcagttaaggctgtggacagatggatccaaataccaaacagttctttctagaactaggcaaggacttgaaggagggagtctgtgatcagccagctgggaaatctgtggaggaagacattgtccaaaccaaaagagggatcagcagcctcttgataattgactatgttggtaagggcatccactagccctggccatttagatggtgtctggccaagagaggggcaggttggtgatgaaatctgttgtgatggcatcttattttcatatttttaagtctattctattagcggtgcatgggattgggattgcttatctgtgactataacagtatcgcaggtgctgctttgctggaagggactgagctgaagagggcctgtgggccagattggaggtaggaatgtggaatcatagtggctctctagagtggtgtggggcaattctgccaaagcagctgctcagactctgggtcagcatctgaggggctttgccccttatggacatctgcttgatgtccctgccagattagctgggttaaccatgtccaaggctacacgtaacagtatgtcaccataaacctcaggaagaacagagtcagttccaggctccctcctgccggcccctgatgcccttgggcattctgcttgttgaccacttggtggttttgatcttggtcacaagtgatggaaacatggagacctgggccagggcaggctccttatgtcagcaggtaggcagtgaagggaagcagatggggtgcagctccagcagatgcaggcctaggtgcagtactgatgggctccttggcctgggaaaagccccttaatgatcctgcttcttttctgtaaaatgggggcaataatgcctacttctcagaaggcttggggagattagatgagctagtgtggagcacctagcacagagttggtgccagaaggcacttgataagtgatggctgctaccgctgttgccatgttaaggcaggttagattaggccaagatcatggcagaaatggagatattttaggtctgcagttgtagcttccctgactgcagactgtgaaccctacatgaccttggcaaatgcatgggcagctgcagtttgccctgatgtcattagaagcttccagggaaggataaagacctctgagacccctgggctgctcagaatctactaaatgggtggatagggcatgagggtggcccctgccaaagggacccctgtttatctgccctgtctttttgttgtctaattccccctgggtggtggagcctggaaactgtgaggtccagcagagcattccatacttccacataccctgctgccctagagtaaagaggctggacaggcctggagtggtagggaccacaaatctagggaagaatggagtccagagccaggagtggggaaagtccaaaaggaaaacctcttttgttggcccaaggcagttgtcaaagttgggatcatcaggaggcatgtccagagagatgagagaaaattctgagcccagaacaagggcaggtggggagggacagctgggtggaagcgccggtcctaagcagggagaggagacgttctgcctgaaagtgtcggcttaaagaatctgtttctgagcctcctgtgtccccatccccccgtcagctgacccacctcttcctgttcctccagaccaagctgctgacccagtatgtgctgagtctggccaaatatgaccagaactatgatattcgcgaccgggcgcgcttcacccggcagctcatcgtcccttccgagcagggtggggccctcagccgccatgccaagaagctcttcctggcacccaaaccagctccagtcttggagtcatccttcaaaggtgggagctgaaatcaagggtaaccttcctaggggaatggaaaggaactggccagagtctctgccccagaccttcctgaggcccctagccaggcaccaggcttctgtggacagtcctgctccctggctcactccttttgtccctcctgtggcaccaggaattactctttcaccctcccataaccactgccagcatcatctcacctgagggtctgccttcctggccaggatggacttgtgcctcctctcctctcaggctcccttttccatctccctccctgagcagacactaggctttggaatacataccaagatcttaaataccaaggacccaggaaggcagaaagcaaaacaacacacaaaggagaggtgtatatttttataaaggtcctgagaaagcagttgcctgcattctgtgagcttagtcactacagtcagtccaaatcccaggccccagggcttcagccttgcctctgttcctgggcttggcccttaaggcctcttttcccaagacaacggccttgagatgggcctgggagggaagggtcctcccgctgcttctccgggccccaggagtggaagccaggaacctacacagaagagagcctccttcacaaagctcagttcttctgggtatcttttcgttctttttctcttccctggacctcacgaatggggagattctgagggtgggcacagctttgaaattctcccaggaagaaggcaacagtccctttctccccgacaccatcctcactcacaggcctgtgctgccctcctccagcagtgcctcaactctgatccagacttctacacactcatgctctgactgttcatccctccctgctgagtccagagcctgactagacgtgcatgctgagcagacaggtcggcagcatctgtgggcccagagtctcctcctgcccacctctgtaggctgcctttccctggccctcagtccctgctctggcctggccagacagccttttcttccagcatgtgggcctaaaggtgcagtcagggtggaagagccattagggcacacatccatctccttcccctacccacctgggaagtcccaaccagaatcaccacccagccccacctggaaaacagctcccagagctttccctcactgctgctacctgcctgacctctaaacctatccctagaccgggaccacttccagctgggctcactgtcccacctgcttaatgccaaggccacaggctaccaggagctcccagactggccggaggaagccccagacccatctgtgcgcaacgtggaggtcagcggggtggagggttgaagtgtgtgtgtgtgtgtgtgtgtgtgtgtgtgtgtgtgtgtgtgtgtgtgtgtgtgtgttggtgggggcagacagtagggagccctggcagtgccggcccagccctcctaacaccctcccccacacacacaggaagaagatctctcccttattgagactcacgtgggcctgttgggcgaatacactgaggtcccaccttcgtgtgacgtgtgctctctcccctgccctgtctgtgtccctcttcttcccctgtgtgttgtgctcctgggccttcccatactctgtttccaccttggtttggcagtgctcctctgtgagcagcattccctcccctccatggacagtgcccctttcttcctcctctgttattccctttgtgggacagaccaggtagggcctcacaaagaggtggaataaagggtaagggcttgtgcctgcctgccttctccccaaccatgatgaaatgaccctgcaccctacccccatctccaggtacctgaatggaccaagtgctcaaatcgggagaagagaaaggagaaggaaaaacccttctactcggactctgagggggagtcaggccccacggagtccgcagacagtggtgagcagatggcagagctggggtcctctgtgctctgcccatgcatctgtgtgactgactatatgaggggtatatgtatatggttgtgtgtctaggggtgtgcacctgcttgtgaattgtttgtgcacctgagggattcatgttccaggtgtgtgtgcttgtgcaggtttctatccatggagtccatctgtgtttctgtcagttccagctggcatgtagggctgggggcaggtcagagaggtttgagggttcagtactgaatgtgaaggtggaacccaggtgtctgctccagacccaaggaggcctgcatatgagggaggaggcctcatattgttcctccacagaccctgagtctgagagtgaatcggacagtaagagcagcagtgagagcggctctggggagtccagcagtgagtccgacaatgaagaccaggatgaggatgaggagaaagggagaggcagtgagaggtgagaagggagctagccagatggctggtggggttcagggggctttcctggaaagagggctagcattgagctttagccagtctcctaagagcccctgagcccctcgtgagctgggtggggctgtcagctcacatgacgcctactttcgctggctgcaggagatctctgaggcctcatgggctggtgtggagaagcaaccagagtcctagagcctgagctggcacaagctggcttcaagctctcacggggtccctgctataggacctcaggtgtgaaccctcctggctcaggctccccacaccactccagcttttcagcatttctcctgcttctgtgaagcaaggagggagtgtccaggccaggcctgagccaacctttcccactccttcagtgaacagagtgaggaggatggtaagaggaagacaaagaagaaggtgccagagagaaaaggagaagcgtcatcctctgatgagggcagcgattccagcagtagctcatcagagtccgagatgacatcggagtccgaggaggagcagttagaacctgcctcctggagcaggaaaacagtgagagccttggggcagagtcagggtgtgctcatgggccagggccctccccaacctctgggccaggcccagacatctatctccctaccatccagaacagaacatgacatcttctacccaacccagaacatgccaaggtgctccccttccccacacccacatcccatttttctctttcagcctcccagcagcaaaagtgctcctgcaaccaaggagatctccctgcttgatctagaggattgtgagtttgggtggtaaaagtcacaggggaaaggaggcctggggagcatgaattagaacagcccatagggactctggatcgggttcctcaggtcttgtgggagcaggggagcagacagaacatatcttcaggcctgagagggcagcagggctgacctccccaggtctggggttgaggtctaggaatgggtattttgcgagagcctccaggcagccatgtgccccgctgtccatggtgctgaaatgcgtgctccttgatccctaggctccctgctcaacccaagccacctccactttgcctcctcatagtcttatctactcccacagtcacccctcccagtgtccagcctgtgtctcccccagcaattgtgtctaccagtctggctgctgacctggagggcctgacactcacagactccaccctggtaccgtcggtgagtgggatggaggaggggaccgggctggggcagggacacatccctgtgctgcatcctatggtgtggatgtgtgtggggggtgggtgtgatggaggatgtgatagctttgagtcccagctgctggatggccctaggggacaatgctgggacaggctctctccatcttgctcagttctgtccttccctacccctccactctagcttctgagtccagtatcgggtgttgggcggcaggagctgctgcaccgggtagctggcgaggggctggctgtggactacaccttcagccgccaacctttctccggggatccccacatggtgtccgtgcacatccacttctccaacagctctgatacccccatcaagggcctgcatgtgggcactcccaaactgcctgctggcatcagcatccaagaatttcccgaaattggtgcgaagggctttggatggggtggaggaggaggctcctgggcagagtcagtctttctgtggttgctgataccctccttgtgccaggccaggggccaagctataggggcacagagatagcatctaacatgatcaacactctggtggacaagacagatgatgaaataagcaagttcacatcagggcgggaggtgcttgcagcagcagatttgggccttggttgtttcaggactaacttaaatgtggtgagggtgagtgggggaaagggtgcttagagttcaggaggaaaccgggaacagtctccagcagccaagaaagccaagattctgtagagggctggtcagctgtgacagtggagaggagagtagggctaggctgggttctagacctatcaggtgatggtggccctccctctccccttcactgccttataccacttcagagtccctggcacctggagaatctgccactgctgtaatgggcattaatttctgtgactcaacccaggcagccaacttccagctgtggtatgtgcccaactcgaggtgggggtgagaggatgggctggaaagggacagggtaacaatgaactggaaatggaggtggtgcttagtggggatacatcatgattgggtgggtctggaagccatctcaggccctcattcctgacctcactctttcactgcctccaagctgtgcctctacacagggtgggaagtgaggggagagatgacagccttaattcttctccgtttcctcccacccctcccagcacccagacccgacagttctacgtctccattcagccacctgttggggagctgatggcccctgtgttcatgagtgaaaatgagtttaagaaggaacagggtgagtgctccctgggagtgggcagagagggaagtatagaagctgactccagaatgtccagcttggatggtagggagaatggtggtgtccttcatctagaccaggggtcagcaaactttctgtaacgggccaaagataaatgttttaggctttgagaatcatgtggtctctgttgcagttacaacacgactgtggctgttgaaacatagaaacatccacagacagtatgtaaatgaacgagtatggctgtgttccaagaaatttccatttatatttatagatactgaagtttaaatttcatgtaattttcatgtgtcatgaaatattaatcttttgattgctcccccaacacttaaaaaatattaaaaacattgtgggccatataggtggtgggctggatttggtctggaggctgtaatttgcaaaacctctggcctagaagaaagaagagtggcttgggcaagggaggagggaagatcatggttagttttggataagctgattttgaaatgcatttgggaaattcaggaggagctatttagtatgcaactgaaaatatgggtctatgcccaggaaacactttgaagctggagtcatgaacatagaggtggtaatggaagctgtgaatatgaatgagatcactctgggaggtgggagaaaataggaaggccaaggacagaaccttgggggaaaacctgaattctgcagaagaaagaggaggggagggataagagaaggagcacagggagaggtgggaggagaaccaggagagacaacaaggcagaaggtgtctgcaaaccacagttacctaagaccttcagagtcagcatataaaaggctactgccaacctgagggagagagggtcattgctaaaggagggacagaggccaactgcagtgggttgagggagaccacggctcaagtacatgcagtcctctttggaggactttagccatgaatgaggagggagacagggcattggcacgatgaaggatctcacttctggaaaggattttttggagacggggacacttgaacatgaacagattgaaggaacaaaaacaagaaaatgttattagtcatgaatgaaggggatagaagaaacaggagagggatgtcagtttctaaaaggaggtgaagaataggggaagcagtggagggaggaaagaggctgaagagaagactgctggtgtgcaggagagcagacggaggagctcccatggggggcctggatcatgtgagtggagagaagtcagccttgcagaatgaggagttctgggggtgctgtgaaggtttggaggcttcaggagccctggctaggtctggagctgctactgcagaggtacaattaaaaatgtacctgtgaatgctgcatgtgactactggattctggctgagagatcacagcagccacctgtgatctttttgtgagggcttagcttccaggagctgagtgggagttgaatgtgggttggagggccccccaggaaagatcaaagggtgtgaggttcaggatgggcgaacctcttaagaactgactggccactctcaaggggctggtagcccagatgtctgatggaggaagcgccaaatcagtctttggtaacaacatggataaaggcctgggtgggaggggtagagaggctgacaaaggcttcctgagggagggcccagtctgagagggaagtaccttctccccaagactgatgatttaaattctgacctgccctttgcatgataccttcccagcctgggagaacttgttgctcagtaagcagacccaggtgctggcctctgtacccaccatggcctctgccctcatcacgacctctacccccaggaaagctgatgggcatgaatgagatcacagagaaactcatgctgccagacacctgtcggagtgaccacattgtggtgcagaaagtgactgccactgccaacctgggtcgtgttccttgtgggacatctgatgagtacaggtactaggccaccagtagaggggaaatgatgagcatgggggccctggtttgaaggaggagccccagctgctgatccccttccaaacacagtcacccttagcagctcttcctcaccccttctattcccacctcaggtttgcagggaggacactgactggtggaagcctcgttctgctgaccctggatgcccggccagctggagctgcccagctgactgtcaacagcgagaaaatggtgattggcaccatgctggtaaaggatgtgatacaggctctgacccagtgacttccaaatgctgtgacctgtttggctc

SEQ ID NO: 15419 - DNA, 50595 bp, Homo sapiens
gagaaatccgcgcgcagcctccgccgctgcacactgcagcctctgctgaacccctgccgcgccgccgccttcgccagcccggaccggaccggcccgccttcccttcctccgctccagccggcctccggccccgcaacctcctcctcggcgaagtctccctggccgccccatgtcggccgcccccgcctacagcgaagacaagggcggctccgctggccccggggagcccgagtacggccacgaccccgcgagcggcggcatcttctcctccgactacaagcggtgagggagcccgccaggaagctcgcgggagggttggggccggggaccgggcgaggcgcgcgggcaccatggacagcgcccggccccagcgccggccccgccccggccgcgccgaccggaagcccgcccggccccctcctgcggcctggagccccggcccagcgcgggcagcgctggcaccccggctccaggggccggcctaggacgcggaggggggcagataggggctggcgggggatgggccagctcagtttcgagaggagaaaccctccggttccaggtgtttctccggtttgcggcgttgcgttaggggttcccttcctttttcgtgctaggcgggttggcttcccaaaaatgtgggggaggggtctgagtcagcgaacttgagcttgagcctggggcctcttcaggaaggcgggccctggatgtacttgcacagcctcccagcttggccctgctgcaaattcatttcccctccctctggtccccatctccatctgaccctcacatccctgctcctggcattgcccctgtagttcagctccaccttcacaccctcccccacctttgattcgttcgtttgtttcttcatttgtttattcgtaaattctgcaacaagcatttatgaaaagccaactgtgtcgagtcctgaactagtcacggaatacaactgtgaacatgagacccttcttgtcctcacgatgctctagaggggagcacagatgaagaagcagtcagggacagtcgagtgtaatgggggcagtgggagcagggagaggacctagtctctggcgccggagagaaggaagacaggagcgtgaggtatgttccaggcagaggaaagggctttcaggaaggttgagagccaggccacaatctgtgtgagccactggactgaccagaaaagagggtggggaggactcctgaaggattctaagcaggcgacataatcagatttatattttagaaggacgtcaggctgctgcattgtggagaagagattggaggtgggccagattgaacaagagacaagggaggtgggtcttgaagttcacaggcctggcatgattgtggcctagaccaggggagaggcagaagatttgaggctgtggaagaggtggaagcctcagacctgatgattaattggatattgggtgggggtttagagggacagggggagaagatgaggattttcacgcacgtccatgtgaagagaccaccaaacaggctttgaacaataaagctttttaatcacttgggtgcaggccagctgagtccgaaaaaagagtcagcgaagggaaatggggtgggaccgttttacaggatttgggtaggtagtggaaaattacagtcaaagggggttgttctctggcggtggggggacacaaggtgctcagtgggggagcttttgagccaggatgagccaggagaaggaatttcacaagataatgtcatcagttaaggcaggcacaggccattttcactcttcagttacttcaggccatctggatgtatacgtgcaggtcacaggggatatcatggcttagcttgggctcagaggcctgacattcctgtcttcttttattaataagaaaaataacataaaatagtgttgaagtgttggggcagcaaacattttggcggggggtggtatggagagatactgcttctccatagccttgaagggctgcttcgagcgggattggggtggcgtgggaacctagagtgggagagattaagctgaaggcagattctgtggtaagggatgatattgtggggttgttagaagaaacatttgttgtataggattattggtgatggcctggatacggttttgtatgaattgaaaaactaaatggaataagagaaggagaaaaacaggtattaaaggactaagaattgggaggacccaggacatccaattagagagtgcccaaggaggttcagcatagccctgccagcaaagattatttatttactttaagagggagttaagactggcagtttggggatagcaccaggagatatcagctgtaatggtttggagaaacagtgtaaaccggcagtgtaaacaagagcagggcatgtatgagtagttgagtatggtgaataggagtatgactagtcagaagatagtagggatgacaagttttctggggcacagtccaagttggtctggtgtctggaatgagactggggcctaataaaaaggagcatctatacaggagcttgaatgggctgtaccctgcagcattccgaggacaggcccaaattctgagaagggcaagtggtaaaagtattgtcagtcctttttaagttggtggctgagcttggtgaggtgtgtttttaaaagaccattagtccgttctaccttttctgaagattgaggatggtaaggggtatgaaggtttcactgaataccaggagcctgagaaactgcttgggtgatttgaccagtaaaggctggtctgttattggactatatagaggcgggaaggccaaactgaggaattatgtctgacagaagggaagaaatgaccgcagtggccttctcagaccctgtgggaaaggcctctacccatccagtgaaagtatctacccagaccaagacgtattttagtttcctgactcggggcatgtgagtaaagtcaatttgccagtcctgggcagaggcaaatccccaggcttgatgtgtagggaagggagggggcctgaacaatccctgaggagtagtagaatagcagatggaacactgagaagtgatttccttgaggatagatttccacaatggaaaggaaatgagaggttctaagaggcaggctagcggcttgtaacctacatggaagaggttatgaaatgacgaaagaatagaatgggcctgtgaggctagaaggagatattttccttggtctgagaaccatttgccttgtgtgggaagagattcataggtgtaagtttcattgggggagtaggtaggagtgactgatgagaaggagaaaaactggccatgagggacagaagttggaatgctagctgcttttttagctaccttatcagcataagtgttgccctgagcgatgggatctgatgccttttgatggcccttgcagtgaatgactccagcttcctttggaagtaaagcggccttgagaagagtttttattaaagaggaattaatgatggaggacccttgtgtaatgaggaaagctttttgcccatataacagcatggaggtacaggatatggaaggcatatttagagtcagtataaatattgacacatagtccttttgcaagactgagggctcgagttaaggcaatgagttaagctttctgagaggtagtggaggggggcagaaagtatatgcgtcaggtgtgaggaagaaaatagattttggaagttatgagaactgtagagagtgagttgagcatagtttgtgattttgagggcctctgaaagtattaaagcagcggcagccgctgcacgcagacatgagggctaggccaaaacagtaaggtcaagttgttcggacagaaaggctacagggcgtggtcccagctcttgtgtaagaattccaaccgcacagccctgcactttggctgtgtgtgatgaaaaagggttgggatgaattagggagacctagtgtgagagcagcttctacggctgtttttaaggaatggaaaggagtggcaaaaggatttaggatctgtggggtcagctaggtttgcttttgtgagtttatataatggtttagtcaggatggtaaaactaggtatccaaaggtggaagtacctaaccatcccttgaaaggaaaggagttgttgctttgtagaagggattggggttcgggagattagccggacatgatcagcagggagagcacgtgtgttttcatgagaactatgccaagataggtaatggatgaggaagaaatttgggcttgactgaagtaatgggggctgtccgtgaagccttgcggcagtacagcctaggtagtttgctgagcctgatgggtgtcagggacagtccaagtgaaagcgaagagaggctgagatgaagggtgcaaatgaatagtaaagaaagcatgtttgaaatccagaagagaatgatgggttgtggaggggttgtggagggaggtattgaggaggagagtatatgagtttggcaccacggggtggataggcaaaacaatttggctgacaaggcacagatcctgaactaattgtaagacttgtctggtttttgaacaggtaaaatgggggaattgtaaggagagtttataggctttaaaaggccatgctgtaacaggcgagtgataacaggctttaatccttttaaagcctgctgggggatgggatattgacattgagcacggtaagggtgattaggttttaatgggatggtaaggggtgcatgatcagtcgccaaggagggaatagaggtgtcctatacttgaggattaaggtggggagatacaaggggaggatgtgaaggaggctttgaactgggggaaaaggtggcaatgaggtgtggctgtagcctaggaatagtcagggaagcagataatttaaagtgtctcggcctaataagggaactgcgcaggtggggataactgaaaaggagtgcataaaagagtattgtccaagttggcctcagagttggggagttttgagaggtttagaagcctggccatcaatacccacaacagttatggaggcaaaggaaacaggcctttgaaaagaaggtaatgtggagttggtagcctccgtattgattaagaaggggacggacttaccctccactgtaagagttacccaaagcatctgtgatggtccaggaagcttccaaggcgattgggcagtgtcagtcttcagctgctaagccgagaagatttgggaaggagtcagtcaggcagccttgggccagagttccaggggctctgggagtggctgccaggtgagttggacagtccgatttccagtggggttccacacagatgggacaaggcttaggaagaatcctgggctgtgggcattccttggcccagtggccagatttctggcacttgaagcaagatcctgatggagaaggtcctgtaggaatgcttgactgctgcagcttaggcattttgaagttcttgtgtactggagatgtggctggggtttctctcacagtggaggcaaggaactacaactcagaaatacattgctacttggctgcctttactctattattgtacaccttgaaggcgaggttaattaagtcctgttatggggtttgagggccggaatttaatttttggagttttatttaatgttgggagtggattgggtaataaaatgtatattgagaataagactgccttttgaccttttagggtctagggctgtaaagcgtctcagggttgctgcccaacgagccatgaactgggctgggtttttatatttgatgaaaaagagcctaaatactaactgatttggcagaggtcggataaaggaaaaggagcgttaaccttgactatgcctttagctccagccacctctttaagaggaaattgttgggcaggttggggagggctagtcgcagaacaaaactgtaagccggactgggtgtggggagaggaggtgatagaaggattatagggtggaggagcagaagctgagaaagaattggagtctgattcagcctggtggggagtgacctgaggagcattctggggattaggtgagaggtcagatgggtcggtagaaaaggaagattggaagattgaaaagacgcagcgacgcttggggttgggactgaggggacaggcgggagggaaagaaggaggatttgggatgagtcgcattgggaacagagactagggagggaccgatgtgtaaaagaatgcctggacatcaggcacctcagactgtttgcccattttacaacaagaattatctagatcttgtaggatggaaaaatcgaaagtgccgttttctggctatttggaaccattgttgagtttgtattggggttaagcggcattgcaaagaaaataaggcatttaggttttaggtcaggtgtgagttgaagaggttttaagttcttgagaacacaggctaagagagaagaaggaggaatggagggtggaatgttgcccacagtgaaggaggcaagcccagagaaaagagagggtagagacacggagagaaggggtggggggtgctttgccccccaggaaagtggagagaaaagagagggtagagacacagagagaaggagtcgggggtgcttgtcccccaggaacgtggagagaaaagagagggtagaaacatggagagaaggggtggggggtacttgccccccaaaaagtggtgtttgccactaagggtgaaagatcaaggcaggcatcctcgcggtgatcagacaactctgaaacgtgggtgaataatcaagcaggcgtccccgcagtgattaaacaccaagggaagactgtcttcctgagtccgtgatcggcgccggagttttgggttcacagataaaatgcatttcctgtctctaccagaaaaggaaaggaaccgaaattaagagaagggagagattgaaagatggcaccaagattgaaaggagaaagaggttgagggatagtgagagaggttggagaagagagtaaaaagaggccgcttacctgatttaaaattggtgagatgttcctcaggctggttggtctgaggacccgaggtcattaggtggatctttatcatgaagcaaagagcaggaggacaggggattgatcttccaagggtggtcccccgatccgagtcatggcaccaaatttcacgcacgtccatgtgaagagaccacccaacaggctttgtgtgagcaataaagctttttaatcacctggttgcaggccggctgagtctgaaaaaagagtcaacgaaaggagataggggtggggccattttataggatttgggtaggtagtggacaattacagtcaaaggggggtgttccttggtgggcaggggcgggggacacaaggtgctcagtgggggagcttttgagccaggatgagccaggagaaggaatttcacaaggtaatgtcatcagttaaggcaggaacaggccattttcacttcttttgtgattcttcaattacttcaggccatctggatatatacgtgcaggtcacaggggatatgatggtttagcttgggctcagaggcctgacaaggatgttactcaggttactagttcctgcaactggatggatgatggtgttattcagtgtaattggaaataaagatgttacaagcaaatttgtggaaaattaatgttgagcccagctttggacatattgagattgtaaactctgagggacatattaccctattaggtagctggatattacgatttgggttccaggagagagattagggaattattaacatatgtatgttaattaaagccacagaagtgaagataactcagggaggaggtataaaatgagttcagacactgcacaagtctgaaccctgaagacaccaacattagaagtgaccagagaacagtggaaagtgtttcaaggtacccaagaggtgaactaaaggctgaaagaaaacaatgtaatttcaagaaggagggagtggtcagtagtttcaatgcccattaaggtcaaatcaaacaaggaaaaaaatcatgaccattggttgacaaagaagagctcaattcctttctactctattccccacctcctgccctgggagataaattctggcaaagtaaggagaacaggagctagattatttctttcccagcattctgttgtggatgatttaaaacatacagaaaaatgaaatgaataatacaatgaacacatgtatatcatccatctagattcaactgtcattgacatcgtaccttatttgctttatctaaccatctattcgtatactttttttggttgaaccatgttaagttgcagagatcatgacccttcaaccccacattctaagtcgacatctaaagccagattaaaatgaataaaggagcacacaggtggtaagtagataaaacagtgaatggaaattttgctttcaagaaatttgactgtaaaagagaaagctgctggaggagaacctcactcagttcaaggaagtttgtctattttgttattttgggtttttttttttgtttcttaaaatgtatgactccatatttttgtttattattaatattaggcgggagagcctagagcaagtttaactgctgatgggaaggagcgattggtgggagagaggctgaagggaagaaaggaagtacagaacactgagtgatgggaggggaggcttactgagctgggtgggaggactagcctgggagcagggaggaccaactctgcccagagggaagagggcaggaggagaggagagtataaatgcagatggagactgggtacagtggctcatgcctgtaatcccagcactttgggaggctgaggcgggcaggtcacttgaaatcaagagttcaagactaacctggccaacatgtcaaaaccccgtctctactaaaaatacaaaaattagccagttgtggtaacgcatgtctataatcccagctactcaggaggctgaggcaggagaatcacatgaacccgggaggtggagattacagtgagccgagatggcaccactgcactccagcctgggcaacggagtgagactccatctctaaataaataaataagtaaataaatgcagatggatgggagtctggggcagggggctgcaggggatttcatctaaagactttccctttttcgggaaccaggtggtgaagccataagggcaaggctgggaatggggacttgagggtcaaaggggtttcaaatacaatgaagaaagccaaccaggccaggcgcggtggctcacgcctgtaatcctagcactttgggaggctgaggcaggcatatcacctaaggttgggagtttgagaccagcctgaccaacatggagaaaccccgtctctactaaaaatacaaaaattagccaggtgtggtggtgtatgcctgtaatcccagctacttgggaggctgaggcaggagaattgcttgaacccaggagacggaggttgcagtgagccgagatcacgccattacactccagcctgggcaataagagtgaaactccatctgaaaaaaaaaaaaaaaaaagccacccaccactggcaggccagtggcattggagaccagtgggacaagagggccaaggatgtgagagcagttggagggatagacacaggggttgcgggggagggtgctaggaggaagtagagataagagaaggttgatgggaaggaataaatcaagtattggctctggaaaggcaggtgaggattaagatgcctagggtcagtgagaagagggtatatgagatttctcaggaggctgcagtctaattgtggcagtgggattggagctgaagagggcatctctcacctctctatcaactccactgaccatctagtcccttgcccagagactaggggtaggcttggtctcctgtccctgcccttctttccctctagaggccttgtctctgagcagtgaagaggaaaccggagcatccctccctgccagtgtccggttaccaagttttgggggcgggccatctggtgactgtgacaggagccccagcgccctggccagctcagtccattcctggagaagaacctgatgcagcgattcctgcagctcccgggggccgtggtgaggcctggggtcagaggggcctgcggagctgatcaagaggctgctagccctgtgctggctcccgaaggtgggcccccactccggtaccaggccttggagcctgaggagcttcggtggctgcaggcccaggaggaagacacgaccccagaagcatctctggaaggaccttgcccagaggccagccagagccagagccagccactacggtatagaggaacccacaggaaccccctacccacacagccaggaaggccagggatgggcagttgcactctcagcccagacctcttccggtcccacctcctctgatggaggcttaggctggcatttagggtccaggctgggcggagaaggtggtcaggggcaccgtatgggggctgagggtatgagtgaggagagatgaggggcttaactccctggaggctctgaggggaggaggatagtaaaatatttgagggttgaggtcccaccttgacctctttctccccacaggcccccactggagtgggctctggacgaggtttggggacaggatacagcacagacagggtttggccagccactgcctgccagtggactggaacttaggtggtaagaggtgacagcgaggtgtatatcaagggaggtgagcatgactgacccccagtgccatgccaggccccctggctggctccagccacccccagaagagtcccttaggctaggtcagactaggggtcaggtcagagtgagtgcagcagcgtaaggggatctgactatgggagataatgtttcatggccttagggtgttgtgccttagtccctgcctctgcctcttgggaacagaagttggtgggagtgaggacgagaggcccagggcggtctcacctcaggtggtggctgcggtctgtgtcagtgcatattctgtgtcagtgcatattcgacagtcaatcttacctgtgctggctgctttaggcccagtggtcctgccccctttcattccccttctcctgcaggggcctggaatgtactcactaggctgggtggggaggatgccctggggtgtgtgcatttgacaggcgcatgtggcatttgtgggtgtggtgaggaagggaatacccagagttaaaggagattgggcaaacttggccctccttccacggaagcccagggaaaagccatcccagggtgactcctcagaagatcagaggacccttggggctggatatatttgatcttagaagcctacatttatcatcaaaaatctcaactaggagtccactgaccattttggtgaatgagactggagaggccaagtttggtccaagttatctgtgtattagatgtgatgcggcatgtgtgtgtgtgtgtagggggacgtgtgtggggtgtgtgtgtctctatgagggtgtgggggagcggggagaggtcttgtgatatatgtctgtaggggacatgtatgggatatgtgtgtctataagagggtgtgggagagtggggagaggtctcctggtggtatatgtctggggggtttgtaggtgtgtaggtgagttgtgtgggtggtttatgtgtgtagagtttttctgtgggaggtgtctgtatgtgggggagtgtgtttctctgggcgttgtgtaggcaggattttgtgggtgtgcgtgggtttatgtatggattctactagtgtctgcgggacctgtaggtatgtttgtatgagctgtccgtgaggtgtaggtatgtcgggggacatgggagtgtctgaggtatatgtgggtggtatcaatgtgtagttgtctgtggggtgtgcgtatgaaggatcctgacgtggagtgttgtgcattcatatctcagggaagctggtgcccagctctgtcatttttcctaggccctcggtgctgcccacgcctacccagctcaatggtctgtacctatgaccatgcccctggtgtcctgagctcagcctcctacccactaagaaactcaacagtctggtctgtgtttggcagggtaagagggtgattgtcttctggccctggcctgaccctggaagagtagaaggtgtcctctgatttggggggcatccccccaggtgagggagtttcagataacatgatggggctggatattttcttctgtcctcacatgacagatagcgagggcctcagataatgctggaaggcatcatctttctattttgctttccatcaaaaatctctttgggaaagacagtttctaacattcttgggatagtgacttcttagtgcccctcttcttgtctgacgtcaggtactcacgcatttctgcagccctgtgactaagttgcgtgttctgtctggttcttctcttcctctcagcattcatcacttgtttctcagcattagcagcagtcatttgccactttatgattgttatcatgctctttcctctcctaacagtgctatccccaatttctgattttctgtcatttctaaatgttgcatgtctgtgactaactttgcacacattgattttttttttattttttatttttgagatggagtctcgttctgttgcccaggctggagtgcagtggcgcgatcttggctcactgcaagctccacctcctgggttcacgccattctcctgcctcagcctactgagtagctaggactacagacgcccgccaccacacccggctaattttttttaaattttttagtagagacggggtttcaccatgttagccaggatggtctcgatctcctggccttgtgatccgcctgccttggcctcccaaagtgctgggattacaggcgtgagccaccgtgcccggcctgatttttaatttttatcactgtgatatttctcaagctgggttcttgtgcctgggtcaaagctgtgggttatcagagtgtcatctgggaaattagtgtgtgtgagtccccacacacagctgctcaccacattttggaattgtcttggcaacatatgagtgcatcagtttcacacaattctatcagctatatatagacacatttttttcatgggtttattaacaattctctgatcacttcgtgatcaccagttctgcatcctctgagtatggttagccacattgttcactgcacaagggcatctggccaaggaataccagcccatgctccacacacagaatggggagcaacagctcagggctgtgtctatctgtaggggcatgcagattgaaaatgggcttgtagcagccctgacagtgaatgctgcaaagagaccttatacatgtatatcagttccttttttaaatttttttgagatggagtctcactctgtcacccaggctggagtgcagtggcgcgatctcggctcactgcaatctccgcctcctgggttcaagcgattctcgttcctcagcctcctgagtagctgggattacaggtgtgtgccaccatgcccggctaatttttgtaattttagtagggatggggtttcaccatgttggccaggctaatctcgaactcctgaccttaagtgatctgcccaccttggcctccaaaagtgctggaattacaagcgtgagccaccacacctggcctctatttcgaatattaaactttaatttaccatatcccaaatatttttccttttgttgctattatgggctgaattgtgtccctccaaaatgcatatgttgaagttctagcccccagtacctcagaatgttacctttgaggtgattaagttaaaatgaggttattaaggggggccctaatccaatatgactgatttctttataagaagaggaaatttggatataggcacgcagaaggaagaccatgtgaagacagagaagatggttgtaagagacagaaaaacccaaagtgtgtttctcctactctcatacacaccgctcaccagagagtgcttcacctctggccacaaaaatgggtggagatttctccccaccaacaacctgttctccagcagacactaactgggtgttctctaattcaagtcaatctagtgttagattttttaggttaagggctcagtgccacaagactgctctctgcttcagatgccaattccaagtggtaagttgtcagctatacttctgaccaactggctataaatcaggggttcccatgccaccctccttgggttcaactctgtgagtggctcacagaactcagggaaactttagttatatttacccatttattataaagggtagagacaaacaccagatgaagagatgcatagggagaggtatggaaggaggggtgcagagctcccatgccctctccaggcaccacaccctccaggcaccttcacatgttccacagtctggaagctctcgaaaccctatcctcttgggtttttatgaaggcttcatgattgatcgcatctttggccatgtgatcaactcaaccatcagccccactccccattccccagaggtcaaatagtgggattgaaagtttcaaccctcagctgggcacagcagctcacgcctataatcccagcacttttggaggccaaggcgggtggatcacttgaggtcaggagttcgagaccagcctgaccaacatgatgaaacccatctctattaaaaatacaaaaatttgccaggtgtggtggtgggcaactgtagtcccagctatttggaaggctgaggcaggagaattgcttcaacccagaaggtggaggctgcagtgagccgagattgcctcactgcaccactccagcctgggcgacagagcaagactcagtgtcaaaaaaaaaaaaaaaaaaagaaagaaagaaaaaaagttccaaccatctgataacaaaagatgcttctatcacccaggaaattccaagggatttccatgtcagttgttcctctcactcaggaagttataaaggtcttaggatctctgcgtgaggaactgggtggaagaccaaatattagaacagaagttctcctagcatccctattgtcaagagttttaggagctctgtctcagaaatggggtatagagaccaaatatatatttctttacaatatcacaagaatcatctacaagccaaagaaagaggctatagaagaaaccaaccctgctgacactttaatctcagccttccagcctccagaactgtgagcaaataaatttatgttgtttaagccaccatctgtagtacttcttgtttttttttttttttagagacaggttcttgctctgttgcctaggctggagtgcagtagcacaatcatagctcactgcagcctccaacatcttggtgcaagcgatcctcccacttcagcctcctgagtagctgtgactacaggcatgtgccaccatgcctggctaattttttttatttttgtagaaacaggatctgactatgttgtccaggctggtcccaactcctgagctcaagcaatccttctgcctcagtctcccaaagtgctgggattacaagtgtgagccaccatgcctggcctgtggttctttgttatggtggttctaggaagctagtatagttgccttatttttctcataaatttagtttttagataccaaagtttaaaaattaaacctaggcctggcacagtggctcacacttgtaatcccagcactttgggaggccgaaggaggcaaatcacttgagtccaggagtttgagaccagcctggtcaacatggcgaaaccccaactctactaaaaatacaaaaaatttgccaggcatggtggtgcacacctgtaatctcagctatttaggaggctgaggcatgagaatcacttgaacccaggaggttgaggctgcagtgagccgagattgcgccactgcactccagcctgggcaacagagcgagacttcgtctcaaacagaaaaacgaaaaaaaggcctgggcgcagtggctcacacctgtaatcccagcactttgggaggctgaggtgggcggatcaactgaggtcgggagtttgagaccagcctgaccaacatggagaaacctcatctctactaaaaatacaaaaattagctgggcatggtggcgcatgcctgtaatcccagctattctggaggctgaggcaggagaattgcttgaacccaggaggtggaggttgcagtgagctgagatggcaccattgcactccagcctgggcaacaagaacgaaactctgtctcaaaaaacaaaaacgtaccaattaaacctagccatattgttgctgctaataattttatgaccttaataaaatcttcccttccttcttttgtatttaaaaataattaactgttaagcaaatgcgggatttattttggggtgaaatatgtatacaagttaaattatttgctgctggccaggtgtggtggctcacacctgtaatctcagcgctttgggaggatgaggcgggaagatcacttgaggtcaggagtttgagaccagcctgaccaacatggtgaaaccctgtctctactaaaaatacaaaaattacccgagcgtggtggtgcatgcctgtaatcccagctacttgggaggctgaggcaggagaatcacttgaacccaggaggcagaggtttcagtgacccgagatcgtgccattgcactccagcctgggcaatgagagcaaaattccatctaaaaaaaaaaaaagtgctgcaaagcagttgtcccaatagcatttatttaagtggggcgggggcgggggggtgggggcggggggagattcttattggttcgtaatttatcaagttagaccttttatgaaattccccccatgacctttgaccttctgtttttaacctggtaccaaacagcttttatcatcgtctcgtggtgtttatgttttgaagtccaatagggtgagttgtctatgattgtttccttcttttcccaaaaatattctttggagttcttacctactgattttttttttccagatgaattttgctgtcacttaagtttgacaaaatgttccctttgaaatttcaaatttttgaaatgaagtatgagatctaaaaaaaaaaagaaacctgtgtattggctcagcattacccttattcctctcagccaagtgcaagggatcacttactcaaatctttattcatcccactagagtttaatgacttccttgaatggctgttcaatgttcagtgacaggtctggcttttgttgtgaggccatctatggagtctctgggacccttccagtccctggaatcagtttggtctgagaggtcaggacttggaaacatactggaggcagggcaagggcaccctgctcttgttttggcatctacctcttttccgctggtccttcttatccatccaactagtccttttccctgagccaggtccatactttcccaccccaaacccttcctcttgtttcctggctctctgtttctggctacattcatttcctacactcctgtatcaaaagtaccacaattgcttctcgttcccacagtgcagtgcggctgagcgcctcagagcccgcggggacgctgcggggggattgcggggagggggcgttgggaggtgccgatgttgggctgggcggatgagcgcatctgcgtggtgagccttccaacgtgcgcgagaaggacgtggaagaccttttctacaagtacggccggatccgcaagatcaagcttaagaatgggcactgccttgtgcccttcgccttggtgcgctttgaggacccccgagatgcagaggatgctatttatggaagaaatagttatgattatggccagtgtcggcttcgtgtggagttctccaggacttacgaagtcggggtgggtggccccgtggtgggaggaatgggccttctgcaagaagatctgatttccgagttcttgtttcaggacttcctcaggcagctggcaggacctgaaggatcacatgcgagaagttggggatgtctgttatgccgatgtgcagaaggacggtgtggggatggttgagtatctcagaaaagaagacatggaatatgccctgcataaattggatgacactaaattccactctcatgatagtgaaacttcctacatctgagtttatcctgagagaagcaccagctatggctactcacagtctcggtttgggtcaaggggccgtgactctccatactaaagccggggttccccacaccacttctctcctttcaggccctactgagacaggtgatgggaattttttctttattttttaggttaactgagctgctttgtgctcagaatctgcattccagattgaggatttagcgtcttaggaaattattttaattttttttttttaaagaagaaaaaaaaactacatactttctaccagggccatattagcagtgaaacattttaaactgcagaaattgtggttttggttcagaaacaagttgtatatttttcactcctgaatatgggtaaaaaatcagttccgtctttgtgggttgctctgctatggagatcaacagttactgtgactgagttggcccattctgcttaaaaatatgttttaaacgtttaagaaaaatgctcatcatcactggccatcagagaaatgcaaatcaaaaccacaatgaggtaccatctcacaccagttagaatggcaatcattaaaagtcaggaaacaacaggtgctggagaggatgtggagaaatagaaacatttttacactgttggtgggagtgtaaactagttcacccattgtggaagacagtgtggcgattcctcaaggatctagaactagaaataccatttgacccagtgatcccgttattgggtatatacccaaaggattgtaaatcattctactataaagacacatgcacacgtatgtttattgcagcactgttcacaatagcaaagacttggaaccaacccaaatgtccatcagtgatagactggattaagaacatgtggcatggctgggtgcggtggctcatgcctgtaatcccagcgtggctcatgcctgtaatcccagcactttgggaggccaagacgggtagatcacgaggtcaggagatcgagaccatcctggctaacacggtgaaaccccgtctctactaaaaatacaaacaattagctgggcgtggtggtggcgggtacctgtagtcccagctactcggtaggctgaggcaggagaatggcatgaacccaggaggtggagcttgcagtgagccgagattgcgccactgcactccagcctgggcgacagagcgagactccatctcacaaaaaaaaaaaaaaaaaaaaaaaaaaagaagaagaaaatgtggcacatatacaccatggaatactatgcaaccataaaaaaggatgagttcgtgtcctttgtagggacatggatgaagctggaaaccatcattctgagcaaactactgcaaggacagaaaaccaaacactgcaggttctcactcataggtgggaattgaacaatgagaacacttgaacacggggtggggaacatcacacactggggcctgttgtggcgttgggggaggagggagggatagcattaggaggaatacctaatgtaaatgacgaattaatgggtgcagcacaccaacatggcacatgtatacatatgtaacaaagctgcacgttgtgcacatgtaccctagaacttaaaagtataattaaaaaaaaaaagtttagtaattgaaaaaaaaaagtacaacaattgggttggttggaacagcagaaatgaattgtctcacagctctggaggccaaaagtctgaactcaaggtgtcggcaggaccatgctccctctgaaacccatagggaaatccttctttgccccttctagcttctggttgtttgctggcagtctctggcattccctggcttgtagacgcatctttccaatcgtctgccttcacatggtagtctccctgtgtctgtctctttaagtggctgtcttttgttttttgtgtttttttaatttcaatttaatctattttttgtagacacattgtttcaccatgttgccaggctggtctcgaactccagggctcaagtgatcctcccgtctcagcttcccaaagtgctgggattacaggcgtgagccgccacacccagcccacatggctgtcttcttatgggaaaccagacatgggattagagacccactctattagagtaggattgcatttaactaattacatctgcaacaactctatttccaaataaggttacattctgaggtactaggggttaagacttaaatatatcctttttaggaaggacacagttcaacccacaatattagctggccacatgtttcccctgatctgtactttacttgttccccctggctctggtccctcctcgggtcaggtcctgcctgagcctcccctggccatgtcccttctttgtgcctggaccctcctgattaataccccatccccacccttgtgccctcagctgacttcttgtacctcccaccaggcatgatgacctgaaggagatgctggacaccaacaaggattctctcaagctggaggccatgaagaggattgtggcggtaagaggggaaggaggaggcctccctccgggcggggcctgggtggccaagagcagctctccttagctccttgtagaccttccctctagttagtgctgtgcctctcgctttgtccctcttcccctaccttgaccccaccacccagatgattgcccgaggaaagaatgcttcagacctgtttcccgcggtggtgaagaacgtggcctgtaagaacatagaggtgagcactacctggtgagggattgcttgtccccacctcccccaggaccacactcaagcttggggtgaggaaggaaatgatttagcccctgggggcccgacctgctgagaaatgtctctgagccaggagaagacactgtctccatgtccctgaactggatgtggatcaaggtaaaggacccggatacactcaggggtgctctcccccactgggagagtttgtccccatggaccgcagctggctggggagatgacatcccaggggtaggggggtgggcacaggtgcctgctgagaagcgttctgctgagaaacgtgctctccccaaggtgaagaagcttgtctatgtgtacctggtacgctacgctgaggagcagcaagacctggccctgctgtccatctccaccttccaacgtggcctaaaggtcaggggtctcagtttgcctcccagggcctgggcctcgttggcgctgtatcggaggagtaggcctggggagaggccatgagcatgggagcgggctctgcagaccccttcctacctgcctaaaattgggagggtcacagtcagaagaggccagccagaccctcagagagtggaagctgggctcagaaggggcgtaagagatgaagtgggtacccagggcccctgtctctcttcccaggagcctgtggtaatggctgcttctagtatgaaccacttgagcccccggagagtggagagtctctagcaatggagaacccctcaaccctcacccccctttgtgtaaaggtgtgaattgtggtccacagccaggtagatttcaacctttagcagtggcctgaatcccccacaccattctcaccttttgtttcattttgcccaaggcctctagttggatttacatatgttaggtgcatgtataagtctcccccctaagggcttttctggttagtctaagacatcttgagggtaaagacagccatttcaaggccattctctccatattggatttttcagctctgattacaaccattaactcctctatttttgcatacctttatttatttatttatttatgagacaggttctcactgtgttgcccaggctggagtgcagtggtgcaatcatggctcactggagcctcgacttccctgagctcaggtgattctcccacctctgtctcctgagtagctgcgactactcagcctgcatcaccatgctcggctaatttttttgtagtttttgtagagatggggtttcaccctgttgcctatgctggtcttggactcctgggctcaagtggcctcagcttcccaaagtgctgggattacagggatgagctaatactcctagcctggatacttttagttcaaatttctgtgagagagattgtgaaaggtccagctcatcttttcatatccagaagttctgtaggttgctgggtagacaggattgctgctcaaatccagggcccaccccttgtccaatctgctatggccagcaagaggggttgacagtcggcttctttggggtgagagtagaaagcatggtcacttgaatatacaattcattcatttagtaaatacttgggtgtctctatgccacacattgtgctagatttctttttataagtcaaaaccatggaatccgtcttagattggcaagtaatcttttggtttgagtaagggttaagtataaaaactaatctgaaattgttgtacagattttcacctatagtctctaccaactgaccctgtcccccttttagaaaaccagagctcatttagttcaactcaatgtgataatttctttctgcaaagtgccaaatagtattttaggttttgtaggccttatagtctcaactatgcaactactcaattttgcccttatggtgcaaatgcagccattgacaagtgggcgtggccgtgttccaataaatctatataaaaaacaggcaatagacagattttatccaagggctgtagcatgccagcctttgctctagaacatgtctaacaggtcatcttttctgatagggacctcactccttcataaggcaacttgctccatctcaagacaactaccactatttggggtgttttttaaaccattctcttttgttgaaacctccacaactataatttttaaaaattgatttcaggctgggtgtggtggctcatgcctgtaatcccagcactttgggaggccgaagcaggcaaatcacaaggtcaggagttcaagaccagcctggccaacatggtgaaactccatctctactaaaaatacaaaaaattagcttggcatggtggcgggtgcccataatcccagctactcaggaggctgacgcaggagaatggcttgaacccgggaggcagaggttgcaatgagccgagaacgtgccactgcagtccagcccaggcgacagtgtgagatccatctcaaaaaaaaaaaaaattgatttcaggctgtactgcattatgactgcacctgtgaatagccactgtactccagcctgggcaacatagggagaccctgtatctaaaaaataaaataaaatttactacaggttcacaaaaggcataaagaataatataatgaatatccataagaaatgacacatttctcaaatagccaaagcctcctatatatcttctcttgtttatcattcataggtatgtatttattcctgtgctagtaatttgcatattgttaagcaatataaaatgttttgtaaatggtgtcatcgtactacatatgtattcctttaaaacttgttttcttttttgttgtcactggcttttggtctctcctgcatgttggaaccaatcatttcaatccagccttctcccttctttcaatcctagcccaggctagggccgtgttcactttcttaggagatccctcatggaatcaaacctctgactggcaagcagataatccaggtctccctacatcctgtctttgtacagttggtcccttgaaccccctatgaaaccctactctatttcattttatcagtttagcacagggtccaaaccagggtgattctgaatcttaattatgtccctcctgattttgtgtcttctttcaagatactgataagctatttggaccagggcaaaagactgaggcatagcatgtttccaggttgacactgatctgttaataaaccttctccaagtatatttcaccacgttgtagacccacctgactgtacagacagctggcatttttctatcttgttaggaaggatcttattcaatagcaataaataaataaataaataacacctttcatgtgcaaagggttgtgggtgacacagagataaaacagatgtgaattctgctcttaaaaatgcttggctattaggtgaaacaaaaggcctacctaaaaaatagcaatgcaggaaatgctatgagacttccacaaacatatcactgaaatcaagatactaatatccaccggcctagttaccccatcaaaaaggaaaacacattttttttgataactttctgtgaatctataatcatttcccaaataaaatgctcacacacaaaaaaggaaaacaggtttaagcagatgatgtgactatttgtctctaagaaaacagagactccttccttttcaataaatgtttctaacccatctgtttaaaagtcaattccagaattttgtcaggaattagcatcaattttacctgcaattgtgaggatcttgtcttgtctttttccatttcagaaagtcagggtaatatctacccttctttagtgttctattcccgtcattctctaagagtaatagtacaggcacacctcattgtattgcactttgcagatattgccagatattgcactttttacaaattgagggtttgtggcaaccctacatcaatcaagtctatcagtgccatttttccaacagtatgtgctcacattgtgcctctgtcacattctggtaattctcacaatattccaaactttttaatgattattatatgttatggtgatcagtgatctttgatgttactattgtaattgttttggggtgccacaaaccatgctcagacatgaaagtgaaattaatcaataaatgttgtgtgtgttctgactgttcccccatctccttcaccttgggcctcttcattccctgagacacaacaatattgaaattagatcaattaataaccctacaatggcctctaagtgttcaagtgaaaggaggaaccacacatctctcactttaaatcaaaagctagaaatggttaggcttagtgaggaaggtatgttaaaagctgtgataggctgaaagctaggccacttgctccaaacatttagccaagttgtgaatgcaaagtaaaagttcttgaaggaaattaaaagtgctactccaggctgggcgtggtggctcacacctgtaatcccagcactttgggaggccgaggcaggaggatcacttgagaccaggggttcaagaccgtctctataaaaaatttttttaagttagcctgatgtggtggtacgcacctgtagtcttagctacttgggaggctgaggtgggaggatcacttgaacccagaagtttgaggtgcttctccagtaaacacatgaatgataaagaaagcaagacaggattattgctgatataggaaaatttaagtggtctggatagacgatcaaaccagctaccacattcccttaagccaaagcctaattcataggcaggtcttaaatctctccaattctatgatggctgagagaggtgaggaagctacagaagaaaagacggaagctagtggaggttggttcatgaagtttaagtacagaagccatctccataacaaaaaaatgcaaggtgaagcaaaagtgctgatggagaagctgcagcaagttgtccagaagatctagctaagatcattgatagatgtgactatgttcaacaagagatgctcaatgtaaatgaaacagcctcttactggaagaagatgccatctagcactttcctacctagagagaagtcaatgcctggctttaaaaaacaggctggctcttgttaggggccaatgcagctagtgactttaagttgaggccagtgctcaatgaccattctgaaaatcctggggtccttaagaattatggcagatctcctctgcctgtgctctataaatggaacaacagtgccatgacagcacatctgtttgcagttatggtttactgaattttttaagcccactgttgatacctaccgcttaaagattcctttcataatattactgctcattgacaatgcatttgttcactcaagagctctgatggagaggtacaaggagattaatgatttcatgcctgctaacacaaaatcagttctgcagcctatggatcaatgagtaattttgacttttaagtcttattatttaagaaatacatctcgtaaggctagagctgccatagatagtgattcctctcatggatctggacaaagtaaattgaaaaccttctggaaaggtttatagaaaccttctggaaaggtttaccattatagatgccattaggaacattcatgattcatgggaggaggtcaaaatattaacattaacaggagtttggaagaagttgattctaaactccatggatgactttgaggggttcactacttcagtggaggaagtaactacatatgtggtggaattctacctagaagtagaagtagaattaaaagtggagcctgaagatgtgactgaattgctgcaatctcatgataaaacttgaatggatgaggacttgcttcttatgagtgaacaaagaaagtcctttcttaaaatggaatctgccgggtgcagtggctcacgcctgtaatcccagcattttgggtggccgaggtgggtggatcacgaggtcaggagatcgagaccatcctggctaacacagtgaaaccccgtctctactaaaaacagaaaaattagccaggcatggtggcgggcacctgtagtcccagctactcgggaggctgaggcaggagaatggcgtgaacctgggaggtggagcttgcagtgacccgagatctcgccactgcattccagcctgggcgacagagcgagactccgttacaaaaaaaaaaaaaaaaaaaaaaaaaaaaactcctggtgcagatgctgtgaacattgttgaaatgacaacaaaggatttagaatattacataaacttagttgataaagcagaggcagagtttaagaggactgacttcaattttttttttttttgtagagactggggtctccctatgttgcccaggctggtcttgaactcctaggctcaagcaatcctcctacctcagcctcccaaagtgttgggattacaggcacaagccatcacgcccagcctacattgtttttttaaagacataatgctattgcatgcttagtagactacagtatattgtaaacataactttttttttttttttggagataggatctcactctgttgctcagtctggagtgcagtggcatgaacatatgtagctcacttcagcctccaactccctgggctcaagtgattctcccacttcagcttcccaagcagctgtaactataagcataacttgtatgcaccaggaaacaaaaaatttatgtgactcgttttagtgcgatatttgctttattgttgaggtctagaatcaaacccacaatatctccgaggtatgcctgtaatatatagctgctgctgctgatagtgggaagacagtcctaagccccatgatcacaatacagtgtaaggaatgcttttatacgttctgtataggatgcagtaggaataaagaagaagggcttggggccgggcgtggtggctcacgtctgtaatcccagtactttgggaggccgaggtgggcggatcacttgcggccaggagttcgagaccagcctggccaacacggcgaaacctaatctctactaaaaatacaaaaaattagctgggtgtggtggtgcgcgcctgtagtcccagctacttgggaggctgaggcaggagaatcgcttgaacccaggaggtggaggttgcagtgagccgagattgcaccaccgcactccagcctggcgacagagcgagactccatctcaaaaaaaaaaaaaaaaaaaaaaaggaagggcctacacccctattttgttttaaacactgtggaagaacagcagcttttgcaatgatttctgggagaaaggagtgtaaggttgaactccggaagggagaccagcttgcatctgctgggcggtcacctcaggcattaaaacaggcacctccaaaaaaacccttacaaggaacaggaagtgtttcaggtgtttcagcaattttaggtgttctgaaagtttttcagtgtttctggaagtgaagctacccattgcaacacctgttcaggtgtcagatttctgcaaccagagccaaaattaagtgtcccccagatacccatcactggcacaccatccaggctccagtcaagcggcagggaagcaagagctagtggtcgctggggacagtgacttccaaaggtgtggcctccccccatcagggcacctggtgccctttcatagctctgcctccacctctgcctttaggatcccaaccagctgattcgtgccagtgccctccgtgtcctctctagcatccgtgtgcccatcatagtgcccatcatgatgctagctatcaaggaagccgcctcggacatgtcaccctatgtgcggaaaacagctgcccacgccatccctaaactctacaggtatgccccagccctgtcccacgctccccaggaggctggttcctaagttctcaacccacccctggcctttcctaagtcttgcctgctgcttctcagagggtttgaggagggtagtttgggggactgacagagatggaggagaacaataaggctggggtgcaggaggtgagcatggcttggacagatattgggaaggctggggctgagagtggcaaattcccctcaccgatttctccctcagtttggactctgaccagaaggatcagctgatagaagtcattgagaagcttctggctgacaagaccacggtgcgtgtataggggcgctccgggaggggtggtgaccggcagccggccttccacccttcgcgttcaccctctcgtctttgttctttccccagctggtggcgggcagtgtggtgatggcctttgaggaggtctgcccggagcgcatcgacctgattcacaaaaactaccggaaactctgtaacctgctgatcgacgtggaggagtggggccaggtggtcatcatcagcatgctcacccgctacgcccgcacgcagttcctgagccccacccagaacgtaagtgggcccagcccaggcagagcgggccgaagtgtgtcccggggaggcgcccacagacccgtcggtctccccgtccaggaatccctactagaggagaacgcggaaaaagccttctacggctcagaggaggacgaggccaagggcgcggggtctgaggagacggccgccgcggccgccccctcccgaaagccctatgtcatggaccccgaccaccggctgctgctgcgcaacaccaaacccctgctgcagagccgcagcgccgcggtggtgatggcggtggcgcagctctacttccacctggcgcccaaggcggaagtgggcgtcatcgccaaggcgctggtgcgcctgctgcgcagccacaggtgcgctccgcccccagccccgccccctccctcgcctcctgccccgccccacgggctgcccggctccgccccctcacgcccaccagccgcttccacctctgcccacccgctccacactgaccgtagtcctgccctccgcactggtcctctccccgcaacgacttgccccaccttttcccctcatccgctgacccttgccccaaccgaggggcccggggtgctctgacccgtcctctccgcagtgaggtgcagtacgttgtgctccagaacgtggccaccatgtccatcaagcgccgggtgagcctgcgacggcgggctgtcctcgctgtccgagggccgcttctgcgggcactggaggcgttgtcggggctgggaccggggccggggaaagggaagatggaggaataccctggctgtgcagaggatggggcaggggaggctccaaatacagatagggagcagggcctggatcctgaggggccgctgaggggatgtccagtggaaaaagagctagtcagatctgagatggacgagggaagacttgaggagtggagggcagtggtgaggaggcaaggatcctgggcgctgggtcaggataggaggggtgtctctgggcagcgaggcaggcctggggcttcggtggagctccctagctgcctctcttgtgccagggtatgtttgagccctacctgaagagcttctacatcaggtccaccgaccccacccagattaagatcctgaaggtgagtgagggacagaagtgcatgtgcttcccagccctccccaccccatgtacccactcaaataactcacagtggcccccctggtgcctgcctattcctggggctgagcccaggagcccatgactgccccagctggagctgtttgttcagggagctgggctaaggagggtcagggggagaagggaactgctctttgcctagtacctggtatacacctgctactcttcataaatgaagtaacctgatatcacctcataataatcccaggatgtgtacattatattccttttataaaaatatagactctggccaggcacagtggctcacgcctaatcccagcactttgggaggccgagacaggcagatcgcctgaggtcaggagttcaagaccagcctggccaacatagcaaaacctcgtctcaacgaaaaatacaaaaattagccaggcgtggtggcaggtgcctgtaatcccagctactcgagaggctgaggctagagaattgcctgaacctgggagacagaggttgcagtgagctgagattgtgccattgcactccagcctgggtgacaagagcgaaactccatctcaatctaagaaaaagaaaaaaagactctgggaggtaactgccccaggtcacataattctgctgactccaaggttcacacttttctctcccacccacagtgttatggcccccacacacctgccccctcaggctctcctgcaaacattcacggacaaggaaagtggcgggagcccatacctccatttgattcctgctctgctgcctcattattgagtgatttccttcagcaacagttaatcttcctaacccttgtgaacatccactatgttctaggggtacatgatgagcaaactaatcagggaccctgcctttgtggagcttacagatgtggggaggaggagacattaagcagttaatcacaaggcaaatgtaaaagtccacttacaaaatatggaagaaagtgtggagagctataagggcataaaatagggagacctcatctagtctggtgccagggaagttttcccggaggatatgagacttgagctgaagcctgagagatgaacatgaattatgcagggacagaaatgggaagaactgctccacgcagaggaaacagcatctgcgaagaccctgggttaggaagtggagtgggattggggcctggaagacaagggggacagtgatgggagatgggaggtagacagcaagcagatcattcagggacttacagaccatggtgaatacgatggtctccatcctgaaagcaataggaagctttaagttttcaatgcagtagggaggtgacatggtcatactgtaagcatactgtgtagggaatccacttaagaggcaaactggtcctcttgctttttagacaagtttcataacctgtcaattccctcatcagtgtgaggatgatgcagggctgtcatgaggattgttttctggtctatgaagtgtatttggaatgaaagcacagaaagtccactggccaacccacccattttctgcctctccaaccctccctgcagctggaagtgctgaccaacctggccaatgagaccaacattcctactgtcctacgggaattccaggtacaggccagctcccagccagaagggcctgggagaggggcccatcagatccttgtgccctggtgggtaaacctcctcttatgagcccaaggctggagaaactattatcttacattcccgttccaatgtgtttggctggctttgggccaaggaatcactggattgggggtggagttgtcaccccctttcccaagtcttagtcaccggcatgataagccataaaatgaaaggccacagccttcttgaaggtcaccctcaagcctgcagagtcactgagggatttctttgtcatatcccacagacctatattcgcagcatggacaaggactttgtggcagccacaatccaggccattggacgctgtgcaactaacatcggccgagtccgtgacacctgcctcaatggcctggtgcagctgctgtccaaccgtgatggtcagtgtttccctgagtgtctaaccgtgatgatcagagggtgtctgcctgcaggtctgactctgctggccactggatatccaccagtctgcctagacacaatgtgtatccattggtctgtctgtcttgatcagggcccaagtgttcctacacctctgagggctgctagagaactgaagggggttgagagaaagagccaagggcctggggcactgcaggtgtgtctgtccacctgagtgtggccatctgactgtcttggggtccacacactcatttttgttctgtagagcttgtggttgcagagtcagtggtcgtcattaagaaattgctacagatgcagccagcacaacatggagagatcatcaaacacttggcaaagcttacagacaacatccaggtgagggagaagccatattttcactccccacttcaaggtcctccccatgatttcaagactgtataattacatatgctagccttatcaaaagtaacttccaaaccttaggtcttcaggtggaaggagcagagacactggaccatgtgaccctgaccttgttacccctgatttgctttccctttggagaccctcaatgagcacgatggactttactactactcttgttttctctctaaagctctagccaaccatggttgagtgacaaatcttgtgtttttctatcgcactgctaagctgaaacatctaaacaaggcattcccaaagattctggagagtaacatggaaataaagtactgagggtacaatgaatccagaaaatcaatcttttacatcatgactgacttagggtcttgaaagctctatgctaatgaagccctagggaagaggggaaatgctgtctaggaaatgtctaccttttaacctctctctatctcaccacccccaactcccatttccagagaacccataatacaacaggccagcacagatgaggagtgctgtttccctggaagtccacaatcctacccacccactttcccgtatttacccatcttcactcctctcccacaaccacaggtgcccatggcccgagccagcatcctgtggctcatcggagagtactgtgagcatgtccccaggattgcacctgatgtcttaagaaaaatggccaagtcattcacagcagaggaggatattgtcaagctgcaggtcatcaacctggcagccaagctctacctgaccaactctaaacaggtaaagattaagagatgaccccccagatactctggtccccagaaactccctagacagtattcttttggccctccctaggcagggctgaactctagctcctattttggaaaagaagaatcagggaaggtggctggtctgcccacataaccaatgctaccccagtgcccacaaagaccttgtagtgctggtggtcactgttgaagagactctcctatgaagctgtgacctccagtctgctagtacaagagtcctgtctgccaccttggaactctggggctgtgaagaaccacagttgattgggataagggaagggcccaacagtggcaggtactgatgggagaacatgcatcccagatgtggtctgtgcttctttccaaagcttgacaatgcttggccagtctgtgccaaagataagggggtgagtctctgcttgggcttgggtggtgctggtggccactgtcattcccaaggtgaaaggttataagagatacacagccaaggatgaggctcaactaagttgtagtatcagggtgttcagagcctcctagctgtctggcatctcctgagatggttccaggagattctcctaaaatgaagcataatgtgctgagcttttcaaggtgtcagggacatcaaacaccatgacgatttccacactctcccactcagttaagcaggacagggattggcaaactactgcccataggctgaatttggcctattcctgtttttgtaataaagttttgttggaacacagccctgctcattcatttacaaattacctatggctgcttttgtgctacaacagcagggttaactagttgcaacagactgtattgcccacaaagcctagaatagttattctctggcccttttataaaaagactctgccaatccttgaagcaaaacctctggctaggtggctggggtctacagatttatagcagggatatcccctggagactgtagcatccctgccatgtccactgtgcgtgggagtctttggatggtggcacttatctttttcagtggcttctttgatccattgtggccagagtgagccccagaggctcaaggtgaggtaggcagggccaccaagtgctgtgactgtaatcaggagtcaaaggacagcagcaacatgtggaggcaactgagtctgtataattaaatatgctagccttatcaaaagtaacttccaaaccttaggtcttcaggtggaaggaggagagacactggaccatgtgaccctgagcttgttatcagtgttgtgggcaaagcagattggagagagagaagttagagggggagagagagaagttagagggagaaagagcaccatggggaagcgttcaatcgttgaaaaaatatttgtatacttcctttgttcaggtgggaggaaggagcaagtgggaggaatgtttgaaaagatgaagcagcctgggtggggagccacccaggtaggtgggagtcttgacatgctcagcaatgagccagagtcctaaaccccaggatggtgaggttggcatgttttcataagcctgggcctgtccacatgtcatttcccccaagttgtcactgtgagctacatgtgcatttgttcatttatttaacatatatgtaggtgggagtctgacatgctcagcactgagccagagtcctaaaccccaggatggtgaggttggcatgttttcataagcctgggcctgtccacatgtcatttcccccaagttgttactgtgagctacatgtgcatttgttcatttatttaacatgtaggcctactatttgcctggtactgtgctgcgtcctgaggatatgacaatgagtgagacacatttacaggtctccagatactcacagccaagtaggagaaacaggacaaaaataaacattttaaacacagcagtaacagctgtcatcagggttggcacagcgagctgtgggtatatacagctgaaccctcccctaggaatgacccctgtcagggaacccagagtaggctgttcaggcaaatggacactcacctccagggcgcccttcacctgcaagtgagtttttgcaggccccttagaatggttatttgattcaataaagatttttgtcctccctttctttctcctttcttcccagcctcttctgggagtggtaaagaagggggagtccttggggtactaggagggaggtggtttggatgcgcacatgaccatgcttgcaaaacagtagtgatgcttcccatcctgggaccatgagtggcaatctgcccagctaaaaggccacagtaatctcagtcattctctccaatttggacatgggcccacggcatgccagatcctggcccaggatgaggccaaggaaatgaccaagatgaggcctctgccctgctattgatcagcagataatcagatactagaccagaggccacaaaggcataacatgcaggtggcgggggatgggggggttggtaatcaaagtggctattacatccacctggatatagaccctggggaaactgcctagcaggttagtttgcttttatgtgtcaggtgagatgtgtggcaggagggtctgccaggggcacagtgggatctacaaccctcccatgtgaccgcctttacagtgaatagaagattctgacaaattttgcagaattgcttttaaaaacgtaaactttttttaatatgctaaaggtaatacatgcttatcatagaacatttggaaaactcagaaaattataagtttaaactattaataagtccaccatttagaagaccaccattaattatatatttccttattttttattcctatatatagtcattcagaagttgtacttttgtctattgtccaatattttaaacttttctgcttcttttcaatgctttcatatttaatacttttttttccccattcacatttcaattaaacttttcacttagaattttctccaggctgggttcagtggctcacacctgtaatcccagcactttgggagcccaaggtgggtgggtcatttgaggtcatgaattcaagaccagcctgaccaacatggcaaaaccctgtctctactaaaagtacaaaaaaattagctgggtgtggtggtgcgctgaaatctcagctacttgggaggctgtggcaggagaattgcttgaacccaggaggtggaggttacagtgagctgagatggtaccaccacactccagcctgggccacagagcaagatccatctcaaaaataaataaaaattaaaaagaatttcctccaaatttttttctactttcacatttttaaatcaattgtattagttttctgctacataataaattactataaatttggtggcttcaaacaacacacgtttattttctcagtgtctatgggtcgagaattcaggtatggcttagttggatcttatgcaaggctacaactgaggtgtcagccaaggctgagtttttatctggaggctgtactggggaaaggtccacttccaagtcacatggtgccacgatccacttccttgcagttgtaggattgtggccctggcttcttgctggctgtcagctgggggctgcccttgccttctagaggccgtccttagctcattgccataggggcctcccaacacggatgcttaatttctccaaagccacaagggagaaagtctctagagccagtctgctagcaagaccgtcttctttttattttttaatttttatgggtacatagtaggtgtatatatttatggggtatgtgagatattttgatacaggcatataatgcataacaatcacatcagggaatggggtatccatcctctcaagcatttatcttttgtgttacaaacaatcaaattacactctcttagttatttataaatgtataataaattattgttgactgtagtcaccctgttgtgctgtcaaatactagatcttacacattctatctaactataattttgtacccattaactatccccacttcccccacccactacccttctcagcctctggtaaccattattctactctccaactccatgagctcaattcttttaatttttagccctcacaaataagtgagaacatgtgaagtttgtttttctgtgcttggcttatttcacttaaaataatgacctctagttctatccatgttgttgcaaatgacaggatctcattcttttttattctttttttatagtactgcattgtgcatatgtaccgtattttctttatctatttgtctgttgatagacacttaagttgctttcaaatcttggctatggtgaacagtgctgcaataaacgtaggtgtgcagatataacttcaatatgttgatttccttacttttgggtatatacatagcattgggattgctggatcatatggtagcactatttttagtttttgtttgtttgtttgagatggagtcttgcactgtcacccaggctggagtgcaatggcatgatctcagctcactgcaacctccgcctcccaggttcaaacgattctcctgcctcagcctcctgagtagctgggattacaggcgcccgccaccaagtctggctaattttcatatttttagtagagatggggtttcaccatgttggccaggctggtcttgaactcctggccgcaagtgatctgcccgactcggcctcccaaagtgctgggattacaggcgtgagccactgcacctggcctatttgtagtgtttttttttgagatggtgtttcactcttttttcccaggctggagtgcaatggcgtgatcttgcctcactgcaacctctgcctcctgggtgcaagtgattcttcttctgcctcagcctcccaagtagctgagattacaggtgcctgccaccacgcctagctaattttttgtatttttagtagagacagggtttcaccatgttggccaggatggtcttgatctcttgacctcgcgatccacccacctcggcctcccaaagtgctgggattacaggtgtgagccaccgtgcccggcctatgtttagttttttaaggaacctccaaactgttctccagacatttccactaacagtgtacaagggttgccttttctccatgttcttgtcagcatttgttattgcctatcttttggatataagcctacttggggtgagatgatatatctttttttgttttgttttgttttttgagacggagtcttgctctgtcacccaggctggagtgtgcagtggtgcgatcttggctcactgcaacctctgcctctgtggttcaagtgattctcctgcctcagcctcctgagtagctgggactacaggcgtgcgtcaccacgccccgttaatttctgtacttttagtaaagatggggtttcgctgtgttggtcaggctggtctcaactcctgatctcaggtgatccgcctgcctcagcctcccaaagtactgggattacaggcatgagccacccgtgcctggcctttcattgtagttttgatttgcatttctctgatgctcaatgatgttgatcaccttttcatatacgtgtttgctatctgtatgtcttcttttgagaaatgtctattcagctcttttgcccatttttaaattggattattgaatttttttttcctattgagttatttgatctccttacgtattctggttattaatcccttgtcagatgggtagtttgcaaattttttcctcctattctgtggcttgtctctttgttgattcctttgctgtgcagaacctttgtaacttgatgtgatcccatttgtctacttttgctttggttgcccgtgcttgtggggtatcactcaagaaatctttgcccagtacaatgtcctggagaatttctctaatgttttcttttattagtttcatagtttgaagtgttagatttaagtttttaatccactatgatttgatttttgcatatggtgagagataggggtctggttttattgttctgcatgtggatatcccgttttcccagcgccatttattgaagagactctcctttccctaatgtatgttcttgatacctttgtcaaaaatgaattcacggccaggcgtggtggctcatgcctgtaatcccagcatcttgggaggccgaggctggtggatcacctgaagtcaggagttcaagagcagcctggccagcatggcgaaaccctgtctctactaaaaatacaaaaattagctgagcgtggtggcgggtgcctgtaatcccagctacttgggaggctgaggcaggagaattgcttgaacccgggaggcggaggttgcagtgagccaagatcgcgccactgcactccagcctaggggacaagagcgagacttcatcttcgtccccccccgccaaaaaaaaaaaagccactgatttttttttttttttttttttttggagacggagttttgctcttgttgcccaggctggagtgcaatgggtttttttttttttttttttttgagatggagttctcactctgttgcccaggctctggactgcagtgacgcgatctccactcaccacaacctctgcctcccgggttcaagcaattctcctgcctcagcctcccgagtagctgggattacaggcatgcaccaccatgcccagctaattttgtatttttagtagagacagggtttctccatgttggtcagactggtctcgaactcctgacctcaggtattctgcctgcctcggcctcccaaagtgcttgctaggattacaggtgtgagccactgtgcctggacaatgctactgattttttttttttttgaaacggagtcttgctctgtcaccaggctggagtgcagtggcgccatcttggctcactgcaaccttcacctcccgggttcaagcggttctcctgcctcagcctcctgagtagctcggactacaggtgtgcatcaccacatccagctaatttttgtatttttagtagagacaggatttcatcatgttggccacgatggtctcaatctcttgatctcacgatctgcctgcctcggcctcccaaagtgctgggattacaggcatcagccaccgcacctggccaatgctactgatttttatgtggattttgtatcctgcgactttactgaatttattagttctaatagttttttggtggaatccttaagattttttaaatataagatcatatcatctgcaaacaaggataatttgaattcttttccaatttggataccctttatttctttctcctgtctgattgctctagatagaacttccaatacagagtcttcttaataaaacataatcataggatcatatatagtcatataccacctttgccatatcctgttggttagaagcaagtctcaggttttgcccatacccaaggtgagggattgcacaaaggcatgaacaccaggaggcagctactggtggggaagaccttagaatctgtctgccacatccatctagagcttaaacttactcatgtgtaatgtgtgaattgaggatatatttcaattttttttaacagccagttttctaagcatgattagcaggcatctgcaaggtagcatgtatgttggcataggttatggaaaggaagtcagtgtttcctgcttaaaattcctctctgacaactggagcctgttggtgagggggagccttgttctgttcttggcacactggagtgtatctcagaggccttcttgaacagcctgtaattcctgcacatcctggctagatgaggtgggggtcttggtggtgcacacaggatgccacaatccacagggaatggccccttggggtggagaagggtaatgaattattataggcaaatcctgcagtgttgaggtggtgggccagccccttcctgtgttggttgttaacatgcagttaaggctgtggacagatggatccaaataccaaacagttctttctagaactaggcaaggacttgaaggagggagtctgtgatcagccagctgggaaatctgtggaggaagacattgtccaaaccaaaagagggatcagcagcctcttgataattgactatgttggtaagggcatccactagccctggccatttagatggtgtctggccaagagaggggcaggttggtgatgaaatctgttgtgatggcatcttattttcatatttttaagtctattctattagcggtgcatgggattgggattgcttatctgtgactataacagtatcgcaggtgctgctttgctggaagggactgagctgaagagggcctgtgggccagattggaggtaggaatgtggaatcatagtggctctctagagtggtgtggggcaattctgccaaagcagctgctcagactctgggtcagcatctgaggggctttgccccttatggacatctgcttgatgtccctgccagattagctgggttaaccatgtccaaggctacacgtaacagtatgtcaccataaacctcaggaagaacagagtcagttccaggctccctcctgccggcccctgatgcccttgggcattctgcttgttgaccacttggtggttttgatcttggtcacaagtgatggaaacatggagacctgggccagggcaggctccttatgtcagcaggtaggcagtgaagggaagcagatggggtgcagctccagcagatgcaggcctaggtgcagtactgatgggctccttggcctgggaaaagccccttaatgatcctgcttcttttctgtaaaatgggggcaataatgcctacttctcagaaggcttggggagattagatgagctagtgtggagcacctagcacagagttggtgccagaaggcacttgataagtgatggctgctaccgctgttgccatgttaaggcaggttagattaggccaagatcatggcagaaatggagatattttaggtctgcagttgtagcttccctgactgcagactgtgaaccctacatgaccttggcaaatgcatgggcagctgcagtttgccctgatgtcattagaagcttccagggaaggataaagacctctgagacccctgggctgctcagaatctactaaatgggtggatagggcatgagggtggcccctgccaaagggacccctgtttatctgccctgtctttttgttgtctaattccccctgggtggtggagcctggaaactgtgaggtccagcagagcattccatacttccacataccctgctgccctagagtaaagaggctggacaggcctggagtggtagggaccacaaatctagggaagaatggagtccagagccaggagtggggaaagtccaaaaggaaaacctcttttgttggcccaaggcagttgtcaaagttgggatcatcaggaggcatgtccagagagatgagagaaaattctgagcccagaacaagggcaggtggggagggacagctgggtggaagcgccggtcctaagcagggagaggagacgttctgcctgaaagtgtcggcttaaagaatctgtttctgagcctcctgtgtccccatccccccgtcagctgacccacctcttcctgttcctccagaccaagctgctgacccagtatgtgctgagtctggccaaatatgaccagaactatgatattcgcgaccgggcgcgcttcacccggcagctcatcgtcccttccgagcagggtggggccctcagccgccatgccaagaagctcttcctggcacccaaaccagctccagtcttggagtcatccttcaaaggtgggagctgaaatcaagggtaaccttcctaggggaatggaaaggaactggccagagtctctgccccagaccttcctgaggcccctagccaggcaccaggcttctgtggacagtcctgctccctggctcactccttttgtccctcctgtggcaccaggaattactctttcaccctcccataaccactgccagcatcatctcacctgagggtctgccttcctggccaggatggacttgtgcctcctctcctctcaggctcccttttccatctccctccctgagcagacactaggctttggaatacataccaagatcttaaataccaaggacccaggaaggcagaaagcaaaacaacacacaaaggagaggtgtatatttttataaaggtcctgagaaagcagttgcctgcattctgtgagcttagtcactacagtcagtccaaatcccaggccccagggcttcagccttgcctctgttcctgggcttggcccttaaggcctcttttcccaagacaacggccttgagatgggcctgggagggaagggtcctcccgctgcttctccgggccccaggagtggaagccaggaacctacacagaagagagcctccttcacaaagctcagttcttctgggtatcttttcgttctttttctcttccctggacctcacgaatggggagattctgagggtgggcacagctttgaaattctcccaggaagaaggcaacagtccctttctccccgacaccatcctcactcacaggcctgtgctgccctcctccagcagtgcctcaactctgatccagacttctacacactcatgctctgactgttcatccctccctgctgagtccagagcctgactagacgtgcatgctgagcagacaggtcggcagcatctgtgggcccagagtctcctcctgcccacctctgtaggctgcctttccctggccctcagtccctgctctggcctggccagacagccttttcttccagcatgtgggcctaaaggtgcagtcagggtggaagagccattagggcacacatccatctccttcccctacccacctgggaagtcccaaccagaatcaccacccagccccacctggaaaacagctcccagagctttccctcactgctgctacctgcctgacctctaaacctatccctagaccgggaccacttccagctgggctcactgtcccacctgcttaatgccaaggccacaggctaccaggagctcccagactggccggaggaagccccagacccatctgtgcgcaacgtggaggtcagcggggtggagggttgaagtgtgtgtgtgtgtgtgtgtgtgtgtgtgtgtgtgtgtgtgtgtgtgtgtgtgtgtgttggtgggggcagacagtagggagccctggcagtgccggcccagccctcctaacaccctcccccacacacacaggaagaagatctctcccttattgagactcacgtgggcctgttgggcgaatacactgaggtcccaccttcgtgtgacgtgtgctctctcccctgccctgtctgtgtccctcttcttcccctgtgtgttgtgctcctgggccttcccatactctgtttccaccttggtttggcagtgctcctctgtgagcagcattccctcccctccatggacagtgcccctttcttcctcctctgttattccctttgtgggacagaccaggtagggcctcacaaagaggtggaataaagggtaagggcttgtgcctgcctgccttctccccaaccatgatgaaatgaccctgcaccctacccccatctccaggtacctgaatggaccaagtgctcaaatcgggagaagagaaaggagaaggaaaaacccttctactcggactctgagggggagtcaggccccacggagtccgcagacagtggtgagcagatggcagagctggggtcctctgtgctctgcccatgcatctgtgtgactgactatatgaggggtatatgtatatggttgtgtgtctaggggtgtgcacctgcttgtgaattgtttgtgcacctgagggattcatgttccaggtgtgtgtgcttgtgcaggtttctatccatggagtccatctgtgtttctgtcagttccagctggcatgtagggctgggggcaggtcagagaggtttgagggttcagtactgaatgtgaaggtggaacccaggtgtctgctccagacccaaggaggcctgcatatgagggaggaggcctcatattgttcctccacagaccctgagtctgagagtgaatcggacagtaagagcagcagtgagagcggctctggggagtccagcagtgagtccgacaatgaagaccaggatgaggatgaggagaaagggagaggcagtgagaggtgagaagggagctagccagatggctggtggggttcagggggctttcctggaaagagggctagcattgagctttagccagtctcctaagagcccctgagcccctcgtgagctgggtggggctgtcagctcacatgacgcctactttcgctggctgcaggagatctctgaggcctcatgggctggtgtggagaagcaaccagagtcctagagcctgagctggcacaagctggcttcaagctctcacggggtccctgctataggacctcaggtgtgaaccctcctggctcaggctccccacaccactccagcttttcagcatttctcctgcttctgtgaagcaaggagggagtgtccaggccaggcctgagccaacctttcccactccttcagtgaacagagtgaggaggatggtaagaggaagacaaagaagaaggtgccagagagaaaaggagaagcgtcatcctctgatgagggcagcgattccagcagtagctcatcagagtccgagatgacatcggagtccgaggaggagcagttagaacctgcctcctggagcaggaaaacagtgagagccttggggcagagtcagggtgtgctcatgggccagggccctccccaacctctgggccaggcccagacatctatctccctaccatccagaacagaacatgacatcttctacccaacccagaacatgccaaggtgctccccttccccacacccacatcccatttttctctttcagcctcccagcagcaaaagtgctcctgcaaccaaggagatctccctgcttgatctagaggattgtgagtttgggtggtaaaagtcacaggggaaaggaggcctggggagcatgaattagaacagcccatagggactctggatcgggttcctcaggtcttgtgggagcaggggagcagacagaacatatcttcaggcctgagagggcagcagggctgacctccccaggtctggggttgaggtctaggaatgggtattttgcgagagcctccaggcagccatgtgccccgctgtccatggtgctgaaatgcgtgctccttgatccctaggctccctgctcaacccaagccacctccactttgcctcctcatagtcttatctactcccacagtcacccctcccagtgtccagcctgtgtctcccccagcaattgtgtctaccagtctggctgctgacctggagggcctgacactcacagactccaccctggtaccgtcggtgagtgggatggaggaggggaccgggctggggcagggacacatccctgtgctgcatcctatggtgtggatgtgtgtggggggtgggtgtgatggaggatgtgatagctttgagtcccagctgctggatggccctaggggacaatgctgggacaggctctctccatcttgctcagttctgtccttccctacccctccactctagcttctgagtccagtatcgggtgttgggcggcaggagctgctgcaccgggtagctggcgaggggctggctgtggactacaccttcagccgccaacctttctccggggatccccacatggtgtccgtgcacatccacttctccaacagctctgatacccccatcaagggcctgcatgtgggcactcccaaactgcctgctggcatcagcatccaagaatttcccgaaattggtgcgaagggctttggatggggtggaggaggaggctcctgggcagagtcagtctttctgtggttgctgataccctccttgtgccaggccaggggccaagctataggggcacagagatagcatctaacatgatcaacactctggtggacaagacagatgatgaaataagcaagttcacatcagggcgggaggtgcttgcagcagcagatttgggccttggttgtttcaggactaacttaaatgtggtgagggtgagtgggggaaagggtgcttagagttcaggaggaaaccgggaacagtctccagcagccaagaaagccaagattctgtagagggctggtcagctgtgacagtggagaggagagtagggctaggctgggttctagacctatcaggtgatggtggccctccctctccccttcactgccttataccacttcagagtccctggcacctggagaatctgccactgctgtaatgggcattaatttctgtgactcaacccaggcagccaacttccagctgtggtatgtgcccaactcgaggtgggggtgagaggatgggctggaaagggacagggtaacaatgaactggaaatggaggtggtgcttagtggggatacatcatgattgggtgggtctggaagccatctcaggccctcattcctgacctcactctttcactgcctccaagctgtgcctctacacagggtgggaagtgaggggagagatgacagccttaattcttctccgtttcctcccacccctcccagcacccagacccgacagttctacgtctccattcagccacctgttggggagctgatggcccctgtgttcatgagtgaaaatgagtttaagaaggaacagggtgagtgctccctgggagtgggcagagagggaagtatagaagctgactccagaatgtccagcttggatggtagggagaatggtggtgtccttcatctagaccaggggtcagcaaactttctgtaacgggccaaagataaatgttttaggctttgagaatcatgtggtctctgttgcagttacaacacgactgtggctgttgaaacatagaaacatccacagacagtatgtaaatgaacgagtatggctgtgttccaagaaatttccatttatatttatagatactgaagtttaaatttcatgtaattttcatgtgtcatgaaatattaatcttttgattgctcccccaacacttaaaaaatattaaaaacattgtgggccatataggtggtgggctggatttggtctggaggctgtaatttgcaaaacctctggcctagaagaaagaagagtggcttgggcaagggaggagggaagatcatggttagttttggataagctgattttgaaatgcatttgggaaattcaggaggagctatttagtatgcaactgaaaatatgggtctatgcccaggaaacactttgaagctggagtcatgaacatagaggtggtaatggaagctgtgaatatgaatgagatcactctgggaggtgggagaaaataggaaggccaaggacagaaccttgggggaaaacctgaattctgcagaagaaagaggaggggagggataagagaaggagcacagggagaggtgggaggagaaccaggagagacaacaaggcagaaggtgtctgcaaaccacagttacctaagaccttcagagtcagcatataaaaggctactgccaacctgagggagagagggtcattgctaaaggagggacagaggccaactgcagtgggttgagggagaccacggctcaagtacatgcagtcctctttggaggactttagccatgaatgaggagggagacagggcattggcacgatgaaggatctcacttctggaaaggattttttggagacggggacacttgaacatgaacagattgaaggaacaaaaacaagaaaatgttattagtcatgaatgaaggggatagaagaaacaggagagggatgtcagtttctaaaaggaggtgaagaataggggaagcagtggagggaggaaagaggctgaagagaagactgctggtgtgcaggagagcagacggaggagctcccatggggggcctggatcatgtgagtggagagaagtcagccttgcagaatgaggagttctgggggtgctgtgaaggtttggaggcttcaggagccctggctaggtctggagctgctactgcagaggtacaattaaaaatgtacctgtgaatgctgcatgtgactactggattctggctgagagatcacagcagccacctgtgatctttttgtgagggcttagcttccaggagctgagtgggagttgaatgtgggttggagggccccccaggaaagatcaaagggtgtgaggttcaggatgggcgaacctcttaagaactgactggccactctcaaggggctggtagcccagatgtctgatggaggaagcgccaaatcagtctttggtaacaacatggataaaggcctgggtgggaggggtagagaggctgacaaaggcttcctgagggagggcccagtctgagagggaagtaccttctccccaagactgatgatttaaattctgacctgccctttgcatgataccttcccagcctgggagaacttgttgctcagtaagcagacccaggtgctggcctctgtacccaccatggcctctgccctcatcacgacctctacccccaggaaagctgatgggcatgaatgagatcacagagaaactcatgctgccagacacctgtcggagtgaccacattgtggtgcagaaagtgactgccactgccaacctgggtcgtgttccttgtgggacatctgatgagtacaggtactaggccaccagtagaggggaaatgatgagcatgggggccctggtttgaaggaggagccccagctgctgatccccttccaaacacagtcacccttagcagctcttcctcaccccttctattcccacctcaggtttgcagggaggacactgactggtggaagcctcgttctgctgaccctggatgcccggccagctggagctgcccagctgactgtcaacagcgagaaaatggtgattggcaccatgctggtaaaggatgtgatacaggctctgacccagtgacttccaaatgctgtgacctgtttggctcccatctatacctccccatgacacctaggctgtcagtctctctcatctttctctctctctctcatcatcctcctcatgccagatagcattcagggtgtcctctctccctctggaggaccaagccctcccctaatgccctccccatggattccttagtgatctgtgcagagagagatggcagccactcccttcagtcctcccagatttctgtagctatttatgtagcaggctcaataaaatgtcttctctcta

SEQ ID NO: 15420 - DNA, 50332 bp, Homo sapiens
ccctgattgagaaatccgcgcgcagcctccgccgctgcacactgcagcctctgctgaacccctgccgcgccgccgccttcgccagcccggaccggaccggcccgccttcccttcctccgctccagccggcctccggccccgcaacctcctcctcggcgaagtctccctggccgccccatgtcggccgcccccgcctacagcgaagacaagggcggctccgctggccccggggagcccgagtacggccacgaccccgcgagcggcggcatcttctcctccgactacaagcggtgagggagcccgccaggaagctcgcgggagggttggggccggggaccgggcgaggcgcgcgggcaccatggacagcgcccggccccagcgccggccccgccccggccgcgccgaccggaagcccgcccggccccctcctgcggcctggagccccggcccagcgcgggcagcgctggcaccccggctccaggggccggcctaggacgcggaggggggcagataggggctggcgggggatgggccagctcagtttcgagaggagaaaccctccggttccaggtgtttctccggtttgcggcgttgcgttaggggttcccttcctttttcgtgctaggcgggttggcttcccaaaaatgtgggggaggggtctgagtcagcgaacttgagcttgagcctggggcctcttcaggaaggcgggccctggatgtacttgcacagcctcccagcttggccctgctgcaaattcatttcccctccctctggtccccatctccatctgaccctcacatccctgctcctggcattgcccctgtagttcagctccaccttcacaccctcccccacctttgattcgttcgtttgtttcttcatttgtttattcgtaaattctgcaacaagcatttatgaaaagccaactgtgtcgagtcctgaactagtcacggaatacaactgtgaacatgagacccttcttgtcctcacgatgctctagaggggagcacagatgaagaagcagtcagggacagtcgagtgtaatgggggcagtgggagcagggagaggacctagtctctggcgccggagagaaggaagacaggagcgtgaggtatgttccaggcagaggaaagggctttcaggaaggttgagagccaggccacaatctgtgtgagccactggactgaccagaaaagagggtggggaggactcctgaaggattctaagcaggcgacataatcagatttatattttagaaggacgtcaggctgctgcattgtggagaagagattggaggtgggccagattgaacaagagacaagggaggtgggtcttgaagttcacaggcctggcatgattgtggcctagaccaggggagaggcagaagatttgaggctgtggaagaggtggaagcctcagacctgatgattaattggatattgggtgggggtttagagggacagggggagaagatgaggattttcacgcacgtccatgtgaagagaccaccaaacaggctttgaacaataaagctttttaatcacttgggtgcaggccagctgagtccgaaaaaagagtcagcgaagggaaatggggtgggaccgttttacaggatttgggtaggtagtggaaaattacagtcaaagggggttgttctctggcggtggggggacacaaggtgctcagtgggggagcttttgagccaggatgagccaggagaaggaatttcacaagataatgtcatcagttaaggcaggcacaggccattttcactcttcagttacttcaggccatctggatgtatacgtgcaggtcacaggggatatcatggcttagcttgggctcagaggcctgacattcctgtcttcttttattaataagaaaaataacataaaatagtgttgaagtgttggggcagcaaacattttggcggggggtggtatggagagatactgcttctccatagccttgaagggctgcttcgagcgggattggggtggcgtgggaacctagagtgggagagattaagctgaaggcagattctgtggtaagggatgatattgtggggttgttagaagaaacatttgttgtataggattattggtgatggcctggatacggttttgtatgaattgaaaaactaaatggaataagagaaggagaaaaacaggtattaaaggactaagaattgggaggacccaggacatccaattagagagtgcccaaggaggttcagcatagccctgccagcaaagattatttatttactttaagagggagttaagactggcagtttggggatagcaccaggagatatcagctgtaatggtttggagaaacagtgtaaaccggcagtgtaaacaagagcagggcatgtatgagtagttgagtatggtgaataggagtatgactagtcagaagatagtagggatgacaagttttctggggcacagtccaagttggtctggtgtctggaatgagactggggcctaataaaaaggagcatctatacaggagcttgaatgggctgtaccctgcagcattccgaggacaggcccaaattctgagaagggcaagtggtaaaagtattgtcagtcctttttaagttggtggctgagcttggtgaggtgtgtttttaaaagaccattagtccgttctaccttttctgaagattgaggatggtaaggggtatgaaggtttcactgaataccaggagcctgagaaactgcttgggtgatttgaccagtaaaggctggtctgttattggactatatagaggcgggaaggccaaactgaggaattatgtctgacagaagggaagaaatgaccgcagtggccttctcagaccctgtgggaaaggcctctacccatccagtgaaagtatctacccagaccaagacgtattttagtttcctgactcggggcatgtgagtaaagtcaatttgccagtcctgggcagaggcaaatccccaggcttgatgtgtagggaagggagggggcctgaacaatccctgaggagtagtagaatagcagatggaacactgagaagtgatttccttgaggatagatttccacaatggaaaggaaatgagaggttctaagaggcaggctagcggcttgtaacctacatggaagaggttatgaaatgacgaaagaatagaatgggcctgtgaggctagaaggagatattttccttggtctgagaaccatttgccttgtgtgggaagagattcataggtgtaagtttcattgggggagtaggtaggagtgactgatgagaaggagaaaaactggccatgagggacagaagttggaatgctagctgcttttttagctaccttatcagcataagtgttgccctgagcgatgggatctgatgccttttgatggcccttgcagtgaatgactccagcttcctttggaagtaaagcggccttgagaagagtttttattaaagaggaattaatgatggaggacccttgtgtaatgaggaaagctttttgcccatataacagcatggaggtacaggatatggaaggcatatttagagtcagtataaatattgacacatagtccttttgcaagactgagggctcgagttaaggcaatgagttaagctttctgagaggtagtggaggggggcagaaagtatatgcgtcaggtgtgaggaagaaaatagattttggaagttatgagaactgtagagagtgagttgagcatagtttgtgattttgagggcctctgaaagtattaaagcagcggcagccgctgcacgcagacatgagggctaggccaaaacagtaaggtcaagttgttcggacagaaaggctacagggcgtggtcccagctcttgtgtaagaattccaaccgcacagccctgcactttggctgtgtgtgatgaaaaagggttgggatgaattagggagacctagtgtgagagcagcttctacggctgtttttaaggaatggaaaggagtggcaaaaggatttaggatctgtggggtcagctaggtttgcttttgtgagtttatataatggtttagtcaggatggtaaaactaggtatccaaaggtggaagtacctaaccatcccttgaaaggaaaggagttgttgctttgtagaagggattggggttcgggagattagccggacatgatcagcagggagagcacgtgtgttttcatgagaactatgccaagataggtaatggatgaggaagaaatttgggcttgactgaagtaatgggggctgtccgtgaagccttgcggcagtacagcctaggtagtttgctgagcctgatgggtgtcagggacagtccaagtgaaagcgaagagaggctgagatgaagggtgcaaatgaatagtaaagaaagcatgtttgaaatccagaagagaatgatgggttgtggaggggttgtggagggaggtattgaggaggagagtatatgagtttggcaccacggggtggataggcaaaacaatttggctgacaaggcacagatcctgaactaattgtaagacttgtctggtttttgaacaggtaaaatgggggaattgtaaggagagtttataggctttaaaaggccatgctgtaacaggcgagtgataacaggctttaatccttttaaagcctgctgggggatgggatattgacattgagcacggtaagggtgattaggttttaatgggatggtaaggggtgcatgatcagtcgccaaggagggaatagaggtgtcctatacttgaggattaaggtggggagatacaaggggaggatgtgaaggaggctttgaactgggggaaaaggtggcaatgaggtgtggctgtagcctaggaatagtcagggaagcagataatttaaagtgtctcggcctaataagggaactgcgcaggtggggataactgaaaaggagtgcataaaagagtattgtccaagttggcctcagagttggggagttttgagaggtttagaagcctggccatcaatacccacaacagttatggaggcaaaggaaacaggcctttgaaaagaaggtaatgtggagttggtagcctccgtattgattaagaaggggacggacttaccctccactgtaagagttacccaaagcatctgtgatggtccaggaagcttccaaggcgattgggcagtgtcagtcttcagctgctaagccgagaagatttgggaaggagtcagtcaggcagccttgggccagagttccaggggctctgggagtggctgccaggtgagttggacagtccgatttccagtggggttccacacagatgggacaaggcttaggaagaatcctgggctgtgggcattccttggcccagtggccagatttctggcacttgaagcaagatcctgatggagaaggtcctgtaggaatgcttgactgctgcagcttaggcattttgaagttcttgtgtactggagatgtggctggggtttctctcacagtggaggcaaggaactacaactcagaaatacattgctacttggctgcctttactctattattgtacaccttgaaggcgaggttaattaagtcctgttatggggtttgagggccggaatttaatttttggagttttatttaatgttgggagtggattgggtaataaaatgtatattgagaataagactgccttttgaccttttagggtctagggctgtaaagcgtctcagggttgctgcccaacgagccatgaactgggctgggtttttatatttgatgaaaaagagcctaaatactaactgatttggcagaggtcggataaaggaaaaggagcgttaaccttgactatgcctttagctccagccacctctttaagaggaaattgttgggcaggttggggagggctagtcgcagaacaaaactgtaagccggactgggtgtggggagaggaggtgatagaaggattatagggtggaggagcagaagctgagaaagaattggagtctgattcagcctggtggggagtgacctgaggagcattctggggattaggtgagaggtcagatgggtcggtagaaaaggaagattggaagattgaaaagacgcagcgacgcttggggttgggactgaggggacaggcgggagggaaagaaggaggatttgggatgagtcgcattgggaacagagactagggagggaccgatgtgtaaaagaatgcctggacatcaggcacctcagactgtttgcccattttacaacaagaattatctagatcttgtaggatggaaaaatcgaaagtgccgttttctggctatttggaaccattgttgagtttgtattggggttaagcggcattgcaaagaaaataaggcatttaggttttaggtcaggtgtgagttgaagaggttttaagttcttgagaacacaggctaagagagaagaaggaggaatggagggtggaatgttgcccacagtgaaggaggcaagcccagagaaaagagagggtagagacacggagagaaggggtggggggtgctttgccccccaggaaagtggagagaaaagagagggtagagacacagagagaaggagtcgggggtgcttgtcccccaggaacgtggagagaaaagagagggtagaaacatggagagaaggggtggggggtacttgccccccaaaaagtggtgtttgccactaagggtgaaagatcaaggcaggcatcctcgcggtgatcagacaactctgaaacgtgggtgaataatcaagcaggcgtccccgcagtgattaaacaccaagggaagactgtcttcctgagtccgtgatcggcgccggagttttgggttcacagataaaatgcatttcctgtctctaccagaaaaggaaaggaaccgaaattaagagaagggagagattgaaagatggcaccaagattgaaaggagaaagaggttgagggatagtgagagaggttggagaagagagtaaaaagaggccgcttacctgatttaaaattggtgagatgttcctcaggctggttggtctgaggacccgaggtcattaggtggatctttatcatgaagcaaagagcaggaggacaggggattgatcttccaagggtggtcccccgatccgagtcatggcaccaaatttcacgcacgtccatgtgaagagaccacccaacaggctttgtgtgagcaataaagctttttaatcacctggttgcaggccggctgagtctgaaaaaagagtcaacgaaaggagataggggtggggccattttataggatttgggtaggtagtggacaattacagtcaaaggggggtgttccttggtgggcaggggcgggggacacaaggtgctcagtgggggagcttttgagccaggatgagccaggagaaggaatttcacaaggtaatgtcatcagttaaggcaggaacaggccattttcacttcttttgtgattcttcaattacttcaggccatctggatatatacgtgcaggtcacaggggatatgatggtttagcttgggctcagaggcctgacaaggatgttactcaggttactagttcctgcaactggatggatgatggtgttattcagtgtaattggaaataaagatgttacaagcaaatttgtggaaaattaatgttgagcccagctttggacatattgagattgtaaactctgagggacatattaccctattaggtagctggatattacgatttgggttccaggagagagattagggaattattaacatatgtatgttaattaaagccacagaagtgaagataactcagggaggaggtataaaatgagttcagacactgcacaagtctgaaccctgaagacaccaacattagaagtgaccagagaacagtggaaagtgtttcaaggtacccaagaggtgaactaaaggctgaaagaaaacaatgtaatttcaagaaggagggagtggtcagtagtttcaatgcccattaaggtcaaatcaaacaaggaaaaaaatcatgaccattggttgacaaagaagagctcaattcctttctactctattccccacctcctgccctgggagataaattctggcaaagtaaggagaacaggagctagattatttctttcccagcattctgttgtggatgatttaaaacatacagaaaaatgaaatgaataatacaatgaacacatgtatatcatccatctagattcaactgtcattgacatcgtaccttatttgctttatctaaccatctattcgtatactttttttggttgaaccatgttaagttgcagagatcatgacccttcaaccccacattctaagtcgacatctaaagccagattaaaatgaataaaggagcacacaggtggtaagtagataaaacagtgaatggaaattttgctttcaagaaatttgactgtaaaagagaaagctgctggaggagaacctcactcagttcaaggaagtttgtctattttgttattttgggtttttttttttgtttcttaaaatgtatgactccatatttttgtttattattaatattaggcgggagagcctagagcaagtttaactgctgatgggaaggagcgattggtgggagagaggctgaagggaagaaaggaagtacagaacactgagtgatgggaggggaggcttactgagctgggtgggaggactagcctgggagcagggaggaccaactctgcccagagggaagagggcaggaggagaggagagtataaatgcagatggagactgggtacagtggctcatgcctgtaatcccagcactttgggaggctgaggcgggcaggtcacttgaaatcaagagttcaagactaacctggccaacatgtcaaaaccccgtctctactaaaaatacaaaaattagccagttgtggtaacgcatgtctataatcccagctactcaggaggctgaggcaggagaatcacatgaacccgggaggtggagattacagtgagccgagatggcaccactgcactccagcctgggcaacggagtgagactccatctctaaataaataaataagtaaataaatgcagatggatgggagtctggggcagggggctgcaggggatttcatctaaagactttccctttttcgggaaccaggtggtgaagccataagggcaaggctgggaatggggacttgagggtcaaaggggtttcaaatacaatgaagaaagccaaccaggccaggcgcggtggctcacgcctgtaatcctagcactttgggaggctgaggcaggcatatcacctaaggttgggagtttgagaccagcctgaccaacatggagaaaccccgtctctactaaaaatacaaaaattagccaggtgtggtggtgtatgcctgtaatcccagctacttgggaggctgaggcaggagaattgcttgaacccaggagacggaggttgcagtgagccgagatcacgccattacactccagcctgggcaataagagtgaaactccatctgaaaaaaaaaaaaaaaaaagccacccaccactggcaggccagtggcattggagaccagtgggacaagagggccaaggatgtgagagcagttggagggatagacacaggggttgcgggggagggtgctaggaggaagtagagataagagaaggttgatgggaaggaataaatcaagtattggctctggaaaggcaggtgaggattaagatgcctagggtcagtgagaagagggtatatgagatttctcaggaggctgcagtctaattgtggcagtgggattggagctgaagagggcatctctcacctctctatcaactccactgaccatctagtcccttgcccagagactaggggtaggcttggtctcctgtccctgcccttctttccctctagaggccttgtctctgagcagtgaagaggaaaccggagcatccctccctgccagtgtccggttaccaagttttgggggcgggccatctggtgactgtgacaggagccccagcgccctggccagctcagtccattcctggagaagaacctgatgcagcgattcctgcagctcccgggggccgtggtgaggcctggggtcagaggggcctgcggagctgatcaagaggctgctagccctgtgctggctcccgaaggtgggcccccactccggtaccaggccttggagcctgaggagcttcggtggctgcaggcccaggaggaagacacgaccccagaagcatctctggaaggaccttgcccagaggccagccagagccagagccagccactacggtatagaggaacccacaggaaccccctacccacacagccaggaaggccagggatgggcagttgcactctcagcccagacctcttccggtcccacctcctctgatggaggcttaggctggcatttagggtccaggctgggcggagaaggtggtcaggggcaccgtatgggggctgagggtatgagtgaggagagatgaggggcttaactccctggaggctctgaggggaggaggatagtaaaatatttgagggttgaggtcccaccttgacctctttctccccacaggcccccactggagtgggctctggacgaggtttggggacaggatacagcacagacagggtttggccagccactgcctgccagtggactggaacttaggtggtaagaggtgacagcgaggtgtatatcaagggaggtgagcatgactgacccccagtgccatgccaggccccctggctggctccagccacccccagaagagtcccttaggctaggtcagactaggggtcaggtcagagtgagtgcagcagcgtaaggggatctgactatgggagataatgtttcatggccttagggtgttgtgccttagtccctgcctctgcctcttgggaacagaagttggtgggagtgaggacgagaggcccagggcggtctcacctcaggtggtggctgcggtctgtgtcagtgcatattctgtgtcagtgcatattcgacagtcaatcttacctgtgctggctgctttaggcccagtggtcctgccccctttcattccccttctcctgcaggggcctggaatgtactcactaggctgggtggggaggatgccctggggtgtgtgcatttgacaggcgcatgtggcatttgtgggtgtggtgaggaagggaatacccagagttaaaggagattgggcaaacttggccctccttccacggaagcccagggaaaagccatcccagggtgactcctcagaagatcagaggacccttggggctggatatatttgatcttagaagcctacatttatcatcaaaaatctcaactaggagtccactgaccattttggtgaatgagactggagaggccaagtttggtccaagttatctgtgtattagatgtgatgcggcatgtgtgtgtgtgtgtagggggacgtgtgtggggtgtgtgtgtctctatgagggtgtgggggagcggggagaggtcttgtgatatatgtctgtaggggacatgtatgggatatgtgtgtctataagagggtgtgggagagtggggagaggtctcctggtggtatatgtctggggggtttgtaggtgtgtaggtgagttgtgtgggtggtttatgtgtgtagagtttttctgtgggaggtgtctgtatgtgggggagtgtgtttctctgggcgttgtgtaggcaggattttgtgggtgtgcgtgggtttatgtatggattctactagtgtctgcgggacctgtaggtatgtttgtatgagctgtccgtgaggtgtaggtatgtcgggggacatgggagtgtctgaggtatatgtgggtggtatcaatgtgtagttgtctgtggggtgtgcgtatgaaggatcctgacgtggagtgttgtgcattcatatctcagggaagctggtgcccagctctgtcatttttcctaggccctcggtgctgcccacgcctacccagctcaatggtctgtacctatgaccatgcccctggtgtcctgagctcagcctcctacccactaagaaactcaacagtctggtctgtgtttggcagggtaagagggtgattgtcttctggccctggcctgaccctggaagagtagaaggtgtcctctgatttggggggcatccccccaggtgagggagtttcagataacatgatggggctggatattttcttctgtcctcacatgacagatagcgagggcctcagataatgctggaaggcatcatctttctattttgctttccatcaaaaatctctttgggaaagacagtttctaacattcttgggatagtgacttcttagtgcccctcttcttgtctgacgtcaggtactcacgcatttctgcagccctgtgactaagttgcgtgttctgtctggttcttctcttcctctcagcattcatcacttgtttctcagcattagcagcagtcatttgccactttatgattgttatcatgctctttcctctcctaacagtgctatccccaatttctgattttctgtcatttctaaatgttgcatgtctgtgactaactttgcacacattgattttttttttattttttatttttgagatggagtctcgttctgttgcccaggctggagtgcagtggcgcgatcttggctcactgcaagctccacctcctgggttcacgccattctcctgcctcagcctactgagtagctaggactacagacgcccgccaccacacccggctaattttttttaaattttttagtagagacggggtttcaccatgttagccaggatggtctcgatctcctggccttgtgatccgcctgccttggcctcccaaagtgctgggattacaggcgtgagccaccgtgcccggcctgatttttaatttttatcactgtgatatttctcaagctgggttcttgtgcctgggtcaaagctgtgggttatcagagtgtcatctgggaaattagtgtgtgtgagtccccacacacagctgctcaccacattttggaattgtcttggcaacatatgagtgcatcagtttcacacaattctatcagctatatatagacacatttttttcatgggtttattaacaattctctgatcacttcgtgatcaccagttctgcatcctctgagtatggttagccacattgttcactgcacaagggcatctggccaaggaataccagcccatgctccacacacagaatggggagcaacagctcagggctgtgtctatctgtaggggcatgcagattgaaaatgggcttgtagcagccctgacagtgaatgctgcaaagagaccttatacatgtatatcagttccttttttaaatttttttgagatggagtctcactctgtcacccaggctggagtgcagtggcgcgatctcggctcactgcaatctccgcctcctgggttcaagcgattctcgttcctcagcctcctgagtagctgggattacaggtgtgtgccaccatgcccggctaatttttgtaattttagtagggatggggtttcaccatgttggccaggctaatctcgaactcctgaccttaagtgatctgcccaccttggcctccaaaagtgctggaattacaagcgtgagccaccacacctggcctctatttcgaatattaaactttaatttaccatatcccaaatatttttccttttgttgctattatgggctgaattgtgtccctccaaaatgcatatgttgaagttctagcccccagtacctcagaatgttacctttgaggtgattaagttaaaatgaggttattaaggggggccctaatccaatatgactgatttctttataagaagaggaaatttggatataggcacgcagaaggaagaccatgtgaagacagagaagatggttgtaagagacagaaaaacccaaagtgtgtttctcctactctcatacacaccgctcaccagagagtgcttcacctctggccacaaaaatgggtggagatttctccccaccaacaacctgttctccagcagacactaactgggtgttctctaattcaagtcaatctagtgttagattttttaggttaagggctcagtgccacaagactgctctctgcttcagatgccaattccaagtggtaagttgtcagctatacttctgaccaactggctataaatcaggggttcccatgccaccctccttgggttcaactctgtgagtggctcacagaactcagggaaactttagttatatttacccatttattataaagggtagagacaaacaccagatgaagagatgcatagggagaggtatggaaggaggggtgcagagctcccatgccctctccaggcaccacaccctccaggcaccttcacatgttccacagtctggaagctctcgaaaccctatcctcttgggtttttatgaaggcttcatgattgatcgcatctttggccatgtgatcaactcaaccatcagccccactccccattccccagaggtcaaatagtgggattgaaagtttcaaccctcagctgggcacagcagctcacgcctataatcccagcacttttggaggccaaggcgggtggatcacttgaggtcaggagttcgagaccagcctgaccaacatgatgaaacccatctctattaaaaatacaaaaatttgccaggtgtggtggtgggcaactgtagtcccagctatttggaaggctgaggcaggagaattgcttcaacccagaaggtggaggctgcagtgagccgagattgcctcactgcaccactccagcctgggcgacagagcaagactcagtgtcaaaaaaaaaaaaaaaaaaagaaagaaagaaaaaaagttccaaccatctgataacaaaagatgcttctatcacccaggaaattccaagggatttccatgtcagttgttcctctcactcaggaagttataaaggtcttaggatctctgcgtgaggaactgggtggaagaccaaatattagaacagaagttctcctagcatccctattgtcaagagttttaggagctctgtctcagaaatggggtatagagaccaaatatatatttctttacaatatcacaagaatcatctacaagccaaagaaagaggctatagaagaaaccaaccctgctgacactttaatctcagccttccagcctccagaactgtgagcaaataaatttatgttgtttaagccaccatctgtagtacttcttgtttttttttttttttagagacaggttcttgctctgttgcctaggctggagtgcagtagcacaatcatagctcactgcagcctccaacatcttggtgcaagcgatcctcccacttcagcctcctgagtagctgtgactacaggcatgtgccaccatgcctggctaattttttttatttttgtagaaacaggatctgactatgttgtccaggctggtcccaactcctgagctcaagcaatccttctgcctcagtctcccaaagtgctgggattacaagtgtgagccaccatgcctggcctgtggttctttgttatggtggttctaggaagctagtatagttgccttatttttctcataaatttagtttttagataccaaagtttaaaaattaaacctaggcctggcacagtggctcacacttgtaatcccagcactttgggaggccgaaggaggcaaatcacttgagtccaggagtttgagaccagcctggtcaacatggcgaaaccccaactctactaaaaatacaaaaaatttgccaggcatggtggtgcacacctgtaatctcagctatttaggaggctgaggcatgagaatcacttgaacccaggaggttgaggctgcagtgagccgagattgcgccactgcactccagcctgggcaacagagcgagacttcgtctcaaacagaaaaacgaaaaaaaggcctgggcgcagtggctcacacctgtaatcccagcactttgggaggctgaggtgggcggatcaactgaggtcgggagtttgagaccagcctgaccaacatggagaaacctcatctctactaaaaatacaaaaattagctgggcatggtggcgcatgcctgtaatcccagctattctggaggctgaggcaggagaattgcttgaacccaggaggtggaggttgcagtgagctgagatggcaccattgcactccagcctgggcaacaagaacgaaactctgtctcaaaaaacaaaaacgtaccaattaaacctagccatattgttgctgctaataattttatgaccttaataaaatcttcccttccttcttttgtatttaaaaataattaactgttaagcaaatgcgggatttattttggggtgaaatatgtatacaagttaaattatttgctgctggccaggtgtggtggctcacacctgtaatctcagcgctttgggaggatgaggcgggaagatcacttgaggtcaggagtttgagaccagcctgaccaacatggtgaaaccctgtctctactaaaaatacaaaaattacccgagcgtggtggtgcatgcctgtaatcccagctacttgggaggctgaggcaggagaatcacttgaacccaggaggcagaggtttcagtgacccgagatcgtgccattgcactccagcctgggcaatgagagcaaaattccatctaaaaaaaaaaaaagtgctgcaaagcagttgtcccaatagcatttatttaagtggggcgggggcgggggggtgggggcggggggagattcttattggttcgtaatttatcaagttagaccttttatgaaattccccccatgacctttgaccttctgtttttaacctggtaccaaacagcttttatcatcgtctcgtggtgtttatgttttgaagtccaatagggtgagttgtctatgattgtttccttcttttcccaaaaatattctttggagttcttacctactgattttttttttccagatgaattttgctgtcacttaagtttgacaaaatgttccctttgaaatttcaaatttttgaaatgaagtatgagatctaaaaaaaaaaagaaacctgtgtattggctcagcattacccttattcctctcagccaagtgcaagggatcacttactcaaatctttattcatcccactagagtttaatgacttccttgaatggctgttcaatgttcagtgacaggtctggcttttgttgtgaggccatctatggagtctctgggacccttccagtccctggaatcagtttggtctgagaggtcaggacttggaaacatactggaggcagggcaagggcaccctgctcttgttttggcatctacctcttttccgctggtccttcttatccatccaactagtccttttccctgagccaggtccatactttcccaccccaaacccttcctcttgtttcctggctctctgtttctggctacattcatttcctacactcctgtatcaaaagtaccacaattgcttctcgttcccacagtgcagtgcggctgagcgcctcagagcccgcggggacgctgcggggggattgcggggagggggcgttgggaggtgccgatgttgggctgggcggatgagcgcatctgcgtggtgagccttccaacgtgcgcgagaaggacgtggaagaccttttctacaagtacggccggatccgcaagatcaagcttaagaatgggcactgccttgtgcccttcgccttggtgcgctttgaggacccccgagatgcagaggatgctatttatggaagaaatagttatgattatggccagtgtcggcttcgtgtggagttctccaggacttacgaagtcggggtgggtggccccgtggtgggaggaatgggccttctgcaagaagatctgatttccgagttcttgtttcaggacttcctcaggcagctggcaggacctgaaggatcacatgcgagaagttggggatgtctgttatgccgatgtgcagaaggacggtgtggggatggttgagtatctcagaaaagaagacatggaatatgccctgcataaattggatgacactaaattccactctcatgatagtgaaacttcctacatctgagtttatcctgagagaagcaccagctatggctactcacagtctcggtttgggtcaaggggccgtgactctccatactaaagccggggttccccacaccacttctctcctttcaggccctactgagacaggtgatgggaattttttctttattttttaggttaactgagctgctttgtgctcagaatctgcattccagattgaggatttagcgtcttaggaaattattttaattttttttttttaaagaagaaaaaaaaactacatactttctaccagggccatattagcagtgaaacattttaaactgcagaaattgtggttttggttcagaaacaagttgtatatttttcactcctgaatatgggtaaaaaatcagttccgtctttgtgggttgctctgctatggagatcaacagttactgtgactgagttggcccattctgcttaaaaatatgttttaaacgtttaagaaaaatgctcatcatcactggccatcagagaaatgcaaatcaaaaccacaatgaggtaccatctcacaccagttagaatggcaatcattaaaagtcaggaaacaacaggtgctggagaggatgtggagaaatagaaacatttttacactgttggtgggagtgtaaactagttcacccattgtggaagacagtgtggcgattcctcaaggatctagaactagaaataccatttgacccagtgatcccgttattgggtatatacccaaaggattgtaaatcattctactataaagacacatgcacacgtatgtttattgcagcactgttcacaatagcaaagacttggaaccaacccaaatgtccatcagtgatagactggattaagaacatgtggcatggctgggtgcggtggctcatgcctgtaatcccagcgtggctcatgcctgtaatcccagcactttgggaggccaagacgggtagatcacgaggtcaggagatcgagaccatcctggctaacacggtgaaaccccgtctctactaaaaatacaaacaattagctgggcgtggtggtggcgggtacctgtagtcccagctactcggtaggctgaggcaggagaatggcatgaacccaggaggtggagcttgcagtgagccgagattgcgccactgcactccagcctgggcgacagagcgagactccatctcacaaaaaaaaaaaaaaaaaaaaaaaaaaagaagaagaaaatgtggcacatatacaccatggaatactatgcaaccataaaaaaggatgagttcgtgtcctttgtagggacatggatgaagctggaaaccatcattctgagcaaactactgcaaggacagaaaaccaaacactgcaggttctcactcataggtgggaattgaacaatgagaacacttgaacacggggtggggaacatcacacactggggcctgttgtggcgttgggggaggagggagggatagcattaggaggaatacctaatgtaaatgacgaattaatgggtgcagcacaccaacatggcacatgtatacatatgtaacaaagctgcacgttgtgcacatgtaccctagaacttaaaagtataattaaaaaaaaaaagtttagtaattgaaaaaaaaaagtacaacaattgggttggttggaacagcagaaatgaattgtctcacagctctggaggccaaaagtctgaactcaaggtgtcggcaggaccatgctccctctgaaacccatagggaaatccttctttgccccttctagcttctggttgtttgctggcagtctctggcattccctggcttgtagacgcatctttccaatcgtctgccttcacatggtagtctccctgtgtctgtctctttaagtggctgtcttttgttttttgtgtttttttaatttcaatttaatctattttttgtagacacattgtttcaccatgttgccaggctggtctcgaactccagggctcaagtgatcctcccgtctcagcttcccaaagtgctgggattacaggcgtgagccgccacacccagcccacatggctgtcttcttatgggaaaccagacatgggattagagacccactctattagagtaggattgcatttaactaattacatctgcaacaactctatttccaaataaggttacattctgaggtactaggggttaagacttaaatatatcctttttaggaaggacacagttcaacccacaatattagctggccacatgtttcccctgatctgtactttacttgttccccctggctctggtccctcctcgggtcaggtcctgcctgagcctcccctggccatgtcccttctttgtgcctggaccctcctgattaataccccatccccacccttgtgccctcagctgacttcttgtacctcccaccaggcatgatgacctgaaggagatgctggacaccaacaaggattctctcaagctggaggccatgaagaggattgtggcggtaagaggggaaggaggaggcctccctccgggcggggcctgggtggccaagagcagctctccttagctccttgtagaccttccctctagttagtgctgtgcctctcgctttgtccctcttcccctaccttgaccccaccacccagatgattgcccgaggaaagaatgcttcagacctgtttcccgcggtggtgaagaacgtggcctgtaagaacatagaggtgagcactacctggtgagggattgcttgtccccacctcccccaggaccacactcaagcttggggtgaggaaggaaatgatttagcccctgggggcccgacctgctgagaaatgtctctgagccaggagaagacactgtctccatgtccctgaactggatgtggatcaaggtaaaggacccggatacactcaggggtgctctcccccactgggagagtttgtccccatggaccgcagctggctggggagatgacatcccaggggtaggggggtgggcacaggtgcctgctgagaagcgttctgctgagaaacgtgctctccccaaggtgaagaagcttgtctatgtgtacctggtacgctacgctgaggagcagcaagacctggccctgctgtccatctccaccttccaacgtggcctaaaggtcaggggtctcagtttgcctcccagggcctgggcctcgttggcgctgtatcggaggagtaggcctggggagaggccatgagcatgggagcgggctctgcagaccccttcctacctgcctaaaattgggagggtcacagtcagaagaggccagccagaccctcagagagtggaagctgggctcagaaggggcgtaagagatgaagtgggtacccagggcccctgtctctcttcccaggagcctgtggtaatggctgcttctagtatgaaccacttgagcccccggagagtggagagtctctagcaatggagaacccctcaaccctcacccccctttgtgtaaaggtgtgaattgtggtccacagccaggtagatttcaacctttagcagtggcctgaatcccccacaccattctcaccttttgtttcattttgcccaaggcctctagttggatttacatatgttaggtgcatgtataagtctcccccctaagggcttttctggttagtctaagacatcttgagggtaaagacagccatttcaaggccattctctccatattggatttttcagctctgattacaaccattaactcctctatttttgcatacctttatttatttatttatttatgagacaggttctcactgtgttgcccaggctggagtgcagtggtgcaatcatggctcactggagcctcgacttccctgagctcaggtgattctcccacctctgtctcctgagtagctgcgactactcagcctgcatcaccatgctcggctaatttttttgtagtttttgtagagatggggtttcaccctgttgcctatgctggtcttggactcctgggctcaagtggcctcagcttcccaaagtgctgggattacagggatgagctaatactcctagcctggatacttttagttcaaatttctgtgagagagattgtgaaaggtccagctcatcttttcatatccagaagttctgtaggttgctgggtagacaggattgctgctcaaatccagggcccaccccttgtccaatctgctatggccagcaagaggggttgacagtcggcttctttggggtgagagtagaaagcatggtcacttgaatatacaattcattcatttagtaaatacttgggtgtctctatgccacacattgtgctagatttctttttataagtcaaaaccatggaatccgtcttagattggcaagtaatcttttggtttgagtaagggttaagtataaaaactaatctgaaattgttgtacagattttcacctatagtctctaccaactgaccctgtcccccttttagaaaaccagagctcatttagttcaactcaatgtgataatttctttctgcaaagtgccaaatagtattttaggttttgtaggccttatagtctcaactatgcaactactcaattttgcccttatggtgcaaatgcagccattgacaagtgggcgtggccgtgttccaataaatctatataaaaaacaggcaatagacagattttatccaagggctgtagcatgccagcctttgctctagaacatgtctaacaggtcatcttttctgatagggacctcactccttcataaggcaacttgctccatctcaagacaactaccactatttggggtgttttttaaaccattctcttttgttgaaacctccacaactataatttttaaaaattgatttcaggctgggtgtggtggctcatgcctgtaatcccagcactttgggaggccgaagcaggcaaatcacaaggtcaggagttcaagaccagcctggccaacatggtgaaactccatctctactaaaaatacaaaaaattagcttggcatggtggcgggtgcccataatcccagctactcaggaggctgacgcaggagaatggcttgaacccgggaggcagaggttgcaatgagccgagaacgtgccactgcagtccagcccaggcgacagtgtgagatccatctcaaaaaaaaaaaaaattgatttcaggctgtactgcattatgactgcacctgtgaatagccactgtactccagcctgggcaacatagggagaccctgtatctaaaaaataaaataaaatttactacaggttcacaaaaggcataaagaataatataatgaatatccataagaaatgacacatttctcaaatagccaaagcctcctatatatcttctcttgtttatcattcataggtatgtatttattcctgtgctagtaatttgcatattgttaagcaatataaaatgttttgtaaatggtgtcatcgtactacatatgtattcctttaaaacttgttttcttttttgttgtcactggcttttggtctctcctgcatgttggaaccaatcatttcaatccagccttctcccttctttcaatcctagcccaggctagggccgtgttcactttcttaggagatccctcatggaatcaaacctctgactggcaagcagataatccaggtctccctacatcctgtctttgtacagttggtcccttgaaccccctatgaaaccctactctatttcattttatcagtttagcacagggtccaaaccagggtgattctgaatcttaattatgtccctcctgattttgtgtcttctttcaagatactgataagctatttggaccagggcaaaagactgaggcatagcatgtttccaggttgacactgatctgttaataaaccttctccaagtatatttcaccacgttgtagacccacctgactgtacagacagctggcatttttctatcttgttaggaaggatcttattcaatagcaataaataaataaataaataacacctttcatgtgcaaagggttgtgggtgacacagagataaaacagatgtgaattctgctcttaaaaatgcttggctattaggtgaaacaaaaggcctacctaaaaaatagcaatgcaggaaatgctatgagacttccacaaacatatcactgaaatcaagatactaatatccaccggcctagttaccccatcaaaaaggaaaacacattttttttgataactttctgtgaatctataatcatttcccaaataaaatgctcacacacaaaaaaggaaaacaggtttaagcagatgatgtgactatttgtctctaagaaaacagagactccttccttttcaataaatgtttctaacccatctgtttaaaagtcaattccagaattttgtcaggaattagcatcaattttacctgcaattgtgaggatcttgtcttgtctttttccatttcagaaagtcagggtaatatctacccttctttagtgttctattcccgtcattctctaagagtaatagtacaggcacacctcattgtattgcactttgcagatattgccagatattgcactttttacaaattgagggtttgtggcaaccctacatcaatcaagtctatcagtgccatttttccaacagtatgtgctcacattgtgcctctgtcacattctggtaattctcacaatattccaaactttttaatgattattatatgttatggtgatcagtgatctttgatgttactattgtaattgttttggggtgccacaaaccatgctcagacatgaaagtgaaattaatcaataaatgttgtgtgtgttctgactgttcccccatctccttcaccttgggcctcttcattccctgagacacaacaatattgaaattagatcaattaataaccctacaatggcctctaagtgttcaagtgaaaggaggaaccacacatctctcactttaaatcaaaagctagaaatggttaggcttagtgaggaaggtatgttaaaagctgtgataggctgaaagctaggccacttgctccaaacatttagccaagttgtgaatgcaaagtaaaagttcttgaaggaaattaaaagtgctactccaggctgggcgtggtggctcacacctgtaatcccagcactttgggaggccgaggcaggaggatcacttgagaccaggggttcaagaccgtctctataaaaaatttttttaagttagcctgatgtggtggtacgcacctgtagtcttagctacttgggaggctgaggtgggaggatcacttgaacccagaagtttgaggtgcttctccagtaaacacatgaatgataaagaaagcaagacaggattattgctgatataggaaaatttaagtggtctggatagacgatcaaaccagctaccacattcccttaagccaaagcctaattcataggcaggtcttaaatctctccaattctatgatggctgagagaggtgaggaagctacagaagaaaagacggaagctagtggaggttggttcatgaagtttaagtacagaagccatctccataacaaaaaaatgcaaggtgaagcaaaagtgctgatggagaagctgcagcaagttgtccagaagatctagctaagatcattgatagatgtgactatgttcaacaagagatgctcaatgtaaatgaaacagcctcttactggaagaagatgccatctagcactttcctacctagagagaagtcaatgcctggctttaaaaaacaggctggctcttgttaggggccaatgcagctagtgactttaagttgaggccagtgctcaatgaccattctgaaaatcctggggtccttaagaattatggcagatctcctctgcctgtgctctataaatggaacaacagtgccatgacagcacatctgtttgcagttatggtttactgaattttttaagcccactgttgatacctaccgcttaaagattcctttcataatattactgctcattgacaatgcatttgttcactcaagagctctgatggagaggtacaaggagattaatgatttcatgcctgctaacacaaaatcagttctgcagcctatggatcaatgagtaattttgacttttaagtcttattatttaagaaatacatctcgtaaggctagagctgccatagatagtgattcctctcatggatctggacaaagtaaattgaaaaccttctggaaaggtttatagaaaccttctggaaaggtttaccattatagatgccattaggaacattcatgattcatgggaggaggtcaaaatattaacattaacaggagtttggaagaagttgattctaaactccatggatgactttgaggggttcactacttcagtggaggaagtaactacatatgtggtggaattctacctagaagtagaagtagaattaaaagtggagcctgaagatgtgactgaattgctgcaatctcatgataaaacttgaatggatgaggacttgcttcttatgagtgaacaaagaaagtcctttcttaaaatggaatctgccgggtgcagtggctcacgcctgtaatcccagcattttgggtggccgaggtgggtggatcacgaggtcaggagatcgagaccatcctggctaacacagtgaaaccccgtctctactaaaaacagaaaaattagccaggcatggtggcgggcacctgtagtcccagctactcgggaggctgaggcaggagaatggcgtgaacctgggaggtggagcttgcagtgacccgagatctcgccactgcattccagcctgggcgacagagcgagactccgttacaaaaaaaaaaaaaaaaaaaaaaaaaaaaactcctggtgcagatgctgtgaacattgttgaaatgacaacaaaggatttagaatattacataaacttagttgataaagcagaggcagagtttaagaggactgacttcaattttttttttttttgtagagactggggtctccctatgttgcccaggctggtcttgaactcctaggctcaagcaatcctcctacctcagcctcccaaagtgttgggattacaggcacaagccatcacgcccagcctacattgtttttttaaagacataatgctattgcatgcttagtagactacagtatattgtaaacataactttttttttttttttggagataggatctcactctgttgctcagtctggagtgcagtggcatgaacatatgtagctcacttcagcctccaactccctgggctcaagtgattctcccacttcagcttcccaagcagctgtaactataagcataacttgtatgcaccaggaaacaaaaaatttatgtgactcgttttagtgcgatatttgctttattgttgaggtctagaatcaaacccacaatatctccgaggtatgcctgtaatatatagctgctgctgctgatagtgggaagacagtcctaagccccatgatcacaatacagtgtaaggaatgcttttatacgttctgtataggatgcagtaggaataaagaagaagggcttggggccgggcgtggtggctcacgtctgtaatcccagtactttgggaggccgaggtgggcggatcacttgcggccaggagttcgagaccagcctggccaacacggcgaaacctaatctctactaaaaatacaaaaaattagctgggtgtggtggtgcgcgcctgtagtcccagctacttgggaggctgaggcaggagaatcgcttgaacccaggaggtggaggttgcagtgagccgagattgcaccaccgcactccagcctggcgacagagcgagactccatctcaaaaaaaaaaaaaaaaaaaaaaaggaagggcctacacccctattttgttttaaacactgtggaagaacagcagcttttgcaatgatttctgggagaaaggagtgtaaggttgaactccggaagggagaccagcttgcatctgctgggcggtcacctcaggcattaaaacaggcacctccaaaaaaacccttacaaggaacaggaagtgtttcaggtgtttcagcaattttaggtgttctgaaagtttttcagtgtttctggaagtgaagctacccattgcaacacctgttcaggtgtcagatttctgcaaccagagccaaaattaagtgtcccccagatacccatcactggcacaccatccaggctccagtcaagcggcagggaagcaagagctagtggtcgctggggacagtgacttccaaaggtgtggcctccccccatcagggcacctggtgccctttcatagctctgcctccacctctgcctttaggatcccaaccagctgattcgtgccagtgccctccgtgtcctctctagcatccgtgtgcccatcatagtgcccatcatgatgctagctatcaaggaagccgcctcggacatgtcaccctatgtgcggaaaacagctgcccacgccatccctaaactctacaggtatgccccagccctgtcccacgctccccaggaggctggttcctaagttctcaacccacccctggcctttcctaagtcttgcctgctgcttctcagagggtttgaggagggtagtttgggggactgacagagatggaggagaacaataaggctggggtgcaggaggtgagcatggcttggacagatattgggaaggctggggctgagagtggcaaattcccctcaccgatttctccctcagtttggactctgaccagaaggatcagctgatagaagtcattgagaagcttctggctgacaagaccacggtgcgtgtataggggcgctccgggaggggtggtgaccggcagccggccttccacccttcgcgttcaccctctcgtctttgttctttccccagctggtggcgggcagtgtggtgatggcctttgaggaggtctgcccggagcgcatcgacctgattcacaaaaactaccggaaactctgtaacctgctgatcgacgtggaggagtggggccaggtggtcatcatcagcatgctcacccgctacgcccgcacgcagttcctgagccccacccagaacgtaagtgggcccagcccaggcagagcgggccgaagtgtgtcccggggaggcgcccacagacccgtcggtctccccgtccaggaatccctactagaggagaacgcggaaaaagccttctacggctcagaggaggacgaggccaagggcgcggggtctgaggagacggccgccgcggccgccccctcccgaaagccctatgtcatggaccccgaccaccggctgctgctgcgcaacaccaaacccctgctgcagagccgcagcgccgcggtggtgatggcggtggcgcagctctacttccacctggcgcccaaggcggaagtgggcgtcatcgccaaggcgctggtgcgcctgctgcgcagccacaggtgcgctccgcccccagccccgccccctccctcgcctcctgccccgccccacgggctgcccggctccgccccctcacgcccaccagccgcttccacctctgcccacccgctccacactgaccgtagtcctgccctccgcactggtcctctccccgcaacgacttgccccaccttttcccctcatccgctgacccttgccccaaccgaggggcccggggtgctctgacccgtcctctccgcagtgaggtgcagtacgttgtgctccagaacgtggccaccatgtccatcaagcgccgggtgagcctgcgacggcgggctgtcctcgctgtccgagggccgcttctgcgggcactggaggcgttgtcggggctgggaccggggccggggaaagggaagatggaggaataccctggctgtgcagaggatggggcaggggaggctccaaatacagatagggagcagggcctggatcctgaggggccgctgaggggatgtccagtggaaaaagagctagtcagatctgagatggacgagggaagacttgaggagtggagggcagtggtgaggaggcaaggatcctgggcgctgggtcaggataggaggggtgtctctgggcagcgaggcaggcctggggcttcggtggagctccctagctgcctctcttgtgccagggtatgtttgagccctacctgaagagcttctacatcaggtccaccgaccccacccagattaagatcctgaaggtgagtgagggacagaagtgcatgtgcttcccagccctccccaccccatgtacccactcaaataactcacagtggcccccctggtgcctgcctattcctggggctgagcccaggagcccatgactgccccagctggagctgtttgttcagggagctgggctaaggagggtcagggggagaagggaactgctctttgcctagtacctggtatacacctgctactcttcataaatgaagtaacctgatatcacctcataataatcccaggatgtgtacattatattccttttataaaaatatagactctggccaggcacagtggctcacgcctaatcccagcactttgggaggccgagacaggcagatcgcctgaggtcaggagttcaagaccagcctggccaacatagcaaaacctcgtctcaacgaaaaatacaaaaattagccaggcgtggtggcaggtgcctgtaatcccagctactcgagaggctgaggctagagaattgcctgaacctgggagacagaggttgcagtgagctgagattgtgccattgcactccagcctgggtgacaagagcgaaactccatctcaatctaagaaaaagaaaaaaagactctgggaggtaactgccccaggtcacataattctgctgactccaaggttcacacttttctctcccacccacagtgttatggcccccacacacctgccccctcaggctctcctgcaaacattcacggacaaggaaagtggcgggagcccatacctccatttgattcctgctctgctgcctcattattgagtgatttccttcagcaacagttaatcttcctaacccttgtgaacatccactatgttctaggggtacatgatgagcaaactaatcagggaccctgcctttgtggagcttacagatgtggggaggaggagacattaagcagttaatcacaaggcaaatgtaaaagtccacttacaaaatatggaagaaagtgtggagagctataagggcataaaatagggagacctcatctagtctggtgccagggaagttttcccggaggatatgagacttgagctgaagcctgagagatgaacatgaattatgcagggacagaaatgggaagaactgctccacgcagaggaaacagcatctgcgaagaccctgggttaggaagtggagtgggattggggcctggaagacaagggggacagtgatgggagatgggaggtagacagcaagcagatcattcagggacttacagaccatggtgaatacgatggtctccatcctgaaagcaataggaagctttaagttttcaatgcagtagggaggtgacatggtcatactgtaagcatactgtgtagggaatccacttaagaggcaaactggtcctcttgctttttagacaagtttcataacctgtcaattccctcatcagtgtgaggatgatgcagggctgtcatgaggattgttttctggtctatgaagtgtatttggaatgaaagcacagaaagtccactggccaacccacccattttctgcctctccaaccctccctgcagctggaagtgctgaccaacctggccaatgagaccaacattcctactgtcctacgggaattccaggtacaggccagctcccagccagaagggcctgggagaggggcccatcagatccttgtgccctggtgggtaaacctcctcttatgagcccaaggctggagaaactattatcttacattcccgttccaatgtgtttggctggctttgggccaaggaatcactggattgggggtggagttgtcaccccctttcccaagtcttagtcaccggcatgataagccataaaatgaaaggccacagccttcttgaaggtcaccctcaagcctgcagagtcactgagggatttctttgtcatatcccacagacctatattcgcagcatggacaaggactttgtggcagccacaatccaggccattggacgctgtgcaactaacatcggccgagtccgtgacacctgcctcaatggcctggtgcagctgctgtccaaccgtgatggtcagtgtttccctgagtgtctaaccgtgatgatcagagggtgtctgcctgcaggtctgactctgctggccactggatatccaccagtctgcctagacacaatgtgtatccattggtctgtctgtcttgatcagggcccaagtgttcctacacctctgagggctgctagagaactgaagggggttgagagaaagagccaagggcctggggcactgcaggtgtgtctgtccacctgagtgtggccatctgactgtcttggggtccacacactcatttttgttctgtagagcttgtggttgcagagtcagtggtcgtcattaagaaattgctacagatgcagccagcacaacatggagagatcatcaaacacttggcaaagcttacagacaacatccaggtgagggagaagccatattttcactccccacttcaaggtcctccccatgatttcaagactgtataattacatatgctagccttatcaaaagtaacttccaaaccttaggtcttcaggtggaaggagcagagacactggaccatgtgaccctgaccttgttacccctgatttgctttccctttggagaccctcaatgagcacgatggactttactactactcttgttttctctctaaagctctagccaaccatggttgagtgacaaatcttgtgtttttctatcgcactgctaagctgaaacatctaaacaaggcattcccaaagattctggagagtaacatggaaataaagtactgagggtacaatgaatccagaaaatcaatcttttacatcatgactgacttagggtcttgaaagctctatgctaatgaagccctagggaagaggggaaatgctgtctaggaaatgtctaccttttaacctctctctatctcaccacccccaactcccatttccagagaacccataatacaacaggccagcacagatgaggagtgctgtttccctggaagtccacaatcctacccacccactttcccgtatttacccatcttcactcctctcccacaaccacaggtgcccatggcccgagccagcatcctgtggctcatcggagagtactgtgagcatgtccccaggattgcacctgatgtcttaagaaaaatggccaagtcattcacagcagaggaggatattgtcaagctgcaggtcatcaacctggcagccaagctctacctgaccaactctaaacaggtaaagattaagagatgaccccccagatactctggtccccagaaactccctagacagtattcttttggccctccctaggcagggctgaactctagctcctattttggaaaagaagaatcagggaaggtggctggtctgcccacataaccaatgctaccccagtgcccacaaagaccttgtagtgctggtggtcactgttgaagagactctcctatgaagctgtgacctccagtctgctagtacaagagtcctgtctgccaccttggaactctggggctgtgaagaaccacagttgattgggataagggaagggcccaacagtggcaggtactgatgggagaacatgcatcccagatgtggtctgtgcttctttccaaagcttgacaatgcttggccagtctgtgccaaagataagggggtgagtctctgcttgggcttgggtggtgctggtggccactgtcattcccaaggtgaaaggttataagagatacacagccaaggatgaggctcaactaagttgtagtatcagggtgttcagagcctcctagctgtctggcatctcctgagatggttccaggagattctcctaaaatgaagcataatgtgctgagcttttcaaggtgtcagggacatcaaacaccatgacgatttccacactctcccactcagttaagcaggacagggattggcaaactactgcccataggctgaatttggcctattcctgtttttgtaataaagttttgttggaacacagccctgctcattcatttacaaattacctatggctgcttttgtgctacaacagcagggttaactagttgcaacagactgtattgcccacaaagcctagaatagttattctctggcccttttataaaaagactctgccaatccttgaagcaaaacctctggctaggtggctggggtctacagatttatagcagggatatcccctggagactgtagcatccctgccatgtccactgtgcgtgggagtctttggatggtggcacttatctttttcagtggcttctttgatccattgtggccagagtgagccccagaggctcaaggtgaggtaggcagggccaccaagtgctgtgactgtaatcaggagtcaaaggacagcagcaacatgtggaggcaactgagtctgtataattaaatatgctagccttatcaaaagtaacttccaaaccttaggtcttcaggtggaaggaggagagacactggaccatgtgaccctgagcttgttatcagtgttgtgggcaaagcagattggagagagagaagttagagggggagagagagaagttagagggagaaagagcaccatggggaagcgttcaatcgttgaaaaaatatttgtatacttcctttgttcaggtgggaggaaggagcaagtgggaggaatgtttgaaaagatgaagcagcctgggtggggagccacccaggtaggtgggagtcttgacatgctcagcaatgagccagagtcctaaaccccaggatggtgaggttggcatgttttcataagcctgggcctgtccacatgtcatttcccccaagttgtcactgtgagctacatgtgcatttgttcatttatttaacatatatgtaggtgggagtctgacatgctcagcactgagccagagtcctaaaccccaggatggtgaggttggcatgttttcataagcctgggcctgtccacatgtcatttcccccaagttgttactgtgagctacatgtgcatttgttcatttatttaacatgtaggcctactatttgcctggtactgtgctgcgtcctgaggatatgacaatgagtgagacacatttacaggtctccagatactcacagccaagtaggagaaacaggacaaaaataaacattttaaacacagcagtaacagctgtcatcagggttggcacagcgagctgtgggtatatacagctgaaccctcccctaggaatgacccctgtcagggaacccagagtaggctgttcaggcaaatggacactcacctccagggcgcccttcacctgcaagtgagtttttgcaggccccttagaatggttatttgattcaataaagatttttgtcctccctttctttctcctttcttcccagcctcttctgggagtggtaaagaagggggagtccttggggtactaggagggaggtggtttggatgcgcacatgaccatgcttgcaaaacagtagtgatgcttcccatcctgggaccatgagtggcaatctgcccagctaaaaggccacagtaatctcagtcattctctccaatttggacatgggcccacggcatgccagatcctggcccaggatgaggccaaggaaatgaccaagatgaggcctctgccctgctattgatcagcagataatcagatactagaccagaggccacaaaggcataacatgcaggtggcgggggatgggggggttggtaatcaaagtggctattacatccacctggatatagaccctggggaaactgcctagcaggttagtttgcttttatgtgtcaggtgagatgtgtggcaggagggtctgccaggggcacagtgggatctacaaccctcccatgtgaccgcctttacagtgaatagaagattctgacaaattttgcagaattgcttttaaaaacgtaaactttttttaatatgctaaaggtaatacatgcttatcatagaacatttggaaaactcagaaaattataagtttaaactattaataagtccaccatttagaagaccaccattaattatatatttccttattttttattcctatatatagtcattcagaagttgtacttttgtctattgtccaatattttaaacttttctgcttcttttcaatgctttcatatttaatacttttttttccccattcacatttcaattaaacttttcacttagaattttctccaggctgggttcagtggctcacacctgtaatcccagcactttgggagcccaaggtgggtgggtcatttgaggtcatgaattcaagaccagcctgaccaacatggcaaaaccctgtctctactaaaagtacaaaaaaattagctgggtgtggtggtgcgctgaaatctcagctacttgggaggctgtggcaggagaattgcttgaacccaggaggtggaggttacagtgagctgagatggtaccaccacactccagcctgggccacagagcaagatccatctcaaaaataaataaaaattaaaaagaatttcctccaaatttttttctactttcacatttttaaatcaattgtattagttttctgctacataataaattactataaatttggtggcttcaaacaacacacgtttattttctcagtgtctatgggtcgagaattcaggtatggcttagttggatcttatgcaaggctacaactgaggtgtcagccaaggctgagtttttatctggaggctgtactggggaaaggtccacttccaagtcacatggtgccacgatccacttccttgcagttgtaggattgtggccctggcttcttgctggctgtcagctgggggctgcccttgccttctagaggccgtccttagctcattgccataggggcctcccaacacggatgcttaatttctccaaagccacaagggagaaagtctctagagccagtctgctagcaagaccgtcttctttttattttttaatttttatgggtacatagtaggtgtatatatttatggggtatgtgagatattttgatacaggcatataatgcataacaatcacatcagggaatggggtatccatcctctcaagcatttatcttttgtgttacaaacaatcaaattacactctcttagttatttataaatgtataataaattattgttgactgtagtcaccctgttgtgctgtcaaatactagatcttacacattctatctaactataattttgtacccattaactatccccacttcccccacccactacccttctcagcctctggtaaccattattctactctccaactccatgagctcaattcttttaatttttagccctcacaaataagtgagaacatgtgaagtttgtttttctgtgcttggcttatttcacttaaaataatgacctctagttctatccatgttgttgcaaatgacaggatctcattcttttttattctttttttatagtactgcattgtgcatatgtaccgtattttctttatctatttgtctgttgatagacacttaagttgctttcaaatcttggctatggtgaacagtgctgcaataaacgtaggtgtgcagatataacttcaatatgttgatttccttacttttgggtatatacatagcattgggattgctggatcatatggtagcactatttttagtttttgtttgtttgtttgagatggagtcttgcactgtcacccaggctggagtgcaatggcatgatctcagctcactgcaacctccgcctcccaggttcaaacgattctcctgcctcagcctcctgagtagctgggattacaggcgcccgccaccaagtctggctaattttcatatttttagtagagatggggtttcaccatgttggccaggctggtcttgaactcctggccgcaagtgatctgcccgactcggcctcccaaagtgctgggattacaggcgtgagccactgcacctggcctatttgtagtgtttttttttgagatggtgtttcactcttttttcccaggctggagtgcaatggcgtgatcttgcctcactgcaacctctgcctcctgggtgcaagtgattcttcttctgcctcagcctcccaagtagctgagattacaggtgcctgccaccacgcctagctaattttttgtatttttagtagagacagggtttcaccatgttggccaggatggtcttgatctcttgacctcgcgatccacccacctcggcctcccaaagtgctgggattacaggtgtgagccaccgtgcccggcctatgtttagttttttaaggaacctccaaactgttctccagacatttccactaacagtgtacaagggttgccttttctccatgttcttgtcagcatttgttattgcctatcttttggatataagcctacttggggtgagatgatatatctttttttgttttgttttgttttttgagacggagtcttgctctgtcacccaggctggagtgtgcagtggtgcgatcttggctcactgcaacctctgcctctgtggttcaagtgattctcctgcctcagcctcctgagtagctgggactacaggcgtgcgtcaccacgccccgttaatttctgtacttttagtaaagatggggtttcgctgtgttggtcaggctggtctcaactcctgatctcaggtgatccgcctgcctcagcctcccaaagtactgggattacaggcatgagccacccgtgcctggcctttcattgtagttttgatttgcatttctctgatgctcaatgatgttgatcaccttttcatatacgtgtttgctatctgtatgtcttcttttgagaaatgtctattcagctcttttgcccatttttaaattggattattgaatttttttttcctattgagttatttgatctccttacgtattctggttattaatcccttgtcagatgggtagtttgcaaattttttcctcctattctgtggcttgtctctttgttgattcctttgctgtgcagaacctttgtaacttgatgtgatcccatttgtctacttttgctttggttgcccgtgcttgtggggtatcactcaagaaatctttgcccagtacaatgtcctggagaatttctctaatgttttcttttattagtttcatagtttgaagtgttagatttaagtttttaatccactatgatttgatttttgcatatggtgagagataggggtctggttttattgttctgcatgtggatatcccgttttcccagcgccatttattgaagagactctcctttccctaatgtatgttcttgatacctttgtcaaaaatgaattcacggccaggcgtggtggctcatgcctgtaatcccagcatcttgggaggccgaggctggtggatcacctgaagtcaggagttcaagagcagcctggccagcatggcgaaaccctgtctctactaaaaatacaaaaattagctgagcgtggtggcgggtgcctgtaatcccagctacttgggaggctgaggcaggagaattgcttgaacccgggaggcggaggttgcagtgagccaagatcgcgccactgcactccagcctaggggacaagagcgagacttcatcttcgtccccccccgccaaaaaaaaaaaagccactgatttttttttttttttttttttttggagacggagttttgctcttgttgcccaggctggagtgcaatgggtttttttttttttttttttttgagatggagttctcactctgttgcccaggctctggactgcagtgacgcgatctccactcaccacaacctctgcctcccgggttcaagcaattctcctgcctcagcctcccgagtagctgggattacaggcatgcaccaccatgcccagctaattttgtatttttagtagagacagggtttctccatgttggtcagactggtctcgaactcctgacctcaggtattctgcctgcctcggcctcccaaagtgcttgctaggattacaggtgtgagccactgtgcctggacaatgctactgattttttttttttttgaaacggagtcttgctctgtcaccaggctggagtgcagtggcgccatcttggctcactgcaaccttcacctcccgggttcaagcggttctcctgcctcagcctcctgagtagctcggactacaggtgtgcatcaccacatccagctaatttttgtatttttagtagagacaggatttcatcatgttggccacgatggtctcaatctcttgatctcacgatctgcctgcctcggcctcccaaagtgctgggattacaggcatcagccaccgcacctggccaatgctactgatttttatgtggattttgtatcctgcgactttactgaatttattagttctaatagttttttggtggaatccttaagattttttaaatataagatcatatcatctgcaaacaaggataatttgaattcttttccaatttggataccctttatttctttctcctgtctgattgctctagatagaacttccaatacagagtcttcttaataaaacataatcataggatcatatatagtcatataccacctttgccatatcctgttggttagaagcaagtctcaggttttgcccatacccaaggtgagggattgcacaaaggcatgaacaccaggaggcagctactggtggggaagaccttagaatctgtctgccacatccatctagagcttaaacttactcatgtgtaatgtgtgaattgaggatatatttcaattttttttaacagccagttttctaagcatgattagcaggcatctgcaaggtagcatgtatgttggcataggttatggaaaggaagtcagtgtttcctgcttaaaattcctctctgacaactggagcctgttggtgagggggagccttgttctgttcttggcacactggagtgtatctcagaggccttcttgaacagcctgtaattcctgcacatcctggctagatgaggtgggggtcttggtggtgcacacaggatgccacaatccacagggaatggccccttggggtggagaagggtaatgaattattataggcaaatcctgcagtgttgaggtggtgggccagccccttcctgtgttggttgttaacatgcagttaaggctgtggacagatggatccaaataccaaacagttctttctagaactaggcaaggacttgaaggagggagtctgtgatcagccagctgggaaatctgtggaggaagacattgtccaaaccaaaagagggatcagcagcctcttgataattgactatgttggtaagggcatccactagccctggccatttagatggtgtctggccaagagaggggcaggttggtgatgaaatctgttgtgatggcatcttattttcatatttttaagtctattctattagcggtgcatgggattgggattgcttatctgtgactataacagtatcgcaggtgctgctttgctggaagggactgagctgaagagggcctgtgggccagattggaggtaggaatgtggaatcatagtggctctctagagtggtgtggggcaattctgccaaagcagctgctcagactctgggtcagcatctgaggggctttgccccttatggacatctgcttgatgtccctgccagattagctgggttaaccatgtccaaggctacacgtaacagtatgtcaccataaacctcaggaagaacagagtcagttccaggctccctcctgccggcccctgatgcccttgggcattctgcttgttgaccacttggtggttttgatcttggtcacaagtgatggaaacatggagacctgggccagggcaggctccttatgtcagcaggtaggcagtgaagggaagcagatggggtgcagctccagcagatgcaggcctaggtgcagtactgatgggctccttggcctgggaaaagccccttaatgatcctgcttcttttctgtaaaatgggggcaataatgcctacttctcagaaggcttggggagattagatgagctagtgtggagcacctagcacagagttggtgccagaaggcacttgataagtgatggctgctaccgctgttgccatgttaaggcaggttagattaggccaagatcatggcagaaatggagatattttaggtctgcagttgtagcttccctgactgcagactgtgaaccctacatgaccttggcaaatgcatgggcagctgcagtttgccctgatgtcattagaagcttccagggaaggataaagacctctgagacccctgggctgctcagaatctactaaatgggtggatagggcatgagggtggcccctgccaaagggacccctgtttatctgccctgtctttttgttgtctaattccccctgggtggtggagcctggaaactgtgaggtccagcagagcattccatacttccacataccctgctgccctagagtaaagaggctggacaggcctggagtggtagggaccacaaatctagggaagaatggagtccagagccaggagtggggaaagtccaaaaggaaaacctcttttgttggcccaaggcagttgtcaaagttgggatcatcaggaggcatgtccagagagatgagagaaaattctgagcccagaacaagggcaggtggggagggacagctgggtggaagcgccggtcctaagcagggagaggagacgttctgcctgaaagtgtcggcttaaagaatctgtttctgagcctcctgtgtccccatccccccgtcagctgacccacctcttcctgttcctccagaccaagctgctgacccagtatgtgctgagtctggccaaatatgaccagaactatgatattcgcgaccgggcgcgcttcacccggcagctcatcgtcccttccgagcagggtggggccctcagccgccatgccaagaagctcttcctggcacccaaaccagctccagtcttggagtcatccttcaaaggtgggagctgaaatcaagggtaaccttcctaggggaatggaaaggaactggccagagtctctgccccagaccttcctgaggcccctagccaggcaccaggcttctgtggacagtcctgctccctggctcactccttttgtccctcctgtggcaccaggaattactctttcaccctcccataaccactgccagcatcatctcacctgagggtctgccttcctggccaggatggacttgtgcctcctctcctctcaggctcccttttccatctccctccctgagcagacactaggctttggaatacataccaagatcttaaataccaaggacccaggaaggcagaaagcaaaacaacacacaaaggagaggtgtatatttttataaaggtcctgagaaagcagttgcctgcattctgtgagcttagtcactacagtcagtccaaatcccaggccccagggcttcagccttgcctctgttcctgggcttggcccttaaggcctcttttcccaagacaacggccttgagatgggcctgggagggaagggtcctcccgctgcttctccgggccccaggagtggaagccaggaacctacacagaagagagcctccttcacaaagctcagttcttctgggtatcttttcgttctttttctcttccctggacctcacgaatggggagattctgagggtgggcacagctttgaaattctcccaggaagaaggcaacagtccctttctccccgacaccatcctcactcacaggcctgtgctgccctcctccagcagtgcctcaactctgatccagacttctacacactcatgctctgactgttcatccctccctgctgagtccagagcctgactagacgtgcatgctgagcagacaggtcggcagcatctgtgggcccagagtctcctcctgcccacctctgtaggctgcctttccctggccctcagtccctgctctggcctggccagacagccttttcttccagcatgtgggcctaaaggtgcagtcagggtggaagagccattagggcacacatccatctccttcccctacccacctgggaagtcccaaccagaatcaccacccagccccacctggaaaacagctcccagagctttccctcactgctgctacctgcctgacctctaaacctatccctagaccgggaccacttccagctgggctcactgtcccacctgcttaatgccaaggccacaggctaccaggagctcccagactggccggaggaagccccagacccatctgtgcgcaacgtggaggtcagcggggtggagggttgaagtgtgtgtgtgtgtgtgtgtgtgtgtgtgtgtgtgtgtgtgtgtgtgtgtgtgtgtgttggtgggggcagacagtagggagccctggcagtgccggcccagccctcctaacaccctcccccacacacacaggaagaagatctctcccttattgagactcacgtgggcctgttgggcgaatacactgaggtcccaccttcgtgtgacgtgtgctctctcccctgccctgtctgtgtccctcttcttcccctgtgtgttgtgctcctgggccttcccatactctgtttccaccttggtttggcagtgctcctctgtgagcagcattccctcccctccatggacagtgcccctttcttcctcctctgttattccctttgtgggacagaccaggtagggcctcacaaagaggtggaataaagggtaagggcttgtgcctgcctgccttctccccaaccatgatgaaatgaccctgcaccctacccccatctccaggtacctgaatggaccaagtgctcaaatcgggagaagagaaaggagaaggaaaaacccttctactcggactctgagggggagtcaggccccacggagtccgcagacagtggtgagcagatggcagagctggggtcctctgtgctctgcccatgcatctgtgtgactgactatatgaggggtatatgtatatggttgtgtgtctaggggtgtgcacctgcttgtgaattgtttgtgcacctgagggattcatgttccaggtgtgtgtgcttgtgcaggtttctatccatggagtccatctgtgtttctgtcagttccagctggcatgtagggctgggggcaggtcagagaggtttgagggttcagtactgaatgtgaaggtggaacccaggtgtctgctccagacccaaggaggcctgcatatgagggaggaggcctcatattgttcctccacagaccctgagtctgagagtgaatcggacagtaagagcagcagtgagagcggctctggggagtccagcagtgagtccgacaatgaagaccaggatgaggatgaggagaaagggagaggcagtgagaggtgagaagggagctagccagatggctggtggggttcagggggctttcctggaaagagggctagcattgagctttagccagtctcctaagagcccctgagcccctcgtgagctgggtggggctgtcagctcacatgacgcctactttcgctggctgcaggagatctctgaggcctcatgggctggtgtggagaagcaaccagagtcctagagcctgagctggcacaagctggcttcaagctctcacggggtccctgctataggacctcaggtgtgaaccctcctggctcaggctccccacaccactccagcttttcagcatttctcctgcttctgtgaagcaaggagggagtgtccaggccaggcctgagccaacctttcccactccttcagtgaacagagtgaggaggatggtaagaggaagacaaagaagaaggtgccagagagaaaaggagaagcgtcatcctctgatgagggcagcgattccagcagtagctcatcagagtccgagatgacatcggagtccgaggaggagcagttagaacctgcctcctggagcaggaaaacagtgagagccttggggcagagtcagggtgtgctcatgggccagggccctccccaacctctgggccaggcccagacatctatctccctaccatccagaacagaacatgacatcttctacccaacccagaacatgccaaggtgctccccttccccacacccacatcccatttttctctttcagcctcccagcagcaaaagtgctcctgcaaccaaggagatctccctgcttgatctagaggattgtgagtttgggtggtaaaagtcacaggggaaaggaggcctggggagcatgaattagaacagcccatagggactctggatcgggttcctcaggtcttgtgggagcaggggagcagacagaacatatcttcaggcctgagagggcagcagggctgacctccccaggtctggggttgaggtctaggaatgggtattttgcgagagcctccaggcagccatgtgccccgctgtccatggtgctgaaatgcgtgctccttgatccctaggctccctgctcaacccaagccacctccactttgcctcctcatagtcttatctactcccacagtcacccctcccagtgtccagcctgtgtctcccccagcaattgtgtctaccagtctggctgctgacctggagggcctgacactcacagactccaccctggtaccgtcggtgagtgggatggaggaggggaccgggctggggcagggacacatccctgtgctgcatcctatggtgtggatgtgtgtggggggtgggtgtgatggaggatgtgatagctttgagtcccagctgctggatggccctaggggacaatgctgggacaggctctctccatcttgctcagttctgtccttccctacccctccactctagcttctgagtccagtatcgggtgttgggcggcaggagctgctgcaccgggtagctggcgaggggctggctgtggactacaccttcagccgccaacctttctccggggatccccacatggtgtccgtgcacatccacttctccaacagctctgatacccccatcaagggcctgcatgtgggcactcccaaactgcctgctggcatcagcatccaagaatttcccgaaattggtgcgaagggctttggatggggtggaggaggaggctcctgggcagagtcagtctttctgtggttgctgataccctccttgtgccaggccaggggccaagctataggggcacagagatagcatctaacatgatcaacactctggtggacaagacagatgatgaaataagcaagttcacatcagggcgggaggtgcttgcagcagcagatttgggccttggttgtttcaggactaacttaaatgtggtgagggtgagtgggggaaagggtgcttagagttcaggaggaaaccgggaacagtctccagcagccaagaaagccaagattctgtagagggctggtcagctgtgacagtggagaggagagtagggctaggctgggttctagacctatcaggtgatggtggccctccctctccccttcactgccttataccacttcagagtccctggcacctggagaatctgccactgctgtaatgggcattaatttctgtgactcaacccaggcagccaacttccagctgtggtatgtgcccaactcgaggtgggggtgagaggatgggctggaaagggacagggtaacaatgaactggaaatggaggtggtgcttagtggggatacatcatgattgggtgggtctggaagccatctcaggccctcattcctgacctcactctttcactgcctccaagctgtgcctctacacagggtgggaagtgaggggagagatgacagccttaattcttctccgtttcctcccacccctcccagcacccagacccgacagttctacgtctccattcagccacctgttggggagctgatggcccctgtgttcatgagtgaaaatgagtttaagaaggaacagggtgagtgctccctgggagtgggcagagagggaagtatagaagctgactccagaatgtccagcttggatggtagggagaatggtggtgtccttcatctagaccaggggtcagcaaactttctgtaacgggccaaagataaatgttttaggctttgagaatcatgtggtctctgttgcagttacaacacgactgtggctgttgaaacatagaaacatccacagacagtatgtaaatgaacgagtatggctgtgttccaagaaatttccatttatatttatagatactgaagtttaaatttcatgtaattttcatgtgtcatgaaatattaatcttttgattgctcccccaacacttaaaaaatattaaaaacattgtgggccatataggtggtgggctggatttggtctggaggctgtaatttgcaaaacctctggcctagaagaaagaagagtggcttgggcaagggaggagggaagatcatggttagttttggataagctgattttgaaatgcatttgggaaattcaggaggagctatttagtatgcaactgaaaatatgggtctatgcccaggaaacactttgaagctggagtcatgaacatagaggtggtaatggaagctgtgaatatgaatgagatcactctgggaggtgggagaaaataggaaggccaaggacagaaccttgggggaaaacctgaattctgcagaagaaagaggaggggagggataagagaaggagcacagggagaggtgggaggagaaccaggagagacaacaaggcagaaggtgtctgcaaaccacagttacctaagaccttcagagtcagcatataaaaggctactgccaacctgagggagagagggtcattgctaaaggagggacagaggccaactgcagtgggttgagggagaccacggctcaagtacatgcagtcctctttggaggactttagccatgaatgaggagggagacagggcattggcacgatgaaggatctcacttctggaaaggattttttggagacggggacacttgaacatgaacagattgaaggaacaaaaacaagaaaatgttattagtcatgaatgaaggggatagaagaaacaggagagggatgtcagtttctaaaaggaggtgaagaataggggaagcagtggagggaggaaagaggctgaagagaagactgctggtgtgcaggagagcagacggaggagctcccatggggggcctggatcatgtgagtggagagaagtcagccttgcagaatgaggagttctgggggtgctgtgaaggtttggaggcttcaggagccctggctaggtctggagctgctactgcagaggtacaattaaaaatgtacctgtgaatgctgcatgtgactactggattctggctgagagatcacagcagccacctgtgatctttttgtgagggcttagcttccaggagctgagtgggagttgaatgtgggttggagggccccccaggaaagatcaaagggtgtgaggttcaggatgggcgaacctcttaagaactgactggccactctcaaggggctggtagcccagatgtctgatggaggaagcgccaaatcagtctttggtaacaacatggataaaggcctgggtgggaggggtagagaggctgacaaaggcttcctgagggagggcccagtctgagagggaagtaccttctccccaagactgatgatttaaattctgacctgccctttgcatgataccttcccagcctgggagaacttgttgctcagtaagcagacccaggtgctggcctctgtacccaccatggcctctgccctcatcacgacctctacccccaggaaagctgatgggcatgaatgagatcacagagaaactcatgctgccagacacctgtcggagtgaccacattgtggtgcagaaagtgactgccactgccaacctgggtcgtgttccttgtgggacatctgatgagtacaggtactaggccaccagtagaggggaaatgatgagcatgggggccctggtttgaaggaggagccccagctgctgatccccttccaaacacagtcacccttagcagctcttcctcaccccttctattcccacctcaggtttgcagggaggacactgactggtggaagcctcgttctgctgaccctggatgcccggccagctggagctgcccagctgactgtcaacagcgagaaaatggtgattggcaccatgctggtaaaggatgtgatacaggctctgacccagtgacttccaaa

SEQ ID NO: 15421 - DNA, 49739 bp, Homo sapiens
acctttgattcgttcgtttgtttcttcatttgtttattcgtaaattctgcaacaagcatttatgaaaagccaactgtgtcgagtcctgaactagtcacggaatacaactgtgaacatgagacccttcttgtcctcacgatgctctagaggggagcacagatgaagaagcagtcagggacagtcgagtgtaatgggggcagtgggagcagggagaggacctagtctctggcgccggagagaaggaagacaggagcgtgaggtatgttccaggcagaggaaagggctttcaggaaggttgagagccaggccacaatctgtgtgagccactggactgaccagaaaagagggtggggaggactcctgaaggattctaagcaggcgacataatcagatttatattttagaaggacgtcaggctgctgcattgtggagaagagattggaggtgggccagattgaacaagagacaagggaggtgggtcttgaagttcacaggcctggcatgattgtggcctagaccaggggagaggcagaagatttgaggctgtggaagaggtggaagcctcagacctgatgattaattggatattgggtgggggtttagagggacagggggagaagatgaggattttcacgcacgtccatgtgaagagaccaccaaacaggctttgaacaataaagctttttaatcacttgggtgcaggccagctgagtccgaaaaaagagtcagcgaagggaaatggggtgggaccgttttacaggatttgggtaggtagtggaaaattacagtcaaagggggttgttctctggcggtggggggacacaaggtgctcagtgggggagcttttgagccaggatgagccaggagaaggaatttcacaagataatgtcatcagttaaggcaggcacaggccattttcactcttcagttacttcaggccatctggatgtatacgtgcaggtcacaggggatatcatggcttagcttgggctcagaggcctgacattcctgtcttcttttattaataagaaaaataacataaaatagtgttgaagtgttggggcagcaaacattttggcggggggtggtatggagagatactgcttctccatagccttgaagggctgcttcgagcgggattggggtggcgtgggaacctagagtgggagagattaagctgaaggcagattctgtggtaagggatgatattgtggggttgttagaagaaacatttgttgtataggattattggtgatggcctggatacggttttgtatgaattgaaaaactaaatggaataagagaaggagaaaaacaggtattaaaggactaagaattgggaggacccaggacatccaattagagagtgcccaaggaggttcagcatagccctgccagcaaagattatttatttactttaagagggagttaagactggcagtttggggatagcaccaggagatatcagctgtaatggtttggagaaacagtgtaaaccggcagtgtaaacaagagcagggcatgtatgagtagttgagtatggtgaataggagtatgactagtcagaagatagtagggatgacaagttttctggggcacagtccaagttggtctggtgtctggaatgagactggggcctaataaaaaggagcatctatacaggagcttgaatgggctgtaccctgcagcattccgaggacaggcccaaattctgagaagggcaagtggtaaaagtattgtcagtcctttttaagttggtggctgagcttggtgaggtgtgtttttaaaagaccattagtccgttctaccttttctgaagattgaggatggtaaggggtatgaaggtttcactgaataccaggagcctgagaaactgcttgggtgatttgaccagtaaaggctggtctgttattggactatatagaggcgggaaggccaaactgaggaattatgtctgacagaagggaagaaatgaccgcagtggccttctcagaccctgtgggaaaggcctctacccatccagtgaaagtatctacccagaccaagacgtattttagtttcctgactcggggcatgtgagtaaagtcaatttgccagtcctgggcagaggcaaatccccaggcttgatgtgtagggaagggagggggcctgaacaatccctgaggagtagtagaatagcagatggaacactgagaagtgatttccttgaggatagatttccacaatggaaaggaaatgagaggttctaagaggcaggctagcggcttgtaacctacatggaagaggttatgaaatgacgaaagaatagaatgggcctgtgaggctagaaggagatattttccttggtctgagaaccatttgccttgtgtgggaagagattcataggtgtaagtttcattgggggagtaggtaggagtgactgatgagaaggagaaaaactggccatgagggacagaagttggaatgctagctgcttttttagctaccttatcagcataagtgttgccctgagcgatgggatctgatgccttttgatggcccttgcagtgaatgactccagcttcctttggaagtaaagcggccttgagaagagtttttattaaagaggaattaatgatggaggacccttgtgtaatgaggaaagctttttgcccatataacagcatggaggtacaggatatggaaggcatatttagagtcagtataaatattgacacatagtccttttgcaagactgagggctcgagttaaggcaatgagttaagctttctgagaggtagtggaggggggcagaaagtatatgcgtcaggtgtgaggaagaaaatagattttggaagttatgagaactgtagagagtgagttgagcatagtttgtgattttgagggcctctgaaagtattaaagcagcggcagccgctgcacgcagacatgagggctaggccaaaacagtaaggtcaagttgttcggacagaaaggctacagggcgtggtcccagctcttgtgtaagaattccaaccgcacagccctgcactttggctgtgtgtgatgaaaaagggttgggatgaattagggagacctagtgtgagagcagcttctacggctgtttttaaggaatggaaaggagtggcaaaaggatttaggatctgtggggtcagctaggtttgcttttgtgagtttatataatggtttagtcaggatggtaaaactaggtatccaaaggtggaagtacctaaccatcccttgaaaggaaaggagttgttgctttgtagaagggattggggttcgggagattagccggacatgatcagcagggagagcacgtgtgttttcatgagaactatgccaagataggtaatggatgaggaagaaatttgggcttgactgaagtaatgggggctgtccgtgaagccttgcggcagtacagcctaggtagtttgctgagcctgatgggtgtcagggacagtccaagtgaaagcgaagagaggctgagatgaagggtgcaaatgaatagtaaagaaagcatgtttgaaatccagaagagaatgatgggttgtggaggggttgtggagggaggtattgaggaggagagtatatgagtttggcaccacggggtggataggcaaaacaatttggctgacaaggcacagatcctgaactaattgtaagacttgtctggtttttgaacaggtaaaatgggggaattgtaaggagagtttataggctttaaaaggccatgctgtaacaggcgagtgataacaggctttaatccttttaaagcctgctgggggatgggatattgacattgagcacggtaagggtgattaggttttaatgggatggtaaggggtgcatgatcagtcgccaaggagggaatagaggtgtcctatacttgaggattaaggtggggagatacaaggggaggatgtgaaggaggctttgaactgggggaaaaggtggcaatgaggtgtggctgtagcctaggaatagtcagggaagcagataatttaaagtgtctcggcctaataagggaactgcgcaggtggggataactgaaaaggagtgcataaaagagtattgtccaagttggcctcagagttggggagttttgagaggtttagaagcctggccatcaatacccacaacagttatggaggcaaaggaaacaggcctttgaaaagaaggtaatgtggagttggtagcctccgtattgattaagaaggggacggacttaccctccactgtaagagttacccaaagcatctgtgatggtccaggaagcttccaaggcgattgggcagtgtcagtcttcagctgctaagccgagaagatttgggaaggagtcagtcaggcagccttgggccagagttccaggggctctgggagtggctgccaggtgagttggacagtccgatttccagtggggttccacacagatgggacaaggcttaggaagaatcctgggctgtgggcattccttggcccagtggccagatttctggcacttgaagcaagatcctgatggagaaggtcctgtaggaatgcttgactgctgcagcttaggcattttgaagttcttgtgtactggagatgtggctggggtttctctcacagtggaggcaaggaactacaactcagaaatacattgctacttggctgcctttactctattattgtacaccttgaaggcgaggttaattaagtcctgttatggggtttgagggccggaatttaatttttggagttttatttaatgttgggagtggattgggtaataaaatgtatattgagaataagactgccttttgaccttttagggtctagggctgtaaagcgtctcagggttgctgcccaacgagccatgaactgggctgggtttttatatttgatgaaaaagagcctaaatactaactgatttggcagaggtcggataaaggaaaaggagcgttaaccttgactatgcctttagctccagccacctctttaagaggaaattgttgggcaggttggggagggctagtcgcagaacaaaactgtaagccggactgggtgtggggagaggaggtgatagaaggattatagggtggaggagcagaagctgagaaagaattggagtctgattcagcctggtggggagtgacctgaggagcattctggggattaggtgagaggtcagatgggtcggtagaaaaggaagattggaagattgaaaagacgcagcgacgcttggggttgggactgaggggacaggcgggagggaaagaaggaggatttgggatgagtcgcattgggaacagagactagggagggaccgatgtgtaaaagaatgcctggacatcaggcacctcagactgtttgcccattttacaacaagaattatctagatcttgtaggatggaaaaatcgaaagtgccgttttctggctatttggaaccattgttgagtttgtattggggttaagcggcattgcaaagaaaataaggcatttaggttttaggtcaggtgtgagttgaagaggttttaagttcttgagaacacaggctaagagagaagaaggaggaatggagggtggaatgttgcccacagtgaaggaggcaagcccagagaaaagagagggtagagacacggagagaaggggtggggggtgctttgccccccaggaaagtggagagaaaagagagggtagagacacagagagaaggagtcgggggtgcttgtcccccaggaacgtggagagaaaagagagggtagaaacatggagagaaggggtggggggtacttgccccccaaaaagtggtgtttgccactaagggtgaaagatcaaggcaggcatcctcgcggtgatcagacaactctgaaacgtgggtgaataatcaagcaggcgtccccgcagtgattaaacaccaagggaagactgtcttcctgagtccgtgatcggcgccggagttttgggttcacagataaaatgcatttcctgtctctaccagaaaaggaaaggaaccgaaattaagagaagggagagattgaaagatggcaccaagattgaaaggagaaagaggttgagggatagtgagagaggttggagaagagagtaaaaagaggccgcttacctgatttaaaattggtgagatgttcctcaggctggttggtctgaggacccgaggtcattaggtggatctttatcatgaagcaaagagcaggaggacaggggattgatcttccaagggtggtcccccgatccgagtcatggcaccaaatttcacgcacgtccatgtgaagagaccacccaacaggctttgtgtgagcaataaagctttttaatcacctggttgcaggccggctgagtctgaaaaaagagtcaacgaaaggagataggggtggggccattttataggatttgggtaggtagtggacaattacagtcaaaggggggtgttccttggtgggcaggggcgggggacacaaggtgctcagtgggggagcttttgagccaggatgagccaggagaaggaatttcacaaggtaatgtcatcagttaaggcaggaacaggccattttcacttcttttgtgattcttcaattacttcaggccatctggatatatacgtgcaggtcacaggggatatgatggtttagcttgggctcagaggcctgacaaggatgttactcaggttactagttcctgcaactggatggatgatggtgttattcagtgtaattggaaataaagatgttacaagcaaatttgtggaaaattaatgttgagcccagctttggacatattgagattgtaaactctgagggacatattaccctattaggtagctggatattacgatttgggttccaggagagagattagggaattattaacatatgtatgttaattaaagccacagaagtgaagataactcagggaggaggtataaaatgagttcagacactgcacaagtctgaaccctgaagacaccaacattagaagtgaccagagaacagtggaaagtgtttcaaggtacccaagaggtgaactaaaggctgaaagaaaacaatgtaatttcaagaaggagggagtggtcagtagtttcaatgcccattaaggtcaaatcaaacaaggaaaaaaatcatgaccattggttgacaaagaagagctcaattcctttctactctattccccacctcctgccctgggagataaattctggcaaagtaaggagaacaggagctagattatttctttcccagcattctgttgtggatgatttaaaacatacagaaaaatgaaatgaataatacaatgaacacatgtatatcatccatctagattcaactgtcattgacatcgtaccttatttgctttatctaaccatctattcgtatactttttttggttgaaccatgttaagttgcagagatcatgacccttcaaccccacattctaagtcgacatctaaagccagattaaaatgaataaaggagcacacaggtggtaagtagataaaacagtgaatggaaattttgctttcaagaaatttgactgtaaaagagaaagctgctggaggagaacctcactcagttcaaggaagtttgtctattttgttattttgggtttttttttttgtttcttaaaatgtatgactccatatttttgtttattattaatattaggcgggagagcctagagcaagtttaactgctgatgggaaggagcgattggtgggagagaggctgaagggaagaaaggaagtacagaacactgagtgatgggaggggaggcttactgagctgggtgggaggactagcctgggagcagggaggaccaactctgcccagagggaagagggcaggaggagaggagagtataaatgcagatggagactgggtacagtggctcatgcctgtaatcccagcactttgggaggctgaggcgggcaggtcacttgaaatcaagagttcaagactaacctggccaacatgtcaaaaccccgtctctactaaaaatacaaaaattagccagttgtggtaacgcatgtctataatcccagctactcaggaggctgaggcaggagaatcacatgaacccgggaggtggagattacagtgagccgagatggcaccactgcactccagcctgggcaacggagtgagactccatctctaaataaataaataagtaaataaatgcagatggatgggagtctggggcagggggctgcaggggatttcatctaaagactttccctttttcgggaaccaggtggtgaagccataagggcaaggctgggaatggggacttgagggtcaaaggggtttcaaatacaatgaagaaagccaaccaggccaggcgcggtggctcacgcctgtaatcctagcactttgggaggctgaggcaggcatatcacctaaggttgggagtttgagaccagcctgaccaacatggagaaaccccgtctctactaaaaatacaaaaattagccaggtgtggtggtgtatgcctgtaatcccagctacttgggaggctgaggcaggagaattgcttgaacccaggagacggaggttgcagtgagccgagatcacgccattacactccagcctgggcaataagagtgaaactccatctgaaaaaaaaaaaaaaaaaagccacccaccactggcaggccagtggcattggagaccagtgggacaagagggccaaggatgtgagagcagttggagggatagacacaggggttgcgggggagggtgctaggaggaagtagagataagagaaggttgatgggaaggaataaatcaagtattggctctggaaaggcaggtgaggattaagatgcctagggtcagtgagaagagggtatatgagatttctcaggaggctgcagtctaattgtggcagtgggattggagctgaagagggcatctctcacctctctatcaactccactgaccatctagtcccttgcccagagactaggggtaggcttggtctcctgtccctgcccttctttccctctagaggccttgtctctgagcagtgaagaggaaaccggagcatccctccctgccagtgtccggttaccaagttttgggggcgggccatctggtgactgtgacaggagccccagcgccctggccagctcagtccattcctggagaagaacctgatgcagcgattcctgcagctcccgggggccgtggtgaggcctggggtcagaggggcctgcggagctgatcaagaggctgctagccctgtgctggctcccgaaggtgggcccccactccggtaccaggccttggagcctgaggagcttcggtggctgcaggcccaggaggaagacacgaccccagaagcatctctggaaggaccttgcccagaggccagccagagccagagccagccactacggtatagaggaacccacaggaaccccctacccacacagccaggaaggccagggatgggcagttgcactctcagcccagacctcttccggtcccacctcctctgatggaggcttaggctggcatttagggtccaggctgggcggagaaggtggtcaggggcaccgtatgggggctgagggtatgagtgaggagagatgaggggcttaactccctggaggctctgaggggaggaggatagtaaaatatttgagggttgaggtcccaccttgacctctttctccccacaggcccccactggagtgggctctggacgaggtttggggacaggatacagcacagacagggtttggccagccactgcctgccagtggactggaacttaggtggtaagaggtgacagcgaggtgtatatcaagggaggtgagcatgactgacccccagtgccatgccaggccccctggctggctccagccacccccagaagagtcccttaggctaggtcagactaggggtcaggtcagagtgagtgcagcagcgtaaggggatctgactatgggagataatgtttcatggccttagggtgttgtgccttagtccctgcctctgcctcttgggaacagaagttggtgggagtgaggacgagaggcccagggcggtctcacctcaggtggtggctgcggtctgtgtcagtgcatattctgtgtcagtgcatattcgacagtcaatcttacctgtgctggctgctttaggcccagtggtcctgccccctttcattccccttctcctgcaggggcctggaatgtactcactaggctgggtggggaggatgccctggggtgtgtgcatttgacaggcgcatgtggcatttgtgggtgtggtgaggaagggaatacccagagttaaaggagattgggcaaacttggccctccttccacggaagcccagggaaaagccatcccagggtgactcctcagaagatcagaggacccttggggctggatatatttgatcttagaagcctacatttatcatcaaaaatctcaactaggagtccactgaccattttggtgaatgagactggagaggccaagtttggtccaagttatctgtgtattagatgtgatgcggcatgtgtgtgtgtgtgtagggggacgtgtgtggggtgtgtgtgtctctatgagggtgtgggggagcggggagaggtcttgtgatatatgtctgtaggggacatgtatgggatatgtgtgtctataagagggtgtgggagagtggggagaggtctcctggtggtatatgtctggggggtttgtaggtgtgtaggtgagttgtgtgggtggtttatgtgtgtagagtttttctgtgggaggtgtctgtatgtgggggagtgtgtttctctgggcgttgtgtaggcaggattttgtgggtgtgcgtgggtttatgtatggattctactagtgtctgcgggacctgtaggtatgtttgtatgagctgtccgtgaggtgtaggtatgtcgggggacatgggagtgtctgaggtatatgtgggtggtatcaatgtgtagttgtctgtggggtgtgcgtatgaaggatcctgacgtggagtgttgtgcattcatatctcagggaagctggtgcccagctctgtcatttttcctaggccctcggtgctgcccacgcctacccagctcaatggtctgtacctatgaccatgcccctggtgtcctgagctcagcctcctacccactaagaaactcaacagtctggtctgtgtttggcagggtaagagggtgattgtcttctggccctggcctgaccctggaagagtagaaggtgtcctctgatttggggggcatccccccaggtgagggagtttcagataacatgatggggctggatattttcttctgtcctcacatgacagatagcgagggcctcagataatgctggaaggcatcatctttctattttgctttccatcaaaaatctctttgggaaagacagtttctaacattcttgggatagtgacttcttagtgcccctcttcttgtctgacgtcaggtactcacgcatttctgcagccctgtgactaagttgcgtgttctgtctggttcttctcttcctctcagcattcatcacttgtttctcagcattagcagcagtcatttgccactttatgattgttatcatgctctttcctctcctaacagtgctatccccaatttctgattttctgtcatttctaaatgttgcatgtctgtgactaactttgcacacattgattttttttttattttttatttttgagatggagtctcgttctgttgcccaggctggagtgcagtggcgcgatcttggctcactgcaagctccacctcctgggttcacgccattctcctgcctcagcctactgagtagctaggactacagacgcccgccaccacacccggctaattttttttaaattttttagtagagacggggtttcaccatgttagccaggatggtctcgatctcctggccttgtgatccgcctgccttggcctcccaaagtgctgggattacaggcgtgagccaccgtgcccggcctgatttttaatttttatcactgtgatatttctcaagctgggttcttgtgcctgggtcaaagctgtgggttatcagagtgtcatctgggaaattagtgtgtgtgagtccccacacacagctgctcaccacattttggaattgtcttggcaacatatgagtgcatcagtttcacacaattctatcagctatatatagacacatttttttcatgggtttattaacaattctctgatcacttcgtgatcaccagttctgcatcctctgagtatggttagccacattgttcactgcacaagggcatctggccaaggaataccagcccatgctccacacacagaatggggagcaacagctcagggctgtgtctatctgtaggggcatgcagattgaaaatgggcttgtagcagccctgacagtgaatgctgcaaagagaccttatacatgtatatcagttccttttttaaatttttttgagatggagtctcactctgtcacccaggctggagtgcagtggcgcgatctcggctcactgcaatctccgcctcctgggttcaagcgattctcgttcctcagcctcctgagtagctgggattacaggtgtgtgccaccatgcccggctaatttttgtaattttagtagggatggggtttcaccatgttggccaggctaatctcgaactcctgaccttaagtgatctgcccaccttggcctccaaaagtgctggaattacaagcgtgagccaccacacctggcctctatttcgaatattaaactttaatttaccatatcccaaatatttttccttttgttgctattatgggctgaattgtgtccctccaaaatgcatatgttgaagttctagcccccagtacctcagaatgttacctttgaggtgattaagttaaaatgaggttattaaggggggccctaatccaatatgactgatttctttataagaagaggaaatttggatataggcacgcagaaggaagaccatgtgaagacagagaagatggttgtaagagacagaaaaacccaaagtgtgtttctcctactctcatacacaccgctcaccagagagtgcttcacctctggccacaaaaatgggtggagatttctccccaccaacaacctgttctccagcagacactaactgggtgttctctaattcaagtcaatctagtgttagattttttaggttaagggctcagtgccacaagactgctctctgcttcagatgccaattccaagtggtaagttgtcagctatacttctgaccaactggctataaatcaggggttcccatgccaccctccttgggttcaactctgtgagtggctcacagaactcagggaaactttagttatatttacccatttattataaagggtagagacaaacaccagatgaagagatgcatagggagaggtatggaaggaggggtgcagagctcccatgccctctccaggcaccacaccctccaggcaccttcacatgttccacagtctggaagctctcgaaaccctatcctcttgggtttttatgaaggcttcatgattgatcgcatctttggccatgtgatcaactcaaccatcagccccactccccattccccagaggtcaaatagtgggattgaaagtttcaaccctcagctgggcacagcagctcacgcctataatcccagcacttttggaggccaaggcgggtggatcacttgaggtcaggagttcgagaccagcctgaccaacatgatgaaacccatctctattaaaaatacaaaaatttgccaggtgtggtggtgggcaactgtagtcccagctatttggaaggctgaggcaggagaattgcttcaacccagaaggtggaggctgcagtgagccgagattgcctcactgcaccactccagcctgggcgacagagcaagactcagtgtcaaaaaaaaaaaaaaaaaaagaaagaaagaaaaaaagttccaaccatctgataacaaaagatgcttctatcacccaggaaattccaagggatttccatgtcagttgttcctctcactcaggaagttataaaggtcttaggatctctgcgtgaggaactgggtggaagaccaaatattagaacagaagttctcctagcatccctattgtcaagagttttaggagctctgtctcagaaatggggtatagagaccaaatatatatttctttacaatatcacaagaatcatctacaagccaaagaaagaggctatagaagaaaccaaccctgctgacactttaatctcagccttccagcctccagaactgtgagcaaataaatttatgttgtttaagccaccatctgtagtacttcttgtttttttttttttttagagacaggttcttgctctgttgcctaggctggagtgcagtagcacaatcatagctcactgcagcctccaacatcttggtgcaagcgatcctcccacttcagcctcctgagtagctgtgactacaggcatgtgccaccatgcctggctaattttttttatttttgtagaaacaggatctgactatgttgtccaggctggtcccaactcctgagctcaagcaatccttctgcctcagtctcccaaagtgctgggattacaagtgtgagccaccatgcctggcctgtggttctttgttatggtggttctaggaagctagtatagttgccttatttttctcataaatttagtttttagataccaaagtttaaaaattaaacctaggcctggcacagtggctcacacttgtaatcccagcactttgggaggccgaaggaggcaaatcacttgagtccaggagtttgagaccagcctggtcaacatggcgaaaccccaactctactaaaaatacaaaaaatttgccaggcatggtggtgcacacctgtaatctcagctatttaggaggctgaggcatgagaatcacttgaacccaggaggttgaggctgcagtgagccgagattgcgccactgcactccagcctgggcaacagagcgagacttcgtctcaaacagaaaaacgaaaaaaaggcctgggcgcagtggctcacacctgtaatcccagcactttgggaggctgaggtgggcggatcaactgaggtcgggagtttgagaccagcctgaccaacatggagaaacctcatctctactaaaaatacaaaaattagctgggcatggtggcgcatgcctgtaatcccagctattctggaggctgaggcaggagaattgcttgaacccaggaggtggaggttgcagtgagctgagatggcaccattgcactccagcctgggcaacaagaacgaaactctgtctcaaaaaacaaaaacgtaccaattaaacctagccatattgttgctgctaataattttatgaccttaataaaatcttcccttccttcttttgtatttaaaaataattaactgttaagcaaatgcgggatttattttggggtgaaatatgtatacaagttaaattatttgctgctggccaggtgtggtggctcacacctgtaatctcagcgctttgggaggatgaggcgggaagatcacttgaggtcaggagtttgagaccagcctgaccaacatggtgaaaccctgtctctactaaaaatacaaaaattacccgagcgtggtggtgcatgcctgtaatcccagctacttgggaggctgaggcaggagaatcacttgaacccaggaggcagaggtttcagtgacccgagatcgtgccattgcactccagcctgggcaatgagagcaaaattccatctaaaaaaaaaaaaagtgctgcaaagcagttgtcccaatagcatttatttaagtggggcgggggcgggggggtgggggcggggggagattcttattggttcgtaatttatcaagttagaccttttatgaaattccccccatgacctttgaccttctgtttttaacctggtaccaaacagcttttatcatcgtctcgtggtgtttatgttttgaagtccaatagggtgagttgtctatgattgtttccttcttttcccaaaaatattctttggagttcttacctactgattttttttttccagatgaattttgctgtcacttaagtttgacaaaatgttccctttgaaatttcaaatttttgaaatgaagtatgagatctaaaaaaaaaaagaaacctgtgtattggctcagcattacccttattcctctcagccaagtgcaagggatcacttactcaaatctttattcatcccactagagtttaatgacttccttgaatggctgttcaatgttcagtgacaggtctggcttttgttgtgaggccatctatggagtctctgggacccttccagtccctggaatcagtttggtctgagaggtcaggacttggaaacatactggaggcagggcaagggcaccctgctcttgttttggcatctacctcttttccgctggtccttcttatccatccaactagtccttttccctgagccaggtccatactttcccaccccaaacccttcctcttgtttcctggctctctgtttctggctacattcatttcctacactcctgtatcaaaagtaccacaattgcttctcgttcccacagtgcagtgcggctgagcgcctcagagcccgcggggacgctgcggggggattgcggggagggggcgttgggaggtgccgatgttgggctgggcggatgagcgcatctgcgtggtgagccttccaacgtgcgcgagaaggacgtggaagaccttttctacaagtacggccggatccgcaagatcaagcttaagaatgggcactgccttgtgcccttcgccttggtgcgctttgaggacccccgagatgcagaggatgctatttatggaagaaatagttatgattatggccagtgtcggcttcgtgtggagttctccaggacttacgaagtcggggtgggtggccccgtggtgggaggaatgggccttctgcaagaagatctgatttccgagttcttgtttcaggacttcctcaggcagctggcaggacctgaaggatcacatgcgagaagttggggatgtctgttatgccgatgtgcagaaggacggtgtggggatggttgagtatctcagaaaagaagacatggaatatgccctgcataaattggatgacactaaattccactctcatgatagtgaaacttcctacatctgagtttatcctgagagaagcaccagctatggctactcacagtctcggtttgggtcaaggggccgtgactctccatactaaagccggggttccccacaccacttctctcctttcaggccctactgagacaggtgatgggaattttttctttattttttaggttaactgagctgctttgtgctcagaatctgcattccagattgaggatttagcgtcttaggaaattattttaattttttttttttaaagaagaaaaaaaaactacatactttctaccagggccatattagcagtgaaacattttaaactgcagaaattgtggttttggttcagaaacaagttgtatatttttcactcctgaatatgggtaaaaaatcagttccgtctttgtgggttgctctgctatggagatcaacagttactgtgactgagttggcccattctgcttaaaaatatgttttaaacgtttaagaaaaatgctcatcatcactggccatcagagaaatgcaaatcaaaaccacaatgaggtaccatctcacaccagttagaatggcaatcattaaaagtcaggaaacaacaggtgctggagaggatgtggagaaatagaaacatttttacactgttggtgggagtgtaaactagttcacccattgtggaagacagtgtggcgattcctcaaggatctagaactagaaataccatttgacccagtgatcccgttattgggtatatacccaaaggattgtaaatcattctactataaagacacatgcacacgtatgtttattgcagcactgttcacaatagcaaagacttggaaccaacccaaatgtccatcagtgatagactggattaagaacatgtggcatggctgggtgcggtggctcatgcctgtaatcccagcgtggctcatgcctgtaatcccagcactttgggaggccaagacgggtagatcacgaggtcaggagatcgagaccatcctggctaacacggtgaaaccccgtctctactaaaaatacaaacaattagctgggcgtggtggtggcgggtacctgtagtcccagctactcggtaggctgaggcaggagaatggcatgaacccaggaggtggagcttgcagtgagccgagattgcgccactgcactccagcctgggcgacagagcgagactccatctcacaaaaaaaaaaaaaaaaaaaaaaaaaaagaagaagaaaatgtggcacatatacaccatggaatactatgcaaccataaaaaaggatgagttcgtgtcctttgtagggacatggatgaagctggaaaccatcattctgagcaaactactgcaaggacagaaaaccaaacactgcaggttctcactcataggtgggaattgaacaatgagaacacttgaacacggggtggggaacatcacacactggggcctgttgtggcgttgggggaggagggagggatagcattaggaggaatacctaatgtaaatgacgaattaatgggtgcagcacaccaacatggcacatgtatacatatgtaacaaagctgcacgttgtgcacatgtaccctagaacttaaaagtataattaaaaaaaaaaagtttagtaattgaaaaaaaaaagtacaacaattgggttggttggaacagcagaaatgaattgtctcacagctctggaggccaaaagtctgaactcaaggtgtcggcaggaccatgctccctctgaaacccatagggaaatccttctttgccccttctagcttctggttgtttgctggcagtctctggcattccctggcttgtagacgcatctttccaatcgtctgccttcacatggtagtctccctgtgtctgtctctttaagtggctgtcttttgttttttgtgtttttttaatttcaatttaatctattttttgtagacacattgtttcaccatgttgccaggctggtctcgaactccagggctcaagtgatcctcccgtctcagcttcccaaagtgctgggattacaggcgtgagccgccacacccagcccacatggctgtcttcttatgggaaaccagacatgggattagagacccactctattagagtaggattgcatttaactaattacatctgcaacaactctatttccaaataaggttacattctgaggtactaggggttaagacttaaatatatcctttttaggaaggacacagttcaacccacaatattagctggccacatgtttcccctgatctgtactttacttgttccccctggctctggtccctcctcgggtcaggtcctgcctgagcctcccctggccatgtcccttctttgtgcctggaccctcctgattaataccccatccccacccttgtgccctcagctgacttcttgtacctcccaccaggcatgatgacctgaaggagatgctggacaccaacaaggattctctcaagctggaggccatgaagaggattgtggcggtaagaggggaaggaggaggcctccctccgggcggggcctgggtggccaagagcagctctccttagctccttgtagaccttccctctagttagtgctgtgcctctcgctttgtccctcttcccctaccttgaccccaccacccagatgattgcccgaggaaagaatgcttcagacctgtttcccgcggtggtgaagaacgtggcctgtaagaacatagaggtgagcactacctggtgagggattgcttgtccccacctcccccaggaccacactcaagcttggggtgaggaaggaaatgatttagcccctgggggcccgacctgctgagaaatgtctctgagccaggagaagacactgtctccatgtccctgaactggatgtggatcaaggtaaaggacccggatacactcaggggtgctctcccccactgggagagtttgtccccatggaccgcagctggctggggagatgacatcccaggggtaggggggtgggcacaggtgcctgctgagaagcgttctgctgagaaacgtgctctccccaaggtgaagaagcttgtctatgtgtacctggtacgctacgctgaggagcagcaagacctggccctgctgtccatctccaccttccaacgtggcctaaaggtcaggggtctcagtttgcctcccagggcctgggcctcgttggcgctgtatcggaggagtaggcctggggagaggccatgagcatgggagcgggctctgcagaccccttcctacctgcctaaaattgggagggtcacagtcagaagaggccagccagaccctcagagagtggaagctgggctcagaaggggcgtaagagatgaagtgggtacccagggcccctgtctctcttcccaggagcctgtggtaatggctgcttctagtatgaaccacttgagcccccggagagtggagagtctctagcaatggagaacccctcaaccctcacccccctttgtgtaaaggtgtgaattgtggtccacagccaggtagatttcaacctttagcagtggcctgaatcccccacaccattctcaccttttgtttcattttgcccaaggcctctagttggatttacatatgttaggtgcatgtataagtctcccccctaagggcttttctggttagtctaagacatcttgagggtaaagacagccatttcaaggccattctctccatattggatttttcagctctgattacaaccattaactcctctatttttgcatacctttatttatttatttatttatgagacaggttctcactgtgttgcccaggctggagtgcagtggtgcaatcatggctcactggagcctcgacttccctgagctcaggtgattctcccacctctgtctcctgagtagctgcgactactcagcctgcatcaccatgctcggctaatttttttgtagtttttgtagagatggggtttcaccctgttgcctatgctggtcttggactcctgggctcaagtggcctcagcttcccaaagtgctgggattacagggatgagctaatactcctagcctggatacttttagttcaaatttctgtgagagagattgtgaaaggtccagctcatcttttcatatccagaagttctgtaggttgctgggtagacaggattgctgctcaaatccagggcccaccccttgtccaatctgctatggccagcaagaggggttgacagtcggcttctttggggtgagagtagaaagcatggtcacttgaatatacaattcattcatttagtaaatacttgggtgtctctatgccacacattgtgctagatttctttttataagtcaaaaccatggaatccgtcttagattggcaagtaatcttttggtttgagtaagggttaagtataaaaactaatctgaaattgttgtacagattttcacctatagtctctaccaactgaccctgtcccccttttagaaaaccagagctcatttagttcaactcaatgtgataatttctttctgcaaagtgccaaatagtattttaggttttgtaggccttatagtctcaactatgcaactactcaattttgcccttatggtgcaaatgcagccattgacaagtgggcgtggccgtgttccaataaatctatataaaaaacaggcaatagacagattttatccaagggctgtagcatgccagcctttgctctagaacatgtctaacaggtcatcttttctgatagggacctcactccttcataaggcaacttgctccatctcaagacaactaccactatttggggtgttttttaaaccattctcttttgttgaaacctccacaactataatttttaaaaattgatttcaggctgggtgtggtggctcatgcctgtaatcccagcactttgggaggccgaagcaggcaaatcacaaggtcaggagttcaagaccagcctggccaacatggtgaaactccatctctactaaaaatacaaaaaattagcttggcatggtggcgggtgcccataatcccagctactcaggaggctgacgcaggagaatggcttgaacccgggaggcagaggttgcaatgagccgagaacgtgccactgcagtccagcccaggcgacagtgtgagatccatctcaaaaaaaaaaaaaattgatttcaggctgtactgcattatgactgcacctgtgaatagccactgtactccagcctgggcaacatagggagaccctgtatctaaaaaataaaataaaatttactacaggttcacaaaaggcataaagaataatataatgaatatccataagaaatgacacatttctcaaatagccaaagcctcctatatatcttctcttgtttatcattcataggtatgtatttattcctgtgctagtaatttgcatattgttaagcaatataaaatgttttgtaaatggtgtcatcgtactacatatgtattcctttaaaacttgttttcttttttgttgtcactggcttttggtctctcctgcatgttggaaccaatcatttcaatccagccttctcccttctttcaatcctagcccaggctagggccgtgttcactttcttaggagatccctcatggaatcaaacctctgactggcaagcagataatccaggtctccctacatcctgtctttgtacagttggtcccttgaaccccctatgaaaccctactctatttcattttatcagtttagcacagggtccaaaccagggtgattctgaatcttaattatgtccctcctgattttgtgtcttctttcaagatactgataagctatttggaccagggcaaaagactgaggcatagcatgtttccaggttgacactgatctgttaataaaccttctccaagtatatttcaccacgttgtagacccacctgactgtacagacagctggcatttttctatcttgttaggaaggatcttattcaatagcaataaataaataaataaataacacctttcatgtgcaaagggttgtgggtgacacagagataaaacagatgtgaattctgctcttaaaaatgcttggctattaggtgaaacaaaaggcctacctaaaaaatagcaatgcaggaaatgctatgagacttccacaaacatatcactgaaatcaagatactaatatccaccggcctagttaccccatcaaaaaggaaaacacattttttttgataactttctgtgaatctataatcatttcccaaataaaatgctcacacacaaaaaaggaaaacaggtttaagcagatgatgtgactatttgtctctaagaaaacagagactccttccttttcaataaatgtttctaacccatctgtttaaaagtcaattccagaattttgtcaggaattagcatcaattttacctgcaattgtgaggatcttgtcttgtctttttccatttcagaaagtcagggtaatatctacccttctttagtgttctattcccgtcattctctaagagtaatagtacaggcacacctcattgtattgcactttgcagatattgccagatattgcactttttacaaattgagggtttgtggcaaccctacatcaatcaagtctatcagtgccatttttccaacagtatgtgctcacattgtgcctctgtcacattctggtaattctcacaatattccaaactttttaatgattattatatgttatggtgatcagtgatctttgatgttactattgtaattgttttggggtgccacaaaccatgctcagacatgaaagtgaaattaatcaataaatgttgtgtgtgttctgactgttcccccatctccttcaccttgggcctcttcattccctgagacacaacaatattgaaattagatcaattaataaccctacaatggcctctaagtgttcaagtgaaaggaggaaccacacatctctcactttaaatcaaaagctagaaatggttaggcttagtgaggaaggtatgttaaaagctgtgataggctgaaagctaggccacttgctccaaacatttagccaagttgtgaatgcaaagtaaaagttcttgaaggaaattaaaagtgctactccaggctgggcgtggtggctcacacctgtaatcccagcactttgggaggccgaggcaggaggatcacttgagaccaggggttcaagaccgtctctataaaaaatttttttaagttagcctgatgtggtggtacgcacctgtagtcttagctacttgggaggctgaggtgggaggatcacttgaacccagaagtttgaggtgcttctccagtaaacacatgaatgataaagaaagcaagacaggattattgctgatataggaaaatttaagtggtctggatagacgatcaaaccagctaccacattcccttaagccaaagcctaattcataggcaggtcttaaatctctccaattctatgatggctgagagaggtgaggaagctacagaagaaaagacggaagctagtggaggttggttcatgaagtttaagtacagaagccatctccataacaaaaaaatgcaaggtgaagcaaaagtgctgatggagaagctgcagcaagttgtccagaagatctagctaagatcattgatagatgtgactatgttcaacaagagatgctcaatgtaaatgaaacagcctcttactggaagaagatgccatctagcactttcctacctagagagaagtcaatgcctggctttaaaaaacaggctggctcttgttaggggccaatgcagctagtgactttaagttgaggccagtgctcaatgaccattctgaaaatcctggggtccttaagaattatggcagatctcctctgcctgtgctctataaatggaacaacagtgccatgacagcacatctgtttgcagttatggtttactgaattttttaagcccactgttgatacctaccgcttaaagattcctttcataatattactgctcattgacaatgcatttgttcactcaagagctctgatggagaggtacaaggagattaatgatttcatgcctgctaacacaaaatcagttctgcagcctatggatcaatgagtaattttgacttttaagtcttattatttaagaaatacatctcgtaaggctagagctgccatagatagtgattcctctcatggatctggacaaagtaaattgaaaaccttctggaaaggtttatagaaaccttctggaaaggtttaccattatagatgccattaggaacattcatgattcatgggaggaggtcaaaatattaacattaacaggagtttggaagaagttgattctaaactccatggatgactttgaggggttcactacttcagtggaggaagtaactacatatgtggtggaattctacctagaagtagaagtagaattaaaagtggagcctgaagatgtgactgaattgctgcaatctcatgataaaacttgaatggatgaggacttgcttcttatgagtgaacaaagaaagtcctttcttaaaatggaatctgccgggtgcagtggctcacgcctgtaatcccagcattttgggtggccgaggtgggtggatcacgaggtcaggagatcgagaccatcctggctaacacagtgaaaccccgtctctactaaaaacagaaaaattagccaggcatggtggcgggcacctgtagtcccagctactcgggaggctgaggcaggagaatggcgtgaacctgggaggtggagcttgcagtgacccgagatctcgccactgcattccagcctgggcgacagagcgagactccgttacaaaaaaaaaaaaaaaaaaaaaaaaaaaaactcctggtgcagatgctgtgaacattgttgaaatgacaacaaaggatttagaatattacataaacttagttgataaagcagaggcagagtttaagaggactgacttcaattttttttttttttgtagagactggggtctccctatgttgcccaggctggtcttgaactcctaggctcaagcaatcctcctacctcagcctcccaaagtgttgggattacaggcacaagccatcacgcccagcctacattgtttttttaaagacataatgctattgcatgcttagtagactacagtatattgtaaacataactttttttttttttttggagataggatctcactctgttgctcagtctggagtgcagtggcatgaacatatgtagctcacttcagcctccaactccctgggctcaagtgattctcccacttcagcttcccaagcagctgtaactataagcataacttgtatgcaccaggaaacaaaaaatttatgtgactcgttttagtgcgatatttgctttattgttgaggtctagaatcaaacccacaatatctccgaggtatgcctgtaatatatagctgctgctgctgatagtgggaagacagtcctaagccccatgatcacaatacagtgtaaggaatgcttttatacgttctgtataggatgcagtaggaataaagaagaagggcttggggccgggcgtggtggctcacgtctgtaatcccagtactttgggaggccgaggtgggcggatcacttgcggccaggagttcgagaccagcctggccaacacggcgaaacctaatctctactaaaaatacaaaaaattagctgggtgtggtggtgcgcgcctgtagtcccagctacttgggaggctgaggcaggagaatcgcttgaacccaggaggtggaggttgcagtgagccgagattgcaccaccgcactccagcctggcgacagagcgagactccatctcaaaaaaaaaaaaaaaaaaaaaaaggaagggcctacacccctattttgttttaaacactgtggaagaacagcagcttttgcaatgatttctgggagaaaggagtgtaaggttgaactccggaagggagaccagcttgcatctgctgggcggtcacctcaggcattaaaacaggcacctccaaaaaaacccttacaaggaacaggaagtgtttcaggtgtttcagcaattttaggtgttctgaaagtttttcagtgtttctggaagtgaagctacccattgcaacacctgttcaggtgtcagatttctgcaaccagagccaaaattaagtgtcccccagatacccatcactggcacaccatccaggctccagtcaagcggcagggaagcaagagctagtggtcgctggggacagtgacttccaaaggtgtggcctccccccatcagggcacctggtgccctttcatagctctgcctccacctctgcctttaggatcccaaccagctgattcgtgccagtgccctccgtgtcctctctagcatccgtgtgcccatcatagtgcccatcatgatgctagctatcaaggaagccgcctcggacatgtcaccctatgtgcggaaaacagctgcccacgccatccctaaactctacaggtatgccccagccctgtcccacgctccccaggaggctggttcctaagttctcaacccacccctggcctttcctaagtcttgcctgctgcttctcagagggtttgaggagggtagtttgggggactgacagagatggaggagaacaataaggctggggtgcaggaggtgagcatggcttggacagatattgggaaggctggggctgagagtggcaaattcccctcaccgatttctccctcagtttggactctgaccagaaggatcagctgatagaagtcattgagaagcttctggctgacaagaccacggtgcgtgtataggggcgctccgggaggggtggtgaccggcagccggccttccacccttcgcgttcaccctctcgtctttgttctttccccagctggtggcgggcagtgtggtgatggcctttgaggaggtctgcccggagcgcatcgacctgattcacaaaaactaccggaaactctgtaacctgctgatcgacgtggaggagtggggccaggtggtcatcatcagcatgctcacccgctacgcccgcacgcagttcctgagccccacccagaacgtaagtgggcccagcccaggcagagcgggccgaagtgtgtcccggggaggcgcccacagacccgtcggtctccccgtccaggaatccctactagaggagaacgcggaaaaagccttctacggctcagaggaggacgaggccaagggcgcggggtctgaggagacggccgccgcggccgccccctcccgaaagccctatgtcatggaccccgaccaccggctgctgctgcgcaacaccaaacccctgctgcagagccgcagcgccgcggtggtgatggcggtggcgcagctctacttccacctggcgcccaaggcggaagtgggcgtcatcgccaaggcgctggtgcgcctgctgcgcagccacaggtgcgctccgcccccagccccgccccctccctcgcctcctgccccgccccacgggctgcccggctccgccccctcacgcccaccagccgcttccacctctgcccacccgctccacactgaccgtagtcctgccctccgcactggtcctctccccgcaacgacttgccccaccttttcccctcatccgctgacccttgccccaaccgaggggcccggggtgctctgacccgtcctctccgcagtgaggtgcagtacgttgtgctccagaacgtggccaccatgtccatcaagcgccgggtgagcctgcgacggcgggctgtcctcgctgtccgagggccgcttctgcgggcactggaggcgttgtcggggctgggaccggggccggggaaagggaagatggaggaataccctggctgtgcagaggatggggcaggggaggctccaaatacagatagggagcagggcctggatcctgaggggccgctgaggggatgtccagtggaaaaagagctagtcagatctgagatggacgagggaagacttgaggagtggagggcagtggtgaggaggcaaggatcctgggcgctgggtcaggataggaggggtgtctctgggcagcgaggcaggcctggggcttcggtggagctccctagctgcctctcttgtgccagggtatgtttgagccctacctgaagagcttctacatcaggtccaccgaccccacccagattaagatcctgaaggtgagtgagggacagaagtgcatgtgcttcccagccctccccaccccatgtacccactcaaataactcacagtggcccccctggtgcctgcctattcctggggctgagcccaggagcccatgactgccccagctggagctgtttgttcagggagctgggctaaggagggtcagggggagaagggaactgctctttgcctagtacctggtatacacctgctactcttcataaatgaagtaacctgatatcacctcataataatcccaggatgtgtacattatattccttttataaaaatatagactctggccaggcacagtggctcacgcctaatcccagcactttgggaggccgagacaggcagatcgcctgaggtcaggagttcaagaccagcctggccaacatagcaaaacctcgtctcaacgaaaaatacaaaaattagccaggcgtggtggcaggtgcctgtaatcccagctactcgagaggctgaggctagagaattgcctgaacctgggagacagaggttgcagtgagctgagattgtgccattgcactccagcctgggtgacaagagcgaaactccatctcaatctaagaaaaagaaaaaaagactctgggaggtaactgccccaggtcacataattctgctgactccaaggttcacacttttctctcccacccacagtgttatggcccccacacacctgccccctcaggctctcctgcaaacattcacggacaaggaaagtggcgggagcccatacctccatttgattcctgctctgctgcctcattattgagtgatttccttcagcaacagttaatcttcctaacccttgtgaacatccactatgttctaggggtacatgatgagcaaactaatcagggaccctgcctttgtggagcttacagatgtggggaggaggagacattaagcagttaatcacaaggcaaatgtaaaagtccacttacaaaatatggaagaaagtgtggagagctataagggcataaaatagggagacctcatctagtctggtgccagggaagttttcccggaggatatgagacttgagctgaagcctgagagatgaacatgaattatgcagggacagaaatgggaagaactgctccacgcagaggaaacagcatctgcgaagaccctgggttaggaagtggagtgggattggggcctggaagacaagggggacagtgatgggagatgggaggtagacagcaagcagatcattcagggacttacagaccatggtgaatacgatggtctccatcctgaaagcaataggaagctttaagttttcaatgcagtagggaggtgacatggtcatactgtaagcatactgtgtagggaatccacttaagaggcaaactggtcctcttgctttttagacaagtttcataacctgtcaattccctcatcagtgtgaggatgatgcagggctgtcatgaggattgttttctggtctatgaagtgtatttggaatgaaagcacagaaagtccactggccaacccacccattttctgcctctccaaccctccctgcagctggaagtgctgaccaacctggccaatgagaccaacattcctactgtcctacgggaattccaggtacaggccagctcccagccagaagggcctgggagaggggcccatcagatccttgtgccctggtgggtaaacctcctcttatgagcccaaggctggagaaactattatcttacattcccgttccaatgtgtttggctggctttgggccaaggaatcactggattgggggtggagttgtcaccccctttcccaagtcttagtcaccggcatgataagccataaaatgaaaggccacagccttcttgaaggtcaccctcaagcctgcagagtcactgagggatttctttgtcatatcccacagacctatattcgcagcatggacaaggactttgtggcagccacaatccaggccattggacgctgtgcaactaacatcggccgagtccgtgacacctgcctcaatggcctggtgcagctgctgtccaaccgtgatggtcagtgtttccctgagtgtctaaccgtgatgatcagagggtgtctgcctgcaggtctgactctgctggccactggatatccaccagtctgcctagacacaatgtgtatccattggtctgtctgtcttgatcagggcccaagtgttcctacacctctgagggctgctagagaactgaagggggttgagagaaagagccaagggcctggggcactgcaggtgtgtctgtccacctgagtgtggccatctgactgtcttggggtccacacactcatttttgttctgtagagcttgtggttgcagagtcagtggtcgtcattaagaaattgctacagatgcagccagcacaacatggagagatcatcaaacacttggcaaagcttacagacaacatccaggtgagggagaagccatattttcactccccacttcaaggtcctccccatgatttcaagactgtataattacatatgctagccttatcaaaagtaacttccaaaccttaggtcttcaggtggaaggagcagagacactggaccatgtgaccctgaccttgttacccctgatttgctttccctttggagaccctcaatgagcacgatggactttactactactcttgttttctctctaaagctctagccaaccatggttgagtgacaaatcttgtgtttttctatcgcactgctaagctgaaacatctaaacaaggcattcccaaagattctggagagtaacatggaaataaagtactgagggtacaatgaatccagaaaatcaatcttttacatcatgactgacttagggtcttgaaagctctatgctaatgaagccctagggaagaggggaaatgctgtctaggaaatgtctaccttttaacctctctctatctcaccacccccaactcccatttccagagaacccataatacaacaggccagcacagatgaggagtgctgtttccctggaagtccacaatcctacccacccactttcccgtatttacccatcttcactcctctcccacaaccacaggtgcccatggcccgagccagcatcctgtggctcatcggagagtactgtgagcatgtccccaggattgcacctgatgtcttaagaaaaatggccaagtcattcacagcagaggaggatattgtcaagctgcaggtcatcaacctggcagccaagctctacctgaccaactctaaacaggtaaagattaagagatgaccccccagatactctggtccccagaaactccctagacagtattcttttggccctccctaggcagggctgaactctagctcctattttggaaaagaagaatcagggaaggtggctggtctgcccacataaccaatgctaccccagtgcccacaaagaccttgtagtgctggtggtcactgttgaagagactctcctatgaagctgtgacctccagtctgctagtacaagagtcctgtctgccaccttggaactctggggctgtgaagaaccacagttgattgggataagggaagggcccaacagtggcaggtactgatgggagaacatgcatcccagatgtggtctgtgcttctttccaaagcttgacaatgcttggccagtctgtgccaaagataagggggtgagtctctgcttgggcttgggtggtgctggtggccactgtcattcccaaggtgaaaggttataagagatacacagccaaggatgaggctcaactaagttgtagtatcagggtgttcagagcctcctagctgtctggcatctcctgagatggttccaggagattctcctaaaatgaagcataatgtgctgagcttttcaaggtgtcagggacatcaaacaccatgacgatttccacactctcccactcagttaagcaggacagggattggcaaactactgcccataggctgaatttggcctattcctgtttttgtaataaagttttgttggaacacagccctgctcattcatttacaaattacctatggctgcttttgtgctacaacagcagggttaactagttgcaacagactgtattgcccacaaagcctagaatagttattctctggcccttttataaaaagactctgccaatccttgaagcaaaacctctggctaggtggctggggtctacagatttatagcagggatatcccctggagactgtagcatccctgccatgtccactgtgcgtgggagtctttggatggtggcacttatctttttcagtggcttctttgatccattgtggccagagtgagccccagaggctcaaggtgaggtaggcagggccaccaagtgctgtgactgtaatcaggagtcaaaggacagcagcaacatgtggaggcaactgagtctgtataattaaatatgctagccttatcaaaagtaacttccaaaccttaggtcttcaggtggaaggaggagagacactggaccatgtgaccctgagcttgttatcagtgttgtgggcaaagcagattggagagagagaagttagagggggagagagagaagttagagggagaaagagcaccatggggaagcgttcaatcgttgaaaaaatatttgtatacttcctttgttcaggtgggaggaaggagcaagtgggaggaatgtttgaaaagatgaagcagcctgggtggggagccacccaggtaggtgggagtcttgacatgctcagcaatgagccagagtcctaaaccccaggatggtgaggttggcatgttttcataagcctgggcctgtccacatgtcatttcccccaagttgtcactgtgagctacatgtgcatttgttcatttatttaacatatatgtaggtgggagtctgacatgctcagcactgagccagagtcctaaaccccaggatggtgaggttggcatgttttcataagcctgggcctgtccacatgtcatttcccccaagttgttactgtgagctacatgtgcatttgttcatttatttaacatgtaggcctactatttgcctggtactgtgctgcgtcctgaggatatgacaatgagtgagacacatttacaggtctccagatactcacagccaagtaggagaaacaggacaaaaataaacattttaaacacagcagtaacagctgtcatcagggttggcacagcgagctgtgggtatatacagctgaaccctcccctaggaatgacccctgtcagggaacccagagtaggctgttcaggcaaatggacactcacctccagggcgcccttcacctgcaagtgagtttttgcaggccccttagaatggttatttgattcaataaagatttttgtcctccctttctttctcctttcttcccagcctcttctgggagtggtaaagaagggggagtccttggggtactaggagggaggtggtttggatgcgcacatgaccatgcttgcaaaacagtagtgatgcttcccatcctgggaccatgagtggcaatctgcccagctaaaaggccacagtaatctcagtcattctctccaatttggacatgggcccacggcatgccagatcctggcccaggatgaggccaaggaaatgaccaagatgaggcctctgccctgctattgatcagcagataatcagatactagaccagaggccacaaaggcataacatgcaggtggcgggggatgggggggttggtaatcaaagtggctattacatccacctggatatagaccctggggaaactgcctagcaggttagtttgcttttatgtgtcaggtgagatgtgtggcaggagggtctgccaggggcacagtgggatctacaaccctcccatgtgaccgcctttacagtgaatagaagattctgacaaattttgcagaattgcttttaaaaacgtaaactttttttaatatgctaaaggtaatacatgcttatcatagaacatttggaaaactcagaaaattataagtttaaactattaataagtccaccatttagaagaccaccattaattatatatttccttattttttattcctatatatagtcattcagaagttgtacttttgtctattgtccaatattttaaacttttctgcttcttttcaatgctttcatatttaatacttttttttccccattcacatttcaattaaacttttcacttagaattttctccaggctgggttcagtggctcacacctgtaatcccagcactttgggagcccaaggtgggtgggtcatttgaggtcatgaattcaagaccagcctgaccaacatggcaaaaccctgtctctactaaaagtacaaaaaaattagctgggtgtggtggtgcgctgaaatctcagctacttgggaggctgtggcaggagaattgcttgaacccaggaggtggaggttacagtgagctgagatggtaccaccacactccagcctgggccacagagcaagatccatctcaaaaataaataaaaattaaaaagaatttcctccaaatttttttctactttcacatttttaaatcaattgtattagttttctgctacataataaattactataaatttggtggcttcaaacaacacacgtttattttctcagtgtctatgggtcgagaattcaggtatggcttagttggatcttatgcaaggctacaactgaggtgtcagccaaggctgagtttttatctggaggctgtactggggaaaggtccacttccaagtcacatggtgccacgatccacttccttgcagttgtaggattgtggccctggcttcttgctggctgtcagctgggggctgcccttgccttctagaggccgtccttagctcattgccataggggcctcccaacacggatgcttaatttctccaaagccacaagggagaaagtctctagagccagtctgctagcaagaccgtcttctttttattttttaatttttatgggtacatagtaggtgtatatatttatggggtatgtgagatattttgatacaggcatataatgcataacaatcacatcagggaatggggtatccatcctctcaagcatttatcttttgtgttacaaacaatcaaattacactctcttagttatttataaatgtataataaattattgttgactgtagtcaccctgttgtgctgtcaaatactagatcttacacattctatctaactataattttgtacccattaactatccccacttcccccacccactacccttctcagcctctggtaaccattattctactctccaactccatgagctcaattcttttaatttttagccctcacaaataagtgagaacatgtgaagtttgtttttctgtgcttggcttatttcacttaaaataatgacctctagttctatccatgttgttgcaaatgacaggatctcattcttttttattctttttttatagtactgcattgtgcatatgtaccgtattttctttatctatttgtctgttgatagacacttaagttgctttcaaatcttggctatggtgaacagtgctgcaataaacgtaggtgtgcagatataacttcaatatgttgatttccttacttttgggtatatacatagcattgggattgctggatcatatggtagcactatttttagtttttgtttgtttgtttgagatggagtcttgcactgtcacccaggctggagtgcaatggcatgatctcagctcactgcaacctccgcctcccaggttcaaacgattctcctgcctcagcctcctgagtagctgggattacaggcgcccgccaccaagtctggctaattttcatatttttagtagagatggggtttcaccatgttggccaggctggtcttgaactcctggccgcaagtgatctgcccgactcggcctcccaaagtgctgggattacaggcgtgagccactgcacctggcctatttgtagtgtttttttttgagatggtgtttcactcttttttcccaggctggagtgcaatggcgtgatcttgcctcactgcaacctctgcctcctgggtgcaagtgattcttcttctgcctcagcctcccaagtagctgagattacaggtgcctgccaccacgcctagctaattttttgtatttttagtagagacagggtttcaccatgttggccaggatggtcttgatctcttgacctcgcgatccacccacctcggcctcccaaagtgctgggattacaggtgtgagccaccgtgcccggcctatgtttagttttttaaggaacctccaaactgttctccagacatttccactaacagtgtacaagggttgccttttctccatgttcttgtcagcatttgttattgcctatcttttggatataagcctacttggggtgagatgatatatctttttttgttttgttttgttttttgagacggagtcttgctctgtcacccaggctggagtgtgcagtggtgcgatcttggctcactgcaacctctgcctctgtggttcaagtgattctcctgcctcagcctcctgagtagctgggactacaggcgtgcgtcaccacgccccgttaatttctgtacttttagtaaagatggggtttcgctgtgttggtcaggctggtctcaactcctgatctcaggtgatccgcctgcctcagcctcccaaagtactgggattacaggcatgagccacccgtgcctggcctttcattgtagttttgatttgcatttctctgatgctcaatgatgttgatcaccttttcatatacgtgtttgctatctgtatgtcttcttttgagaaatgtctattcagctcttttgcccatttttaaattggattattgaatttttttttcctattgagttatttgatctccttacgtattctggttattaatcccttgtcagatgggtagtttgcaaattttttcctcctattctgtggcttgtctctttgttgattcctttgctgtgcagaacctttgtaacttgatgtgatcccatttgtctacttttgctttggttgcccgtgcttgtggggtatcactcaagaaatctttgcccagtacaatgtcctggagaatttctctaatgttttcttttattagtttcatagtttgaagtgttagatttaagtttttaatccactatgatttgatttttgcatatggtgagagataggggtctggttttattgttctgcatgtggatatcccgttttcccagcgccatttattgaagagactctcctttccctaatgtatgttcttgatacctttgtcaaaaatgaattcacggccaggcgtggtggctcatgcctgtaatcccagcatcttgggaggccgaggctggtggatcacctgaagtcaggagttcaagagcagcctggccagcatggcgaaaccctgtctctactaaaaatacaaaaattagctgagcgtggtggcgggtgcctgtaatcccagctacttgggaggctgaggcaggagaattgcttgaacccgggaggcggaggttgcagtgagccaagatcgcgccactgcactccagcctaggggacaagagcgagacttcatcttcgtccccccccgccaaaaaaaaaaaagccactgatttttttttttttttttttttttggagacggagttttgctcttgttgcccaggctggagtgcaatgggtttttttttttttttttttttgagatggagttctcactctgttgcccaggctctggactgcagtgacgcgatctccactcaccacaacctctgcctcccgggttcaagcaattctcctgcctcagcctcccgagtagctgggattacaggcatgcaccaccatgcccagctaattttgtatttttagtagagacagggtttctccatgttggtcagactggtctcgaactcctgacctcaggtattctgcctgcctcggcctcccaaagtgcttgctaggattacaggtgtgagccactgtgcctggacaatgctactgattttttttttttttgaaacggagtcttgctctgtcaccaggctggagtgcagtggcgccatcttggctcactgcaaccttcacctcccgggttcaagcggttctcctgcctcagcctcctgagtagctcggactacaggtgtgcatcaccacatccagctaatttttgtatttttagtagagacaggatttcatcatgttggccacgatggtctcaatctcttgatctcacgatctgcctgcctcggcctcccaaagtgctgggattacaggcatcagccaccgcacctggccaatgctactgatttttatgtggattttgtatcctgcgactttactgaatttattagttctaatagttttttggtggaatccttaagattttttaaatataagatcatatcatctgcaaacaaggataatttgaattcttttccaatttggataccctttatttctttctcctgtctgattgctctagatagaacttccaatacagagtcttcttaataaaacataatcataggatcatatatagtcatataccacctttgccatatcctgttggttagaagcaagtctcaggttttgcccatacccaaggtgagggattgcacaaaggcatgaacaccaggaggcagctactggtggggaagaccttagaatctgtctgccacatccatctagagcttaaacttactcatgtgtaatgtgtgaattgaggatatatttcaattttttttaacagccagttttctaagcatgattagcaggcatctgcaaggtagcatgtatgttggcataggttatggaaaggaagtcagtgtttcctgcttaaaattcctctctgacaactggagcctgttggtgagggggagccttgttctgttcttggcacactggagtgtatctcagaggccttcttgaacagcctgtaattcctgcacatcctggctagatgaggtgggggtcttggtggtgcacacaggatgccacaatccacagggaatggccccttggggtggagaagggtaatgaattattataggcaaatcctgcagtgttgaggtggtgggccagccccttcctgtgttggttgttaacatgcagttaaggctgtggacagatggatccaaataccaaacagttctttctagaactaggcaaggacttgaaggagggagtctgtgatcagccagctgggaaatctgtggaggaagacattgtccaaaccaaaagagggatcagcagcctcttgataattgactatgttggtaagggcatccactagccctggccatttagatggtgtctggccaagagaggggcaggttggtgatgaaatctgttgtgatggcatcttattttcatatttttaagtctattctattagcggtgcatgggattgggattgcttatctgtgactataacagtatcgcaggtgctgctttgctggaagggactgagctgaagagggcctgtgggccagattggaggtaggaatgtggaatcatagtggctctctagagtggtgtggggcaattctgccaaagcagctgctcagactctgggtcagcatctgaggggctttgccccttatggacatctgcttgatgtccctgccagattagctgggttaaccatgtccaaggctacacgtaacagtatgtcaccataaacctcaggaagaacagagtcagttccaggctccctcctgccggcccctgatgcccttgggcattctgcttgttgaccacttggtggttttgatcttggtcacaagtgatggaaacatggagacctgggccagggcaggctccttatgtcagcaggtaggcagtgaagggaagcagatggggtgcagctccagcagatgcaggcctaggtgcagtactgatgggctccttggcctgggaaaagccccttaatgatcctgcttcttttctgtaaaatgggggcaataatgcctacttctcagaaggcttggggagattagatgagctagtgtggagcacctagcacagagttggtgccagaaggcacttgataagtgatggctgctaccgctgttgccatgttaaggcaggttagattaggccaagatcatggcagaaatggagatattttaggtctgcagttgtagcttccctgactgcagactgtgaaccctacatgaccttggcaaatgcatgggcagctgcagtttgccctgatgtcattagaagcttccagggaaggataaagacctctgagacccctgggctgctcagaatctactaaatgggtggatagggcatgagggtggcccctgccaaagggacccctgtttatctgccctgtctttttgttgtctaattccccctgggtggtggagcctggaaactgtgaggtccagcagagcattccatacttccacataccctgctgccctagagtaaagaggctggacaggcctggagtggtagggaccacaaatctagggaagaatggagtccagagccaggagtggggaaagtccaaaaggaaaacctcttttgttggcccaaggcagttgtcaaagttgggatcatcaggaggcatgtccagagagatgagagaaaattctgagcccagaacaagggcaggtggggagggacagctgggtggaagcgccggtcctaagcagggagaggagacgttctgcctgaaagtgtcggcttaaagaatctgtttctgagcctcctgtgtccccatccccccgtcagctgacccacctcttcctgttcctccagaccaagctgctgacccagtatgtgctgagtctggccaaatatgaccagaactatgatattcgcgaccgggcgcgcttcacccggcagctcatcgtcccttccgagcagggtggggccctcagccgccatgccaagaagctcttcctggcacccaaaccagctccagtcttggagtcatccttcaaaggtgggagctgaaatcaagggtaaccttcctaggggaatggaaaggaactggccagagtctctgccccagaccttcctgaggcccctagccaggcaccaggcttctgtggacagtcctgctccctggctcactccttttgtccctcctgtggcaccaggaattactctttcaccctcccataaccactgccagcatcatctcacctgagggtctgccttcctggccaggatggacttgtgcctcctctcctctcaggctcccttttccatctccctccctgagcagacactaggctttggaatacataccaagatcttaaataccaaggacccaggaaggcagaaagcaaaacaacacacaaaggagaggtgtatatttttataaaggtcctgagaaagcagttgcctgcattctgtgagcttagtcactacagtcagtccaaatcccaggccccagggcttcagccttgcctctgttcctgggcttggcccttaaggcctcttttcccaagacaacggccttgagatgggcctgggagggaagggtcctcccgctgcttctccgggccccaggagtggaagccaggaacctacacagaagagagcctccttcacaaagctcagttcttctgggtatcttttcgttctttttctcttccctggacctcacgaatggggagattctgagggtgggcacagctttgaaattctcccaggaagaaggcaacagtccctttctccccgacaccatcctcactcacaggcctgtgctgccctcctccagcagtgcctcaactctgatccagacttctacacactcatgctctgactgttcatccctccctgctgagtccagagcctgactagacgtgcatgctgagcagacaggtcggcagcatctgtgggcccagagtctcctcctgcccacctctgtaggctgcctttccctggccctcagtccctgctctggcctggccagacagccttttcttccagcatgtgggcctaaaggtgcagtcagggtggaagagccattagggcacacatccatctccttcccctacccacctgggaagtcccaaccagaatcaccacccagccccacctggaaaacagctcccagagctttccctcactgctgctacctgcctgacctctaaacctatccctagaccgggaccacttccagctgggctcactgtcccacctgcttaatgccaaggccacaggctaccaggagctcccagactggccggaggaagccccagacccatctgtgcgcaacgtggaggtcagcggggtggagggttgaagtgtgtgtgtgtgtgtgtgtgtgtgtgtgtgtgtgtgtgtgtgtgtgtgtgtgtgtgttggtgggggcagacagtagggagccctggcagtgccggcccagccctcctaacaccctcccccacacacacaggaagaagatctctcccttattgagactcacgtgggcctgttgggcgaatacactgaggtcccaccttcgtgtgacgtgtgctctctcccctgccctgtctgtgtccctcttcttcccctgtgtgttgtgctcctgggccttcccatactctgtttccaccttggtttggcagtgctcctctgtgagcagcattccctcccctccatggacagtgcccctttcttcctcctctgttattccctttgtgggacagaccaggtagggcctcacaaagaggtggaataaagggtaagggcttgtgcctgcctgccttctccccaaccatgatgaaatgaccctgcaccctacccccatctccaggtacctgaatggaccaagtgctcaaatcgggagaagagaaaggagaaggaaaaacccttctactcggactctgagggggagtcaggccccacggagtccgcagacagtggtgagcagatggcagagctggggtcctctgtgctctgcccatgcatctgtgtgactgactatatgaggggtatatgtatatggttgtgtgtctaggggtgtgcacctgcttgtgaattgtttgtgcacctgagggattcatgttccaggtgtgtgtgcttgtgcaggtttctatccatggagtccatctgtgtttctgtcagttccagctggcatgtagggctgggggcaggtcagagaggtttgagggttcagtactgaatgtgaaggtggaacccaggtgtctgctccagacccaaggaggcctgcatatgagggaggaggcctcatattgttcctccacagaccctgagtctgagagtgaatcggacagtaagagcagcagtgagagcggctctggggagtccagcagtgagtccgacaatgaagaccaggatgaggatgaggagaaagggagaggcagtgagaggtgagaagggagctagccagatggctggtggggttcagggggctttcctggaaagagggctagcattgagctttagccagtctcctaagagcccctgagcccctcgtgagctgggtggggctgtcagctcacatgacgcctactttcgctggctgcaggagatctctgaggcctcatgggctggtgtggagaagcaaccagagtcctagagcctgagctggcacaagctggcttcaagctctcacggggtccctgctataggacctcaggtgtgaaccctcctggctcaggctccccacaccactccagcttttcagcatttctcctgcttctgtgaagcaaggagggagtgtccaggccaggcctgagccaacctttcccactccttcagtgaacagagtgaggaggatggtaagaggaagacaaagaagaaggtgccagagagaaaaggagaagcgtcatcctctgatgagggcagcgattccagcagtagctcatcagagtccgagatgacatcggagtccgaggaggagcagttagaacctgcctcctggagcaggaaaacagtgagagccttggggcagagtcagggtgtgctcatgggccagggccctccccaacctctgggccaggcccagacatctatctccctaccatccagaacagaacatgacatcttctacccaacccagaacatgccaaggtgctccccttccccacacccacatcccatttttctctttcagcctcccagcagcaaaagtgctcctgcaaccaaggagatctccctgcttgatctagaggattgtgagtttgggtggtaaaagtcacaggggaaaggaggcctggggagcatgaattagaacagcccatagggactctggatcgggttcctcaggtcttgtgggagcaggggagcagacagaacatatcttcaggcctgagagggcagcagggctgacctccccaggtctggggttgaggtctaggaatgggtattttgcgagagcctccaggcagccatgtgccccgctgtccatggtgctgaaatgcgtgctccttgatccctaggctccctgctcaacccaagccacctccactttgcctcctcatagtcttatctactcccacagtcacccctcccagtgtccagcctgtgtctcccccagcaattgtgtctaccagtctggctgctgacctggagggcctgacactcacagactccaccctggtaccgtcggtgagtgggatggaggaggggaccgggctggggcagggacacatccctgtgctgcatcctatggtgtggatgtgtgtggggggtgggtgtgatggaggatgtgatagctttgagtcccagctgctggatggccctaggggacaatgctgggacaggctctctccatcttgctcagttctgtccttccctacccctccactctagcttctgagtccagtatcgggtgttgggcggcaggagctgctgcaccgggtagctggcgaggggctggctgtggactacaccttcagccgccaacctttctccggggatccccacatggtgtccgtgcacatccacttctccaacagctctgatacccccatcaagggcctgcatgtgggcactcccaaactgcctgctggcatcagcatccaagaatttcccgaaattggtgcgaagggctttggatggggtggaggaggaggctcctgggcagagtcagtctttctgtggttgctgataccctccttgtgccaggccaggggccaagctataggggcacagagatagcatctaacatgatcaacactctggtggacaagacagatgatgaaataagcaagttcacatcagggcgggaggtgcttgcagcagcagatttgggccttggttgtttcaggactaacttaaatgtggtgagggtgagtgggggaaagggtgcttagagttcaggaggaaaccgggaacagtctccagcagccaagaaagccaagattctgtagagggctggtcagctgtgacagtggagaggagagtagggctaggctgggttctagacctatcaggtgatggtggccctccctctccccttcactgccttataccacttcagagtccctggcacctggagaatctgccactgctgtaatgggcattaatttctgtgactcaacccaggcagccaacttccagctgtggtatgtgcccaactcgaggtgggggtgagaggatgggctggaaagggacagggtaacaatgaactggaaatggaggtggtgcttagtggggatacatcatgattgggtgggtctggaagccatctcaggccctcattcctgacctcactctttcactgcctccaagctgtgcctctacacagggtgggaagtgaggggagagatgacagccttaattcttctccgtttcctcccacccctcccagcacccagacccgacagttctacgtctccattcagccacctgttggggagctgatggcccctgtgttcatgagtgaaaatgagtttaagaaggaacagggtgagtgctccctgggagtgggcagagagggaagtatagaagctgactccagaatgtccagcttggatggtagggagaatggtggtgtccttcatctagaccaggggtcagcaaactttctgtaacgggccaaagataaatgttttaggctttgagaatcatgtggtctctgttgcagttacaacacgactgtggctgttgaaacatagaaacatccacagacagtatgtaaatgaacgagtatggctgtgttccaagaaatttccatttatatttatagatactgaagtttaaatttcatgtaattttcatgtgtcatgaaatattaatcttttgattgctcccccaacacttaaaaaatattaaaaacattgtgggccatataggtggtgggctggatttggtctggaggctgtaatttgcaaaacctctggcctagaagaaagaagagtggcttgggcaagggaggagggaagatcatggttagttttggataagctgattttgaaatgcatttgggaaattcaggaggagctatttagtatgcaactgaaaatatgggtctatgcccaggaaacactttgaagctggagtcatgaacatagaggtggtaatggaagctgtgaatatgaatgagatcactctgggaggtgggagaaaataggaaggccaaggacagaaccttgggggaaaacctgaattctgcagaagaaagaggaggggagggataagagaaggagcacagggagaggtgggaggagaaccaggagagacaacaaggcagaaggtgtctgcaaaccacagttacctaagaccttcagagtcagcatataaaaggctactgccaacctgagggagagagggtcattgctaaaggagggacagaggccaactgcagtgggttgagggagaccacggctcaagtacatgcagtcctctttggaggactttagccatgaatgaggagggagacagggcattggcacgatgaaggatctcacttctggaaaggattttttggagacggggacacttgaacatgaacagattgaaggaacaaaaacaagaaaatgttattagtcatgaatgaaggggatagaagaaacaggagagggatgtcagtttctaaaaggaggtgaagaataggggaagcagtggagggaggaaagaggctgaagagaagactgctggtgtgcaggagagcagacggaggagctcccatggggggcctggatcatgtgagtggagagaagtcagccttgcagaatgaggagttctgggggtgctgtgaaggtttggaggcttcaggagccctggctaggtctggagctgctactgcagaggtacaattaaaaatgtacctgtgaatgctgcatgtgactactggattctggctgagagatcacagcagccacctgtgatctttttgtgagggcttagcttccaggagctgagtgggagttgaatgtgggttggagggccccccaggaaagatcaaagggtgtgaggttcaggatgggcgaacctcttaagaactgactggccactctcaaggggctggtagcccagatgtctgatggaggaagcgccaaatcagtctttggtaacaacatggataaaggcctgggtgggaggggtagagaggctgacaaaggcttcctgagggagggcccagtctgagagggaagtaccttctccccaagactgatgatttaaattctgacctgccctttgcatgataccttcccagcctgggagaacttgttgctcagtaagcagacccaggtgctggcctctgtacccaccatggcctctgccctcatcacgacctctacccccaggaaagctgatgggcatgaatgagatcacagagaaactcatgctgccagacacctgtcggagtgaccacattgtggtgcagaaagtgactgccactgccaacctgggtcgtgttccttgtgggacatctgatgagtacaggtactaggccaccagtagaggggaaatgatgagcatgggggccctggtttgaaggaggagccccagctgctgatccccttccaaacacagtcacccttagcagctcttcctcaccccttctattcccacctcaggtttgcagggaggacactgactggtggaagcctcgttctgctgaccctggatgcccggccagctggagctgcccagctgactgtcaacagcgagaaaatggtgattggcaccatgctggtaaaggatgtgatacaggctctgacccagtgacttccaaatgctgtgacctgtttggctcccatctatacctccccatgacacctaggctgtcagtctctctcatctttctctctctctctcatcatcctcctcatgccagatagcattcagggtgtcctctctccctctggaggaccaagccctcccctaatgccctccccatggattccttagtgatctgtgcagagagagatggcagccactcccttcagtcctcccagatttctgtagctatttatgtagcaggctcaataaaatg

SEQ ID NO: 15422 - DNA, 50625 bp, Homo sapiens
ggtgcctttaagacctcagcgcgcggccctgattgagaaatccgcgcgcagcctccgccgctgcacactgcagcctctgctgaacccctgccgcgccgccgccttcgccagcccggaccggaccggcccgccttcccttcctccgctccagccggcctccggccccgcaacctcctcctcggcgaagtctccctggccgccccatgtcggccgcccccgcctacagcgaagacaagggcggctccgctggccccggggagcccgagtacggccacgaccccgcgagcggcggcatcttctcctccgactacaagcggtgagggagcccgccaggaagctcgcgggagggttggggccggggaccgggcgaggcgcgcgggcaccatggacagcgcccggccccagcgccggccccgccccggccgcgccgaccggaagcccgcccggccccctcctgcggcctggagccccggcccagcgcgggcagcgctggcaccccggctccaggggccggcctaggacgcggaggggggcagataggggctggcgggggatgggccagctcagtttcgagaggagaaaccctccggttccaggtgtttctccggtttgcggcgttgcgttaggggttcccttcctttttcgtgctaggcgggttggcttcccaaaaatgtgggggaggggtctgagtcagcgaacttgagcttgagcctggggcctcttcaggaaggcgggccctggatgtacttgcacagcctcccagcttggccctgctgcaaattcatttcccctccctctggtccccatctccatctgaccctcacatccctgctcctggcattgcccctgtagttcagctccaccttcacaccctcccccacctttgattcgttcgtttgtttcttcatttgtttattcgtaaattctgcaacaagcatttatgaaaagccaactgtgtcgagtcctgaactagtcacggaatacaactgtgaacatgagacccttcttgtcctcacgatgctctagaggggagcacagatgaagaagcagtcagggacagtcgagtgtaatgggggcagtgggagcagggagaggacctagtctctggcgccggagagaaggaagacaggagcgtgaggtatgttccaggcagaggaaagggctttcaggaaggttgagagccaggccacaatctgtgtgagccactggactgaccagaaaagagggtggggaggactcctgaaggattctaagcaggcgacataatcagatttatattttagaaggacgtcaggctgctgcattgtggagaagagattggaggtgggccagattgaacaagagacaagggaggtgggtcttgaagttcacaggcctggcatgattgtggcctagaccaggggagaggcagaagatttgaggctgtggaagaggtggaagcctcagacctgatgattaattggatattgggtgggggtttagagggacagggggagaagatgaggattttcacgcacgtccatgtgaagagaccaccaaacaggctttgaacaataaagctttttaatcacttgggtgcaggccagctgagtccgaaaaaagagtcagcgaagggaaatggggtgggaccgttttacaggatttgggtaggtagtggaaaattacagtcaaagggggttgttctctggcggtggggggacacaaggtgctcagtgggggagcttttgagccaggatgagccaggagaaggaatttcacaagataatgtcatcagttaaggcaggcacaggccattttcactcttcagttacttcaggccatctggatgtatacgtgcaggtcacaggggatatcatggcttagcttgggctcagaggcctgacattcctgtcttcttttattaataagaaaaataacataaaatagtgttgaagtgttggggcagcaaacattttggcggggggtggtatggagagatactgcttctccatagccttgaagggctgcttcgagcgggattggggtggcgtgggaacctagagtgggagagattaagctgaaggcagattctgtggtaagggatgatattgtggggttgttagaagaaacatttgttgtataggattattggtgatggcctggatacggttttgtatgaattgaaaaactaaatggaataagagaaggagaaaaacaggtattaaaggactaagaattgggaggacccaggacatccaattagagagtgcccaaggaggttcagcatagccctgccagcaaagattatttatttactttaagagggagttaagactggcagtttggggatagcaccaggagatatcagctgtaatggtttggagaaacagtgtaaaccggcagtgtaaacaagagcagggcatgtatgagtagttgagtatggtgaataggagtatgactagtcagaagatagtagggatgacaagttttctggggcacagtccaagttggtctggtgtctggaatgagactggggcctaataaaaaggagcatctatacaggagcttgaatgggctgtaccctgcagcattccgaggacaggcccaaattctgagaagggcaagtggtaaaagtattgtcagtcctttttaagttggtggctgagcttggtgaggtgtgtttttaaaagaccattagtccgttctaccttttctgaagattgaggatggtaaggggtatgaaggtttcactgaataccaggagcctgagaaactgcttgggtgatttgaccagtaaaggctggtctgttattggactatatagaggcgggaaggccaaactgaggaattatgtctgacagaagggaagaaatgaccgcagtggccttctcagaccctgtgggaaaggcctctacccatccagtgaaagtatctacccagaccaagacgtattttagtttcctgactcggggcatgtgagtaaagtcaatttgccagtcctgggcagaggcaaatccccaggcttgatgtgtagggaagggagggggcctgaacaatccctgaggagtagtagaatagcagatggaacactgagaagtgatttccttgaggatagatttccacaatggaaaggaaatgagaggttctaagaggcaggctagcggcttgtaacctacatggaagaggttatgaaatgacgaaagaatagaatgggcctgtgaggctagaaggagatattttccttggtctgagaaccatttgccttgtgtgggaagagattcataggtgtaagtttcattgggggagtaggtaggagtgactgatgagaaggagaaaaactggccatgagggacagaagttggaatgctagctgcttttttagctaccttatcagcataagtgttgccctgagcgatgggatctgatgccttttgatggcccttgcagtgaatgactccagcttcctttggaagtaaagcggccttgagaagagtttttattaaagaggaattaatgatggaggacccttgtgtaatgaggaaagctttttgcccatataacagcatggaggtacaggatatggaaggcatatttagagtcagtataaatattgacacatagtccttttgcaagactgagggctcgagttaaggcaatgagttaagctttctgagaggtagtggaggggggcagaaagtatatgcgtcaggtgtgaggaagaaaatagattttggaagttatgagaactgtagagagtgagttgagcatagtttgtgattttgagggcctctgaaagtattaaagcagcggcagccgctgcacgcagacatgagggctaggccaaaacagtaaggtcaagttgttcggacagaaaggctacagggcgtggtcccagctcttgtgtaagaattccaaccgcacagccctgcactttggctgtgtgtgatgaaaaagggttgggatgaattagggagacctagtgtgagagcagcttctacggctgtttttaaggaatggaaaggagtggcaaaaggatttaggatctgtggggtcagctaggtttgcttttgtgagtttatataatggtttagtcaggatggtaaaactaggtatccaaaggtggaagtacctaaccatcccttgaaaggaaaggagttgttgctttgtagaagggattggggttcgggagattagccggacatgatcagcagggagagcacgtgtgttttcatgagaactatgccaagataggtaatggatgaggaagaaatttgggcttgactgaagtaatgggggctgtccgtgaagccttgcggcagtacagcctaggtagtttgctgagcctgatgggtgtcagggacagtccaagtgaaagcgaagagaggctgagatgaagggtgcaaatgaatagtaaagaaagcatgtttgaaatccagaagagaatgatgggttgtggaggggttgtggagggaggtattgaggaggagagtatatgagtttggcaccacggggtggataggcaaaacaatttggctgacaaggcacagatcctgaactaattgtaagacttgtctggtttttgaacaggtaaaatgggggaattgtaaggagagtttataggctttaaaaggccatgctgtaacaggcgagtgataacaggctttaatccttttaaagcctgctgggggatgggatattgacattgagcacggtaagggtgattaggttttaatgggatggtaaggggtgcatgatcagtcgccaaggagggaatagaggtgtcctatacttgaggattaaggtggggagatacaaggggaggatgtgaaggaggctttgaactgggggaaaaggtggcaatgaggtgtggctgtagcctaggaatagtcagggaagcagataatttaaagtgtctcggcctaataagggaactgcgcaggtggggataactgaaaaggagtgcataaaagagtattgtccaagttggcctcagagttggggagttttgagaggtttagaagcctggccatcaatacccacaacagttatggaggcaaaggaaacaggcctttgaaaagaaggtaatgtggagttggtagcctccgtattgattaagaaggggacggacttaccctccactgtaagagttacccaaagcatctgtgatggtccaggaagcttccaaggcgattgggcagtgtcagtcttcagctgctaagccgagaagatttgggaaggagtcagtcaggcagccttgggccagagttccaggggctctgggagtggctgccaggtgagttggacagtccgatttccagtggggttccacacagatgggacaaggcttaggaagaatcctgggctgtgggcattccttggcccagtggccagatttctggcacttgaagcaagatcctgatggagaaggtcctgtaggaatgcttgactgctgcagcttaggcattttgaagttcttgtgtactggagatgtggctggggtttctctcacagtggaggcaaggaactacaactcagaaatacattgctacttggctgcctttactctattattgtacaccttgaaggcgaggttaattaagtcctgttatggggtttgagggccggaatttaatttttggagttttatttaatgttgggagtggattgggtaataaaatgtatattgagaataagactgccttttgaccttttagggtctagggctgtaaagcgtctcagggttgctgcccaacgagccatgaactgggctgggtttttatatttgatgaaaaagagcctaaatactaactgatttggcagaggtcggataaaggaaaaggagcgttaaccttgactatgcctttagctccagccacctctttaagaggaaattgttgggcaggttggggagggctagtcgcagaacaaaactgtaagccggactgggtgtggggagaggaggtgatagaaggattatagggtggaggagcagaagctgagaaagaattggagtctgattcagcctggtggggagtgacctgaggagcattctggggattaggtgagaggtcagatgggtcggtagaaaaggaagattggaagattgaaaagacgcagcgacgcttggggttgggactgaggggacaggcgggagggaaagaaggaggatttgggatgagtcgcattgggaacagagactagggagggaccgatgtgtaaaagaatgcctggacatcaggcacctcagactgtttgcccattttacaacaagaattatctagatcttgtaggatggaaaaatcgaaagtgccgttttctggctatttggaaccattgttgagtttgtattggggttaagcggcattgcaaagaaaataaggcatttaggttttaggtcaggtgtgagttgaagaggttttaagttcttgagaacacaggctaagagagaagaaggaggaatggagggtggaatgttgcccacagtgaaggaggcaagcccagagaaaagagagggtagagacacggagagaaggggtggggggtgctttgccccccaggaaagtggagagaaaagagagggtagagacacagagagaaggagtcgggggtgcttgtcccccaggaacgtggagagaaaagagagggtagaaacatggagagaaggggtggggggtacttgccccccaaaaagtggtgtttgccactaagggtgaaagatcaaggcaggcatcctcgcggtgatcagacaactctgaaacgtgggtgaataatcaagcaggcgtccccgcagtgattaaacaccaagggaagactgtcttcctgagtccgtgatcggcgccggagttttgggttcacagataaaatgcatttcctgtctctaccagaaaaggaaaggaaccgaaattaagagaagggagagattgaaagatggcaccaagattgaaaggagaaagaggttgagggatagtgagagaggttggagaagagagtaaaaagaggccgcttacctgatttaaaattggtgagatgttcctcaggctggttggtctgaggacccgaggtcattaggtggatctttatcatgaagcaaagagcaggaggacaggggattgatcttccaagggtggtcccccgatccgagtcatggcaccaaatttcacgcacgtccatgtgaagagaccacccaacaggctttgtgtgagcaataaagctttttaatcacctggttgcaggccggctgagtctgaaaaaagagtcaacgaaaggagataggggtggggccattttataggatttgggtaggtagtggacaattacagtcaaaggggggtgttccttggtgggcaggggcgggggacacaaggtgctcagtgggggagcttttgagccaggatgagccaggagaaggaatttcacaaggtaatgtcatcagttaaggcaggaacaggccattttcacttcttttgtgattcttcaattacttcaggccatctggatatatacgtgcaggtcacaggggatatgatggtttagcttgggctcagaggcctgacaaggatgttactcaggttactagttcctgcaactggatggatgatggtgttattcagtgtaattggaaataaagatgttacaagcaaatttgtggaaaattaatgttgagcccagctttggacatattgagattgtaaactctgagggacatattaccctattaggtagctggatattacgatttgggttccaggagagagattagggaattattaacatatgtatgttaattaaagccacagaagtgaagataactcagggaggaggtataaaatgagttcagacactgcacaagtctgaaccctgaagacaccaacattagaagtgaccagagaacagtggaaagtgtttcaaggtacccaagaggtgaactaaaggctgaaagaaaacaatgtaatttcaagaaggagggagtggtcagtagtttcaatgcccattaaggtcaaatcaaacaaggaaaaaaatcatgaccattggttgacaaagaagagctcaattcctttctactctattccccacctcctgccctgggagataaattctggcaaagtaaggagaacaggagctagattatttctttcccagcattctgttgtggatgatttaaaacatacagaaaaatgaaatgaataatacaatgaacacatgtatatcatccatctagattcaactgtcattgacatcgtaccttatttgctttatctaaccatctattcgtatactttttttggttgaaccatgttaagttgcagagatcatgacccttcaaccccacattctaagtcgacatctaaagccagattaaaatgaataaaggagcacacaggtggtaagtagataaaacagtgaatggaaattttgctttcaagaaatttgactgtaaaagagaaagctgctggaggagaacctcactcagttcaaggaagtttgtctattttgttattttgggtttttttttttgtttcttaaaatgtatgactccatatttttgtttattattaatattaggcgggagagcctagagcaagtttaactgctgatgggaaggagcgattggtgggagagaggctgaagggaagaaaggaagtacagaacactgagtgatgggaggggaggcttactgagctgggtgggaggactagcctgggagcagggaggaccaactctgcccagagggaagagggcaggaggagaggagagtataaatgcagatggagactgggtacagtggctcatgcctgtaatcccagcactttgggaggctgaggcgggcaggtcacttgaaatcaagagttcaagactaacctggccaacatgtcaaaaccccgtctctactaaaaatacaaaaattagccagttgtggtaacgcatgtctataatcccagctactcaggaggctgaggcaggagaatcacatgaacccgggaggtggagattacagtgagccgagatggcaccactgcactccagcctgggcaacggagtgagactccatctctaaataaataaataagtaaataaatgcagatggatgggagtctggggcagggggctgcaggggatttcatctaaagactttccctttttcgggaaccaggtggtgaagccataagggcaaggctgggaatggggacttgagggtcaaaggggtttcaaatacaatgaagaaagccaaccaggccaggcgcggtggctcacgcctgtaatcctagcactttgggaggctgaggcaggcatatcacctaaggttgggagtttgagaccagcctgaccaacatggagaaaccccgtctctactaaaaatacaaaaattagccaggtgtggtggtgtatgcctgtaatcccagctacttgggaggctgaggcaggagaattgcttgaacccaggagacggaggttgcagtgagccgagatcacgccattacactccagcctgggcaataagagtgaaactccatctgaaaaaaaaaaaaaaaaaagccacccaccactggcaggccagtggcattggagaccagtgggacaagagggccaaggatgtgagagcagttggagggatagacacaggggttgcgggggagggtgctaggaggaagtagagataagagaaggttgatgggaaggaataaatcaagtattggctctggaaaggcaggtgaggattaagatgcctagggtcagtgagaagagggtatatgagatttctcaggaggctgcagtctaattgtggcagtgggattggagctgaagagggcatctctcacctctctatcaactccactgaccatctagtcccttgcccagagactaggggtaggcttggtctcctgtccctgcccttctttccctctagaggccttgtctctgagcagtgaagaggaaaccggagcatccctccctgccagtgtccggttaccaagttttgggggcgggccatctggtgactgtgacaggagccccagcgccctggccagctcagtccattcctggagaagaacctgatgcagcgattcctgcagctcccgggggccgtggtgaggcctggggtcagaggggcctgcggagctgatcaagaggctgctagccctgtgctggctcccgaaggtgggcccccactccggtaccaggccttggagcctgaggagcttcggtggctgcaggcccaggaggaagacacgaccccagaagcatctctggaaggaccttgcccagaggccagccagagccagagccagccactacggtatagaggaacccacaggaaccccctacccacacagccaggaaggccagggatgggcagttgcactctcagcccagacctcttccggtcccacctcctctgatggaggcttaggctggcatttagggtccaggctgggcggagaaggtggtcaggggcaccgtatgggggctgagggtatgagtgaggagagatgaggggcttaactccctggaggctctgaggggaggaggatagtaaaatatttgagggttgaggtcccaccttgacctctttctccccacaggcccccactggagtgggctctggacgaggtttggggacaggatacagcacagacagggtttggccagccactgcctgccagtggactggaacttaggtggtaagaggtgacagcgaggtgtatatcaagggaggtgagcatgactgacccccagtgccatgccaggccccctggctggctccagccacccccagaagagtcccttaggctaggtcagactaggggtcaggtcagagtgagtgcagcagcgtaaggggatctgactatgggagataatgtttcatggccttagggtgttgtgccttagtccctgcctctgcctcttgggaacagaagttggtgggagtgaggacgagaggcccagggcggtctcacctcaggtggtggctgcggtctgtgtcagtgcatattctgtgtcagtgcatattcgacagtcaatcttacctgtgctggctgctttaggcccagtggtcctgccccctttcattccccttctcctgcaggggcctggaatgtactcactaggctgggtggggaggatgccctggggtgtgtgcatttgacaggcgcatgtggcatttgtgggtgtggtgaggaagggaatacccagagttaaaggagattgggcaaacttggccctccttccacggaagcccagggaaaagccatcccagggtgactcctcagaagatcagaggacccttggggctggatatatttgatcttagaagcctacatttatcatcaaaaatctcaactaggagtccactgaccattttggtgaatgagactggagaggccaagtttggtccaagttatctgtgtattagatgtgatgcggcatgtgtgtgtgtgtgtagggggacgtgtgtggggtgtgtgtgtctctatgagggtgtgggggagcggggagaggtcttgtgatatatgtctgtaggggacatgtatgggatatgtgtgtctataagagggtgtgggagagtggggagaggtctcctggtggtatatgtctggggggtttgtaggtgtgtaggtgagttgtgtgggtggtttatgtgtgtagagtttttctgtgggaggtgtctgtatgtgggggagtgtgtttctctgggcgttgtgtaggcaggattttgtgggtgtgcgtgggtttatgtatggattctactagtgtctgcgggacctgtaggtatgtttgtatgagctgtccgtgaggtgtaggtatgtcgggggacatgggagtgtctgaggtatatgtgggtggtatcaatgtgtagttgtctgtggggtgtgcgtatgaaggatcctgacgtggagtgttgtgcattcatatctcagggaagctggtgcccagctctgtcatttttcctaggccctcggtgctgcccacgcctacccagctcaatggtctgtacctatgaccatgcccctggtgtcctgagctcagcctcctacccactaagaaactcaacagtctggtctgtgtttggcagggtaagagggtgattgtcttctggccctggcctgaccctggaagagtagaaggtgtcctctgatttggggggcatccccccaggtgagggagtttcagataacatgatggggctggatattttcttctgtcctcacatgacagatagcgagggcctcagataatgctggaaggcatcatctttctattttgctttccatcaaaaatctctttgggaaagacagtttctaacattcttgggatagtgacttcttagtgcccctcttcttgtctgacgtcaggtactcacgcatttctgcagccctgtgactaagttgcgtgttctgtctggttcttctcttcctctcagcattcatcacttgtttctcagcattagcagcagtcatttgccactttatgattgttatcatgctctttcctctcctaacagtgctatccccaatttctgattttctgtcatttctaaatgttgcatgtctgtgactaactttgcacacattgattttttttttattttttatttttgagatggagtctcgttctgttgcccaggctggagtgcagtggcgcgatcttggctcactgcaagctccacctcctgggttcacgccattctcctgcctcagcctactgagtagctaggactacagacgcccgccaccacacccggctaattttttttaaattttttagtagagacggggtttcaccatgttagccaggatggtctcgatctcctggccttgtgatccgcctgccttggcctcccaaagtgctgggattacaggcgtgagccaccgtgcccggcctgatttttaatttttatcactgtgatatttctcaagctgggttcttgtgcctgggtcaaagctgtgggttatcagagtgtcatctgggaaattagtgtgtgtgagtccccacacacagctgctcaccacattttggaattgtcttggcaacatatgagtgcatcagtttcacacaattctatcagctatatatagacacatttttttcatgggtttattaacaattctctgatcacttcgtgatcaccagttctgcatcctctgagtatggttagccacattgttcactgcacaagggcatctggccaaggaataccagcccatgctccacacacagaatggggagcaacagctcagggctgtgtctatctgtaggggcatgcagattgaaaatgggcttgtagcagccctgacagtgaatgctgcaaagagaccttatacatgtatatcagttccttttttaaatttttttgagatggagtctcactctgtcacccaggctggagtgcagtggcgcgatctcggctcactgcaatctccgcctcctgggttcaagcgattctcgttcctcagcctcctgagtagctgggattacaggtgtgtgccaccatgcccggctaatttttgtaattttagtagggatggggtttcaccatgttggccaggctaatctcgaactcctgaccttaagtgatctgcccaccttggcctccaaaagtgctggaattacaagcgtgagccaccacacctggcctctatttcgaatattaaactttaatttaccatatcccaaatatttttccttttgttgctattatgggctgaattgtgtccctccaaaatgcatatgttgaagttctagcccccagtacctcagaatgttacctttgaggtgattaagttaaaatgaggttattaaggggggccctaatccaatatgactgatttctttataagaagaggaaatttggatataggcacgcagaaggaagaccatgtgaagacagagaagatggttgtaagagacagaaaaacccaaagtgtgtttctcctactctcatacacaccgctcaccagagagtgcttcacctctggccacaaaaatgggtggagatttctccccaccaacaacctgttctccagcagacactaactgggtgttctctaattcaagtcaatctagtgttagattttttaggttaagggctcagtgccacaagactgctctctgcttcagatgccaattccaagtggtaagttgtcagctatacttctgaccaactggctataaatcaggggttcccatgccaccctccttgggttcaactctgtgagtggctcacagaactcagggaaactttagttatatttacccatttattataaagggtagagacaaacaccagatgaagagatgcatagggagaggtatggaaggaggggtgcagagctcccatgccctctccaggcaccacaccctccaggcaccttcacatgttccacagtctggaagctctcgaaaccctatcctcttgggtttttatgaaggcttcatgattgatcgcatctttggccatgtgatcaactcaaccatcagccccactccccattccccagaggtcaaatagtgggattgaaagtttcaaccctcagctgggcacagcagctcacgcctataatcccagcacttttggaggccaaggcgggtggatcacttgaggtcaggagttcgagaccagcctgaccaacatgatgaaacccatctctattaaaaatacaaaaatttgccaggtgtggtggtgggcaactgtagtcccagctatttggaaggctgaggcaggagaattgcttcaacccagaaggtggaggctgcagtgagccgagattgcctcactgcaccactccagcctgggcgacagagcaagactcagtgtcaaaaaaaaaaaaaaaaaaagaaagaaagaaaaaaagttccaaccatctgataacaaaagatgcttctatcacccaggaaattccaagggatttccatgtcagttgttcctctcactcaggaagttataaaggtcttaggatctctgcgtgaggaactgggtggaagaccaaatattagaacagaagttctcctagcatccctattgtcaagagttttaggagctctgtctcagaaatggggtatagagaccaaatatatatttctttacaatatcacaagaatcatctacaagccaaagaaagaggctatagaagaaaccaaccctgctgacactttaatctcagccttccagcctccagaactgtgagcaaataaatttatgttgtttaagccaccatctgtagtacttcttgtttttttttttttttagagacaggttcttgctctgttgcctaggctggagtgcagtagcacaatcatagctcactgcagcctccaacatcttggtgcaagcgatcctcccacttcagcctcctgagtagctgtgactacaggcatgtgccaccatgcctggctaattttttttatttttgtagaaacaggatctgactatgttgtccaggctggtcccaactcctgagctcaagcaatccttctgcctcagtctcccaaagtgctgggattacaagtgtgagccaccatgcctggcctgtggttctttgttatggtggttctaggaagctagtatagttgccttatttttctcataaatttagtttttagataccaaagtttaaaaattaaacctaggcctggcacagtggctcacacttgtaatcccagcactttgggaggccgaaggaggcaaatcacttgagtccaggagtttgagaccagcctggtcaacatggcgaaaccccaactctactaaaaatacaaaaaatttgccaggcatggtggtgcacacctgtaatctcagctatttaggaggctgaggcatgagaatcacttgaacccaggaggttgaggctgcagtgagccgagattgcgccactgcactccagcctgggcaacagagcgagacttcgtctcaaacagaaaaacgaaaaaaaggcctgggcgcagtggctcacacctgtaatcccagcactttgggaggctgaggtgggcggatcaactgaggtcgggagtttgagaccagcctgaccaacatggagaaacctcatctctactaaaaatacaaaaattagctgggcatggtggcgcatgcctgtaatcccagctattctggaggctgaggcaggagaattgcttgaacccaggaggtggaggttgcagtgagctgagatggcaccattgcactccagcctgggcaacaagaacgaaactctgtctcaaaaaacaaaaacgtaccaattaaacctagccatattgttgctgctaataattttatgaccttaataaaatcttcccttccttcttttgtatttaaaaataattaactgttaagcaaatgcgggatttattttggggtgaaatatgtatacaagttaaattatttgctgctggccaggtgtggtggctcacacctgtaatctcagcgctttgggaggatgaggcgggaagatcacttgaggtcaggagtttgagaccagcctgaccaacatggtgaaaccctgtctctactaaaaatacaaaaattacccgagcgtggtggtgcatgcctgtaatcccagctacttgggaggctgaggcaggagaatcacttgaacccaggaggcagaggtttcagtgacccgagatcgtgccattgcactccagcctgggcaatgagagcaaaattccatctaaaaaaaaaaaaagtgctgcaaagcagttgtcccaatagcatttatttaagtggggcgggggcgggggggtgggggcggggggagattcttattggttcgtaatttatcaagttagaccttttatgaaattccccccatgacctttgaccttctgtttttaacctggtaccaaacagcttttatcatcgtctcgtggtgtttatgttttgaagtccaatagggtgagttgtctatgattgtttccttcttttcccaaaaatattctttggagttcttacctactgattttttttttccagatgaattttgctgtcacttaagtttgacaaaatgttccctttgaaatttcaaatttttgaaatgaagtatgagatctaaaaaaaaaaagaaacctgtgtattggctcagcattacccttattcctctcagccaagtgcaagggatcacttactcaaatctttattcatcccactagagtttaatgacttccttgaatggctgttcaatgttcagtgacaggtctggcttttgttgtgaggccatctatggagtctctgggacccttccagtccctggaatcagtttggtctgagaggtcaggacttggaaacatactggaggcagggcaagggcaccctgctcttgttttggcatctacctcttttccgctggtccttcttatccatccaactagtccttttccctgagccaggtccatactttcccaccccaaacccttcctcttgtttcctggctctctgtttctggctacattcatttcctacactcctgtatcaaaagtaccacaattgcttctcgttcccacagtgcagtgcggctgagcgcctcagagcccgcggggacgctgcggggggattgcggggagggggcgttgggaggtgccgatgttgggctgggcggatgagcgcatctgcgtggtgagccttccaacgtgcgcgagaaggacgtggaagaccttttctacaagtacggccggatccgcaagatcaagcttaagaatgggcactgccttgtgcccttcgccttggtgcgctttgaggacccccgagatgcagaggatgctatttatggaagaaatagttatgattatggccagtgtcggcttcgtgtggagttctccaggacttacgaagtcggggtgggtggccccgtggtgggaggaatgggccttctgcaagaagatctgatttccgagttcttgtttcaggacttcctcaggcagctggcaggacctgaaggatcacatgcgagaagttggggatgtctgttatgccgatgtgcagaaggacggtgtggggatggttgagtatctcagaaaagaagacatggaatatgccctgcataaattggatgacactaaattccactctcatgatagtgaaacttcctacatctgagtttatcctgagagaagcaccagctatggctactcacagtctcggtttgggtcaaggggccgtgactctccatactaaagccggggttccccacaccacttctctcctttcaggccctactgagacaggtgatgggaattttttctttattttttaggttaactgagctgctttgtgctcagaatctgcattccagattgaggatttagcgtcttaggaaattattttaattttttttttttaaagaagaaaaaaaaactacatactttctaccagggccatattagcagtgaaacattttaaactgcagaaattgtggttttggttcagaaacaagttgtatatttttcactcctgaatatgggtaaaaaatcagttccgtctttgtgggttgctctgctatggagatcaacagttactgtgactgagttggcccattctgcttaaaaatatgttttaaacgtttaagaaaaatgctcatcatcactggccatcagagaaatgcaaatcaaaaccacaatgaggtaccatctcacaccagttagaatggcaatcattaaaagtcaggaaacaacaggtgctggagaggatgtggagaaatagaaacatttttacactgttggtgggagtgtaaactagttcacccattgtggaagacagtgtggcgattcctcaaggatctagaactagaaataccatttgacccagtgatcccgttattgggtatatacccaaaggattgtaaatcattctactataaagacacatgcacacgtatgtttattgcagcactgttcacaatagcaaagacttggaaccaacccaaatgtccatcagtgatagactggattaagaacatgtggcatggctgggtgcggtggctcatgcctgtaatcccagcgtggctcatgcctgtaatcccagcactttgggaggccaagacgggtagatcacgaggtcaggagatcgagaccatcctggctaacacggtgaaaccccgtctctactaaaaatacaaacaattagctgggcgtggtggtggcgggtacctgtagtcccagctactcggtaggctgaggcaggagaatggcatgaacccaggaggtggagcttgcagtgagccgagattgcgccactgcactccagcctgggcgacagagcgagactccatctcacaaaaaaaaaaaaaaaaaaaaaaaaaaagaagaagaaaatgtggcacatatacaccatggaatactatgcaaccataaaaaaggatgagttcgtgtcctttgtagggacatggatgaagctggaaaccatcattctgagcaaactactgcaaggacagaaaaccaaacactgcaggttctcactcataggtgggaattgaacaatgagaacacttgaacacggggtggggaacatcacacactggggcctgttgtggcgttgggggaggagggagggatagcattaggaggaatacctaatgtaaatgacgaattaatgggtgcagcacaccaacatggcacatgtatacatatgtaacaaagctgcacgttgtgcacatgtaccctagaacttaaaagtataattaaaaaaaaaaagtttagtaattgaaaaaaaaaagtacaacaattgggttggttggaacagcagaaatgaattgtctcacagctctggaggccaaaagtctgaactcaaggtgtcggcaggaccatgctccctctgaaacccatagggaaatccttctttgccccttctagcttctggttgtttgctggcagtctctggcattccctggcttgtagacgcatctttccaatcgtctgccttcacatggtagtctccctgtgtctgtctctttaagtggctgtcttttgttttttgtgtttttttaatttcaatttaatctattttttgtagacacattgtttcaccatgttgccaggctggtctcgaactccagggctcaagtgatcctcccgtctcagcttcccaaagtgctgggattacaggcgtgagccgccacacccagcccacatggctgtcttcttatgggaaaccagacatgggattagagacccactctattagagtaggattgcatttaactaattacatctgcaacaactctatttccaaataaggttacattctgaggtactaggggttaagacttaaatatatcctttttaggaaggacacagttcaacccacaatattagctggccacatgtttcccctgatctgtactttacttgttccccctggctctggtccctcctcgggtcaggtcctgcctgagcctcccctggccatgtcccttctttgtgcctggaccctcctgattaataccccatccccacccttgtgccctcagctgacttcttgtacctcccaccaggcatgatgacctgaaggagatgctggacaccaacaaggattctctcaagctggaggccatgaagaggattgtggcggtaagaggggaaggaggaggcctccctccgggcggggcctgggtggccaagagcagctctccttagctccttgtagaccttccctctagttagtgctgtgcctctcgctttgtccctcttcccctaccttgaccccaccacccagatgattgcccgaggaaagaatgcttcagacctgtttcccgcggtggtgaagaacgtggcctgtaagaacatagaggtgagcactacctggtgagggattgcttgtccccacctcccccaggaccacactcaagcttggggtgaggaaggaaatgatttagcccctgggggcccgacctgctgagaaatgtctctgagccaggagaagacactgtctccatgtccctgaactggatgtggatcaaggtaaaggacccggatacactcaggggtgctctcccccactgggagagtttgtccccatggaccgcagctggctggggagatgacatcccaggggtaggggggtgggcacaggtgcctgctgagaagcgttctgctgagaaacgtgctctccccaaggtgaagaagcttgtctatgtgtacctggtacgctacgctgaggagcagcaagacctggccctgctgtccatctccaccttccaacgtggcctaaaggtcaggggtctcagtttgcctcccagggcctgggcctcgttggcgctgtatcggaggagtaggcctggggagaggccatgagcatgggagcgggctctgcagaccccttcctacctgcctaaaattgggagggtcacagtcagaagaggccagccagaccctcagagagtggaagctgggctcagaaggggcgtaagagatgaagtgggtacccagggcccctgtctctcttcccaggagcctgtggtaatggctgcttctagtatgaaccacttgagcccccggagagtggagagtctctagcaatggagaacccctcaaccctcacccccctttgtgtaaaggtgtgaattgtggtccacagccaggtagatttcaacctttagcagtggcctgaatcccccacaccattctcaccttttgtttcattttgcccaaggcctctagttggatttacatatgttaggtgcatgtataagtctcccccctaagggcttttctggttagtctaagacatcttgagggtaaagacagccatttcaaggccattctctccatattggatttttcagctctgattacaaccattaactcctctatttttgcatacctttatttatttatttatttatgagacaggttctcactgtgttgcccaggctggagtgcagtggtgcaatcatggctcactggagcctcgacttccctgagctcaggtgattctcccacctctgtctcctgagtagctgcgactactcagcctgcatcaccatgctcggctaatttttttgtagtttttgtagagatggggtttcaccctgttgcctatgctggtcttggactcctgggctcaagtggcctcagcttcccaaagtgctgggattacagggatgagctaatactcctagcctggatacttttagttcaaatttctgtgagagagattgtgaaaggtccagctcatcttttcatatccagaagttctgtaggttgctgggtagacaggattgctgctcaaatccagggcccaccccttgtccaatctgctatggccagcaagaggggttgacagtcggcttctttggggtgagagtagaaagcatggtcacttgaatatacaattcattcatttagtaaatacttgggtgtctctatgccacacattgtgctagatttctttttataagtcaaaaccatggaatccgtcttagattggcaagtaatcttttggtttgagtaagggttaagtataaaaactaatctgaaattgttgtacagattttcacctatagtctctaccaactgaccctgtcccccttttagaaaaccagagctcatttagttcaactcaatgtgataatttctttctgcaaagtgccaaatagtattttaggttttgtaggccttatagtctcaactatgcaactactcaattttgcccttatggtgcaaatgcagccattgacaagtgggcgtggccgtgttccaataaatctatataaaaaacaggcaatagacagattttatccaagggctgtagcatgccagcctttgctctagaacatgtctaacaggtcatcttttctgatagggacctcactccttcataaggcaacttgctccatctcaagacaactaccactatttggggtgttttttaaaccattctcttttgttgaaacctccacaactataatttttaaaaattgatttcaggctgggtgtggtggctcatgcctgtaatcccagcactttgggaggccgaagcaggcaaatcacaaggtcaggagttcaagaccagcctggccaacatggtgaaactccatctctactaaaaatacaaaaaattagcttggcatggtggcgggtgcccataatcccagctactcaggaggctgacgcaggagaatggcttgaacccgggaggcagaggttgcaatgagccgagaacgtgccactgcagtccagcccaggcgacagtgtgagatccatctcaaaaaaaaaaaaaattgatttcaggctgtactgcattatgactgcacctgtgaatagccactgtactccagcctgggcaacatagggagaccctgtatctaaaaaataaaataaaatttactacaggttcacaaaaggcataaagaataatataatgaatatccataagaaatgacacatttctcaaatagccaaagcctcctatatatcttctcttgtttatcattcataggtatgtatttattcctgtgctagtaatttgcatattgttaagcaatataaaatgttttgtaaatggtgtcatcgtactacatatgtattcctttaaaacttgttttcttttttgttgtcactggcttttggtctctcctgcatgttggaaccaatcatttcaatccagccttctcccttctttcaatcctagcccaggctagggccgtgttcactttcttaggagatccctcatggaatcaaacctctgactggcaagcagataatccaggtctccctacatcctgtctttgtacagttggtcccttgaaccccctatgaaaccctactctatttcattttatcagtttagcacagggtccaaaccagggtgattctgaatcttaattatgtccctcctgattttgtgtcttctttcaagatactgataagctatttggaccagggcaaaagactgaggcatagcatgtttccaggttgacactgatctgttaataaaccttctccaagtatatttcaccacgttgtagacccacctgactgtacagacagctggcatttttctatcttgttaggaaggatcttattcaatagcaataaataaataaataaataacacctttcatgtgcaaagggttgtgggtgacacagagataaaacagatgtgaattctgctcttaaaaatgcttggctattaggtgaaacaaaaggcctacctaaaaaatagcaatgcaggaaatgctatgagacttccacaaacatatcactgaaatcaagatactaatatccaccggcctagttaccccatcaaaaaggaaaacacattttttttgataactttctgtgaatctataatcatttcccaaataaaatgctcacacacaaaaaaggaaaacaggtttaagcagatgatgtgactatttgtctctaagaaaacagagactccttccttttcaataaatgtttctaacccatctgtttaaaagtcaattccagaattttgtcaggaattagcatcaattttacctgcaattgtgaggatcttgtcttgtctttttccatttcagaaagtcagggtaatatctacccttctttagtgttctattcccgtcattctctaagagtaatagtacaggcacacctcattgtattgcactttgcagatattgccagatattgcactttttacaaattgagggtttgtggcaaccctacatcaatcaagtctatcagtgccatttttccaacagtatgtgctcacattgtgcctctgtcacattctggtaattctcacaatattccaaactttttaatgattattatatgttatggtgatcagtgatctttgatgttactattgtaattgttttggggtgccacaaaccatgctcagacatgaaagtgaaattaatcaataaatgttgtgtgtgttctgactgttcccccatctccttcaccttgggcctcttcattccctgagacacaacaatattgaaattagatcaattaataaccctacaatggcctctaagtgttcaagtgaaaggaggaaccacacatctctcactttaaatcaaaagctagaaatggttaggcttagtgaggaaggtatgttaaaagctgtgataggctgaaagctaggccacttgctccaaacatttagccaagttgtgaatgcaaagtaaaagttcttgaaggaaattaaaagtgctactccaggctgggcgtggtggctcacacctgtaatcccagcactttgggaggccgaggcaggaggatcacttgagaccaggggttcaagaccgtctctataaaaaatttttttaagttagcctgatgtggtggtacgcacctgtagtcttagctacttgggaggctgaggtgggaggatcacttgaacccagaagtttgaggtgcttctccagtaaacacatgaatgataaagaaagcaagacaggattattgctgatataggaaaatttaagtggtctggatagacgatcaaaccagctaccacattcccttaagccaaagcctaattcataggcaggtcttaaatctctccaattctatgatggctgagagaggtgaggaagctacagaagaaaagacggaagctagtggaggttggttcatgaagtttaagtacagaagccatctccataacaaaaaaatgcaaggtgaagcaaaagtgctgatggagaagctgcagcaagttgtccagaagatctagctaagatcattgatagatgtgactatgttcaacaagagatgctcaatgtaaatgaaacagcctcttactggaagaagatgccatctagcactttcctacctagagagaagtcaatgcctggctttaaaaaacaggctggctcttgttaggggccaatgcagctagtgactttaagttgaggccagtgctcaatgaccattctgaaaatcctggggtccttaagaattatggcagatctcctctgcctgtgctctataaatggaacaacagtgccatgacagcacatctgtttgcagttatggtttactgaattttttaagcccactgttgatacctaccgcttaaagattcctttcataatattactgctcattgacaatgcatttgttcactcaagagctctgatggagaggtacaaggagattaatgatttcatgcctgctaacacaaaatcagttctgcagcctatggatcaatgagtaattttgacttttaagtcttattatttaagaaatacatctcgtaaggctagagctgccatagatagtgattcctctcatggatctggacaaagtaaattgaaaaccttctggaaaggtttatagaaaccttctggaaaggtttaccattatagatgccattaggaacattcatgattcatgggaggaggtcaaaatattaacattaacaggagtttggaagaagttgattctaaactccatggatgactttgaggggttcactacttcagtggaggaagtaactacatatgtggtggaattctacctagaagtagaagtagaattaaaagtggagcctgaagatgtgactgaattgctgcaatctcatgataaaacttgaatggatgaggacttgcttcttatgagtgaacaaagaaagtcctttcttaaaatggaatctgccgggtgcagtggctcacgcctgtaatcccagcattttgggtggccgaggtgggtggatcacgaggtcaggagatcgagaccatcctggctaacacagtgaaaccccgtctctactaaaaacagaaaaattagccaggcatggtggcgggcacctgtagtcccagctactcgggaggctgaggcaggagaatggcgtgaacctgggaggtggagcttgcagtgacccgagatctcgccactgcattccagcctgggcgacagagcgagactccgttacaaaaaaaaaaaaaaaaaaaaaaaaaaaaactcctggtgcagatgctgtgaacattgttgaaatgacaacaaaggatttagaatattacataaacttagttgataaagcagaggcagagtttaagaggactgacttcaattttttttttttttgtagagactggggtctccctatgttgcccaggctggtcttgaactcctaggctcaagcaatcctcctacctcagcctcccaaagtgttgggattacaggcacaagccatcacgcccagcctacattgtttttttaaagacataatgctattgcatgcttagtagactacagtatattgtaaacataactttttttttttttttggagataggatctcactctgttgctcagtctggagtgcagtggcatgaacatatgtagctcacttcagcctccaactccctgggctcaagtgattctcccacttcagcttcccaagcagctgtaactataagcataacttgtatgcaccaggaaacaaaaaatttatgtgactcgttttagtgcgatatttgctttattgttgaggtctagaatcaaacccacaatatctccgaggtatgcctgtaatatatagctgctgctgctgatagtgggaagacagtcctaagccccatgatcacaatacagtgtaaggaatgcttttatacgttctgtataggatgcagtaggaataaagaagaagggcttggggccgggcgtggtggctcacgtctgtaatcccagtactttgggaggccgaggtgggcggatcacttgcggccaggagttcgagaccagcctggccaacacggcgaaacctaatctctactaaaaatacaaaaaattagctgggtgtggtggtgcgcgcctgtagtcccagctacttgggaggctgaggcaggagaatcgcttgaacccaggaggtggaggttgcagtgagccgagattgcaccaccgcactccagcctggcgacagagcgagactccatctcaaaaaaaaaaaaaaaaaaaaaaaggaagggcctacacccctattttgttttaaacactgtggaagaacagcagcttttgcaatgatttctgggagaaaggagtgtaaggttgaactccggaagggagaccagcttgcatctgctgggcggtcacctcaggcattaaaacaggcacctccaaaaaaacccttacaaggaacaggaagtgtttcaggtgtttcagcaattttaggtgttctgaaagtttttcagtgtttctggaagtgaagctacccattgcaacacctgttcaggtgtcagatttctgcaaccagagccaaaattaagtgtcccccagatacccatcactggcacaccatccaggctccagtcaagcggcagggaagcaagagctagtggtcgctggggacagtgacttccaaaggtgtggcctccccccatcagggcacctggtgccctttcatagctctgcctccacctctgcctttaggatcccaaccagctgattcgtgccagtgccctccgtgtcctctctagcatccgtgtgcccatcatagtgcccatcatgatgctagctatcaaggaagccgcctcggacatgtcaccctatgtgcggaaaacagctgcccacgccatccctaaactctacaggtatgccccagccctgtcccacgctccccaggaggctggttcctaagttctcaacccacccctggcctttcctaagtcttgcctgctgcttctcagagggtttgaggagggtagtttgggggactgacagagatggaggagaacaataaggctggggtgcaggaggtgagcatggcttggacagatattgggaaggctggggctgagagtggcaaattcccctcaccgatttctccctcagtttggactctgaccagaaggatcagctgatagaagtcattgagaagcttctggctgacaagaccacggtgcgtgtataggggcgctccgggaggggtggtgaccggcagccggccttccacccttcgcgttcaccctctcgtctttgttctttccccagctggtggcgggcagtgtggtgatggcctttgaggaggtctgcccggagcgcatcgacctgattcacaaaaactaccggaaactctgtaacctgctgatcgacgtggaggagtggggccaggtggtcatcatcagcatgctcacccgctacgcccgcacgcagttcctgagccccacccagaacgtaagtgggcccagcccaggcagagcgggccgaagtgtgtcccggggaggcgcccacagacccgtcggtctccccgtccaggaatccctactagaggagaacgcggaaaaagccttctacggctcagaggaggacgaggccaagggcgcggggtctgaggagacggccgccgcggccgccccctcccgaaagccctatgtcatggaccccgaccaccggctgctgctgcgcaacaccaaacccctgctgcagagccgcagcgccgcggtggtgatggcggtggcgcagctctacttccacctggcgcccaaggcggaagtgggcgtcatcgccaaggcgctggtgcgcctgctgcgcagccacaggtgcgctccgcccccagccccgccccctccctcgcctcctgccccgccccacgggctgcccggctccgccccctcacgcccaccagccgcttccacctctgcccacccgctccacactgaccgtagtcctgccctccgcactggtcctctccccgcaacgacttgccccaccttttcccctcatccgctgacccttgccccaaccgaggggcccggggtgctctgacccgtcctctccgcagtgaggtgcagtacgttgtgctccagaacgtggccaccatgtccatcaagcgccgggtgagcctgcgacggcgggctgtcctcgctgtccgagggccgcttctgcgggcactggaggcgttgtcggggctgggaccggggccggggaaagggaagatggaggaataccctggctgtgcagaggatggggcaggggaggctccaaatacagatagggagcagggcctggatcctgaggggccgctgaggggatgtccagtggaaaaagagctagtcagatctgagatggacgagggaagacttgaggagtggagggcagtggtgaggaggcaaggatcctgggcgctgggtcaggataggaggggtgtctctgggcagcgaggcaggcctggggcttcggtggagctccctagctgcctctcttgtgccagggtatgtttgagccctacctgaagagcttctacatcaggtccaccgaccccacccagattaagatcctgaaggtgagtgagggacagaagtgcatgtgcttcccagccctccccaccccatgtacccactcaaataactcacagtggcccccctggtgcctgcctattcctggggctgagcccaggagcccatgactgccccagctggagctgtttgttcagggagctgggctaaggagggtcagggggagaagggaactgctctttgcctagtacctggtatacacctgctactcttcataaatgaagtaacctgatatcacctcataataatcccaggatgtgtacattatattccttttataaaaatatagactctggccaggcacagtggctcacgcctaatcccagcactttgggaggccgagacaggcagatcgcctgaggtcaggagttcaagaccagcctggccaacatagcaaaacctcgtctcaacgaaaaatacaaaaattagccaggcgtggtggcaggtgcctgtaatcccagctactcgagaggctgaggctagagaattgcctgaacctgggagacagaggttgcagtgagctgagattgtgccattgcactccagcctgggtgacaagagcgaaactccatctcaatctaagaaaaagaaaaaaagactctgggaggtaactgccccaggtcacataattctgctgactccaaggttcacacttttctctcccacccacagtgttatggcccccacacacctgccccctcaggctctcctgcaaacattcacggacaaggaaagtggcgggagcccatacctccatttgattcctgctctgctgcctcattattgagtgatttccttcagcaacagttaatcttcctaacccttgtgaacatccactatgttctaggggtacatgatgagcaaactaatcagggaccctgcctttgtggagcttacagatgtggggaggaggagacattaagcagttaatcacaaggcaaatgtaaaagtccacttacaaaatatggaagaaagtgtggagagctataagggcataaaatagggagacctcatctagtctggtgccagggaagttttcccggaggatatgagacttgagctgaagcctgagagatgaacatgaattatgcagggacagaaatgggaagaactgctccacgcagaggaaacagcatctgcgaagaccctgggttaggaagtggagtgggattggggcctggaagacaagggggacagtgatgggagatgggaggtagacagcaagcagatcattcagggacttacagaccatggtgaatacgatggtctccatcctgaaagcaataggaagctttaagttttcaatgcagtagggaggtgacatggtcatactgtaagcatactgtgtagggaatccacttaagaggcaaactggtcctcttgctttttagacaagtttcataacctgtcaattccctcatcagtgtgaggatgatgcagggctgtcatgaggattgttttctggtctatgaagtgtatttggaatgaaagcacagaaagtccactggccaacccacccattttctgcctctccaaccctccctgcagctggaagtgctgaccaacctggccaatgagaccaacattcctactgtcctacgggaattccaggtacaggccagctcccagccagaagggcctgggagaggggcccatcagatccttgtgccctggtgggtaaacctcctcttatgagcccaaggctggagaaactattatcttacattcccgttccaatgtgtttggctggctttgggccaaggaatcactggattgggggtggagttgtcaccccctttcccaagtcttagtcaccggcatgataagccataaaatgaaaggccacagccttcttgaaggtcaccctcaagcctgcagagtcactgagggatttctttgtcatatcccacagacctatattcgcagcatggacaaggactttgtggcagccacaatccaggccattggacgctgtgcaactaacatcggccgagtccgtgacacctgcctcaatggcctggtgcagctgctgtccaaccgtgatggtcagtgtttccctgagtgtctaaccgtgatgatcagagggtgtctgcctgcaggtctgactctgctggccactggatatccaccagtctgcctagacacaatgtgtatccattggtctgtctgtcttgatcagggcccaagtgttcctacacctctgagggctgctagagaactgaagggggttgagagaaagagccaagggcctggggcactgcaggtgtgtctgtccacctgagtgtggccatctgactgtcttggggtccacacactcatttttgttctgtagagcttgtggttgcagagtcagtggtcgtcattaagaaattgctacagatgcagccagcacaacatggagagatcatcaaacacttggcaaagcttacagacaacatccaggtgagggagaagccatattttcactccccacttcaaggtcctccccatgatttcaagactgtataattacatatgctagccttatcaaaagtaacttccaaaccttaggtcttcaggtggaaggagcagagacactggaccatgtgaccctgaccttgttacccctgatttgctttccctttggagaccctcaatgagcacgatggactttactactactcttgttttctctctaaagctctagccaaccatggttgagtgacaaatcttgtgtttttctatcgcactgctaagctgaaacatctaaacaaggcattcccaaagattctggagagtaacatggaaataaagtactgagggtacaatgaatccagaaaatcaatcttttacatcatgactgacttagggtcttgaaagctctatgctaatgaagccctagggaagaggggaaatgctgtctaggaaatgtctaccttttaacctctctctatctcaccacccccaactcccatttccagagaacccataatacaacaggccagcacagatgaggagtgctgtttccctggaagtccacaatcctacccacccactttcccgtatttacccatcttcactcctctcccacaaccacaggtgcccatggcccgagccagcatcctgtggctcatcggagagtactgtgagcatgtccccaggattgcacctgatgtcttaagaaaaatggccaagtcattcacagcagaggaggatattgtcaagctgcaggtcatcaacctggcagccaagctctacctgaccaactctaaacaggtaaagattaagagatgaccccccagatactctggtccccagaaactccctagacagtattcttttggccctccctaggcagggctgaactctagctcctattttggaaaagaagaatcagggaaggtggctggtctgcccacataaccaatgctaccccagtgcccacaaagaccttgtagtgctggtggtcactgttgaagagactctcctatgaagctgtgacctccagtctgctagtacaagagtcctgtctgccaccttggaactctggggctgtgaagaaccacagttgattgggataagggaagggcccaacagtggcaggtactgatgggagaacatgcatcccagatgtggtctgtgcttctttccaaagcttgacaatgcttggccagtctgtgccaaagataagggggtgagtctctgcttgggcttgggtggtgctggtggccactgtcattcccaaggtgaaaggttataagagatacacagccaaggatgaggctcaactaagttgtagtatcagggtgttcagagcctcctagctgtctggcatctcctgagatggttccaggagattctcctaaaatgaagcataatgtgctgagcttttcaaggtgtcagggacatcaaacaccatgacgatttccacactctcccactcagttaagcaggacagggattggcaaactactgcccataggctgaatttggcctattcctgtttttgtaataaagttttgttggaacacagccctgctcattcatttacaaattacctatggctgcttttgtgctacaacagcagggttaactagttgcaacagactgtattgcccacaaagcctagaatagttattctctggcccttttataaaaagactctgccaatccttgaagcaaaacctctggctaggtggctggggtctacagatttatagcagggatatcccctggagactgtagcatccctgccatgtccactgtgcgtgggagtctttggatggtggcacttatctttttcagtggcttctttgatccattgtggccagagtgagccccagaggctcaaggtgaggtaggcagggccaccaagtgctgtgactgtaatcaggagtcaaaggacagcagcaacatgtggaggcaactgagtctgtataattaaatatgctagccttatcaaaagtaacttccaaaccttaggtcttcaggtggaaggaggagagacactggaccatgtgaccctgagcttgttatcagtgttgtgggcaaagcagattggagagagagaagttagagggggagagagagaagttagagggagaaagagcaccatggggaagcgttcaatcgttgaaaaaatatttgtatacttcctttgttcaggtgggaggaaggagcaagtgggaggaatgtttgaaaagatgaagcagcctgggtggggagccacccaggtaggtgggagtcttgacatgctcagcaatgagccagagtcctaaaccccaggatggtgaggttggcatgttttcataagcctgggcctgtccacatgtcatttcccccaagttgtcactgtgagctacatgtgcatttgttcatttatttaacatatatgtaggtgggagtctgacatgctcagcactgagccagagtcctaaaccccaggatggtgaggttggcatgttttcataagcctgggcctgtccacatgtcatttcccccaagttgttactgtgagctacatgtgcatttgttcatttatttaacatgtaggcctactatttgcctggtactgtgctgcgtcctgaggatatgacaatgagtgagacacatttacaggtctccagatactcacagccaagtaggagaaacaggacaaaaataaacattttaaacacagcagtaacagctgtcatcagggttggcacagcgagctgtgggtatatacagctgaaccctcccctaggaatgacccctgtcagggaacccagagtaggctgttcaggcaaatggacactcacctccagggcgcccttcacctgcaagtgagtttttgcaggccccttagaatggttatttgattcaataaagatttttgtcctccctttctttctcctttcttcccagcctcttctgggagtggtaaagaagggggagtccttggggtactaggagggaggtggtttggatgcgcacatgaccatgcttgcaaaacagtagtgatgcttcccatcctgggaccatgagtggcaatctgcccagctaaaaggccacagtaatctcagtcattctctccaatttggacatgggcccacggcatgccagatcctggcccaggatgaggccaaggaaatgaccaagatgaggcctctgccctgctattgatcagcagataatcagatactagaccagaggccacaaaggcataacatgcaggtggcgggggatgggggggttggtaatcaaagtggctattacatccacctggatatagaccctggggaaactgcctagcaggttagtttgcttttatgtgtcaggtgagatgtgtggcaggagggtctgccaggggcacagtgggatctacaaccctcccatgtgaccgcctttacagtgaatagaagattctgacaaattttgcagaattgcttttaaaaacgtaaactttttttaatatgctaaaggtaatacatgcttatcatagaacatttggaaaactcagaaaattataagtttaaactattaataagtccaccatttagaagaccaccattaattatatatttccttattttttattcctatatatagtcattcagaagttgtacttttgtctattgtccaatattttaaacttttctgcttcttttcaatgctttcatatttaatacttttttttccccattcacatttcaattaaacttttcacttagaattttctccaggctgggttcagtggctcacacctgtaatcccagcactttgggagcccaaggtgggtgggtcatttgaggtcatgaattcaagaccagcctgaccaacatggcaaaaccctgtctctactaaaagtacaaaaaaattagctgggtgtggtggtgcgctgaaatctcagctacttgggaggctgtggcaggagaattgcttgaacccaggaggtggaggttacagtgagctgagatggtaccaccacactccagcctgggccacagagcaagatccatctcaaaaataaataaaaattaaaaagaatttcctccaaatttttttctactttcacatttttaaatcaattgtattagttttctgctacataataaattactataaatttggtggcttcaaacaacacacgtttattttctcagtgtctatgggtcgagaattcaggtatggcttagttggatcttatgcaaggctacaactgaggtgtcagccaaggctgagtttttatctggaggctgtactggggaaaggtccacttccaagtcacatggtgccacgatccacttccttgcagttgtaggattgtggccctggcttcttgctggctgtcagctgggggctgcccttgccttctagaggccgtccttagctcattgccataggggcctcccaacacggatgcttaatttctccaaagccacaagggagaaagtctctagagccagtctgctagcaagaccgtcttctttttattttttaatttttatgggtacatagtaggtgtatatatttatggggtatgtgagatattttgatacaggcatataatgcataacaatcacatcagggaatggggtatccatcctctcaagcatttatcttttgtgttacaaacaatcaaattacactctcttagttatttataaatgtataataaattattgttgactgtagtcaccctgttgtgctgtcaaatactagatcttacacattctatctaactataattttgtacccattaactatccccacttcccccacccactacccttctcagcctctggtaaccattattctactctccaactccatgagctcaattcttttaatttttagccctcacaaataagtgagaacatgtgaagtttgtttttctgtgcttggcttatttcacttaaaataatgacctctagttctatccatgttgttgcaaatgacaggatctcattcttttttattctttttttatagtactgcattgtgcatatgtaccgtattttctttatctatttgtctgttgatagacacttaagttgctttcaaatcttggctatggtgaacagtgctgcaataaacgtaggtgtgcagatataacttcaatatgttgatttccttacttttgggtatatacatagcattgggattgctggatcatatggtagcactatttttagtttttgtttgtttgtttgagatggagtcttgcactgtcacccaggctggagtgcaatggcatgatctcagctcactgcaacctccgcctcccaggttcaaacgattctcctgcctcagcctcctgagtagctgggattacaggcgcccgccaccaagtctggctaattttcatatttttagtagagatggggtttcaccatgttggccaggctggtcttgaactcctggccgcaagtgatctgcccgactcggcctcccaaagtgctgggattacaggcgtgagccactgcacctggcctatttgtagtgtttttttttgagatggtgtttcactcttttttcccaggctggagtgcaatggcgtgatcttgcctcactgcaacctctgcctcctgggtgcaagtgattcttcttctgcctcagcctcccaagtagctgagattacaggtgcctgccaccacgcctagctaattttttgtatttttagtagagacagggtttcaccatgttggccaggatggtcttgatctcttgacctcgcgatccacccacctcggcctcccaaagtgctgggattacaggtgtgagccaccgtgcccggcctatgtttagttttttaaggaacctccaaactgttctccagacatttccactaacagtgtacaagggttgccttttctccatgttcttgtcagcatttgttattgcctatcttttggatataagcctacttggggtgagatgatatatctttttttgttttgttttgttttttgagacggagtcttgctctgtcacccaggctggagtgtgcagtggtgcgatcttggctcactgcaacctctgcctctgtggttcaagtgattctcctgcctcagcctcctgagtagctgggactacaggcgtgcgtcaccacgccccgttaatttctgtacttttagtaaagatggggtttcgctgtgttggtcaggctggtctcaactcctgatctcaggtgatccgcctgcctcagcctcccaaagtactgggattacaggcatgagccacccgtgcctggcctttcattgtagttttgatttgcatttctctgatgctcaatgatgttgatcaccttttcatatacgtgtttgctatctgtatgtcttcttttgagaaatgtctattcagctcttttgcccatttttaaattggattattgaatttttttttcctattgagttatttgatctccttacgtattctggttattaatcccttgtcagatgggtagtttgcaaattttttcctcctattctgtggcttgtctctttgttgattcctttgctgtgcagaacctttgtaacttgatgtgatcccatttgtctacttttgctttggttgcccgtgcttgtggggtatcactcaagaaatctttgcccagtacaatgtcctggagaatttctctaatgttttcttttattagtttcatagtttgaagtgttagatttaagtttttaatccactatgatttgatttttgcatatggtgagagataggggtctggttttattgttctgcatgtggatatcccgttttcccagcgccatttattgaagagactctcctttccctaatgtatgttcttgatacctttgtcaaaaatgaattcacggccaggcgtggtggctcatgcctgtaatcccagcatcttgggaggccgaggctggtggatcacctgaagtcaggagttcaagagcagcctggccagcatggcgaaaccctgtctctactaaaaatacaaaaattagctgagcgtggtggcgggtgcctgtaatcccagctacttgggaggctgaggcaggagaattgcttgaacccgggaggcggaggttgcagtgagccaagatcgcgccactgcactccagcctaggggacaagagcgagacttcatcttcgtccccccccgccaaaaaaaaaaaagccactgatttttttttttttttttttttttggagacggagttttgctcttgttgcccaggctggagtgcaatgggtttttttttttttttttttttgagatggagttctcactctgttgcccaggctctggactgcagtgacgcgatctccactcaccacaacctctgcctcccgggttcaagcaattctcctgcctcagcctcccgagtagctgggattacaggcatgcaccaccatgcccagctaattttgtatttttagtagagacagggtttctccatgttggtcagactggtctcgaactcctgacctcaggtattctgcctgcctcggcctcccaaagtgcttgctaggattacaggtgtgagccactgtgcctggacaatgctactgattttttttttttttgaaacggagtcttgctctgtcaccaggctggagtgcagtggcgccatcttggctcactgcaaccttcacctcccgggttcaagcggttctcctgcctcagcctcctgagtagctcggactacaggtgtgcatcaccacatccagctaatttttgtatttttagtagagacaggatttcatcatgttggccacgatggtctcaatctcttgatctcacgatctgcctgcctcggcctcccaaagtgctgggattacaggcatcagccaccgcacctggccaatgctactgatttttatgtggattttgtatcctgcgactttactgaatttattagttctaatagttttttggtggaatccttaagattttttaaatataagatcatatcatctgcaaacaaggataatttgaattcttttccaatttggataccctttatttctttctcctgtctgattgctctagatagaacttccaatacagagtcttcttaataaaacataatcataggatcatatatagtcatataccacctttgccatatcctgttggttagaagcaagtctcaggttttgcccatacccaaggtgagggattgcacaaaggcatgaacaccaggaggcagctactggtggggaagaccttagaatctgtctgccacatccatctagagcttaaacttactcatgtgtaatgtgtgaattgaggatatatttcaattttttttaacagccagttttctaagcatgattagcaggcatctgcaaggtagcatgtatgttggcataggttatggaaaggaagtcagtgtttcctgcttaaaattcctctctgacaactggagcctgttggtgagggggagccttgttctgttcttggcacactggagtgtatctcagaggccttcttgaacagcctgtaattcctgcacatcctggctagatgaggtgggggtcttggtggtgcacacaggatgccacaatccacagggaatggccccttggggtggagaagggtaatgaattattataggcaaatcctgcagtgttgaggtggtgggccagccccttcctgtgttggttgttaacatgcagttaaggctgtggacagatggatccaaataccaaacagttctttctagaactaggcaaggacttgaaggagggagtctgtgatcagccagctgggaaatctgtggaggaagacattgtccaaaccaaaagagggatcagcagcctcttgataattgactatgttggtaagggcatccactagccctggccatttagatggtgtctggccaagagaggggcaggttggtgatgaaatctgttgtgatggcatcttattttcatatttttaagtctattctattagcggtgcatgggattgggattgcttatctgtgactataacagtatcgcaggtgctgctttgctggaagggactgagctgaagagggcctgtgggccagattggaggtaggaatgtggaatcatagtggctctctagagtggtgtggggcaattctgccaaagcagctgctcagactctgggtcagcatctgaggggctttgccccttatggacatctgcttgatgtccctgccagattagctgggttaaccatgtccaaggctacacgtaacagtatgtcaccataaacctcaggaagaacagagtcagttccaggctccctcctgccggcccctgatgcccttgggcattctgcttgttgaccacttggtggttttgatcttggtcacaagtgatggaaacatggagacctgggccagggcaggctccttatgtcagcaggtaggcagtgaagggaagcagatggggtgcagctccagcagatgcaggcctaggtgcagtactgatgggctccttggcctgggaaaagccccttaatgatcctgcttcttttctgtaaaatgggggcaataatgcctacttctcagaaggcttggggagattagatgagctagtgtggagcacctagcacagagttggtgccagaaggcacttgataagtgatggctgctaccgctgttgccatgttaaggcaggttagattaggccaagatcatggcagaaatggagatattttaggtctgcagttgtagcttccctgactgcagactgtgaaccctacatgaccttggcaaatgcatgggcagctgcagtttgccctgatgtcattagaagcttccagggaaggataaagacctctgagacccctgggctgctcagaatctactaaatgggtggatagggcatgagggtggcccctgccaaagggacccctgtttatctgccctgtctttttgttgtctaattccccctgggtggtggagcctggaaactgtgaggtccagcagagcattccatacttccacataccctgctgccctagagtaaagaggctggacaggcctggagtggtagggaccacaaatctagggaagaatggagtccagagccaggagtggggaaagtccaaaaggaaaacctcttttgttggcccaaggcagttgtcaaagttgggatcatcaggaggcatgtccagagagatgagagaaaattctgagcccagaacaagggcaggtggggagggacagctgggtggaagcgccggtcctaagcagggagaggagacgttctgcctgaaagtgtcggcttaaagaatctgtttctgagcctcctgtgtccccatccccccgtcagctgacccacctcttcctgttcctccagaccaagctgctgacccagtatgtgctgagtctggccaaatatgaccagaactatgatattcgcgaccgggcgcgcttcacccggcagctcatcgtcccttccgagcagggtggggccctcagccgccatgccaagaagctcttcctggcacccaaaccagctccagtcttggagtcatccttcaaaggtgggagctgaaatcaagggtaaccttcctaggggaatggaaaggaactggccagagtctctgccccagaccttcctgaggcccctagccaggcaccaggcttctgtggacagtcctgctccctggctcactccttttgtccctcctgtggcaccaggaattactctttcaccctcccataaccactgccagcatcatctcacctgagggtctgccttcctggccaggatggacttgtgcctcctctcctctcaggctcccttttccatctccctccctgagcagacactaggctttggaatacataccaagatcttaaataccaaggacccaggaaggcagaaagcaaaacaacacacaaaggagaggtgtatatttttataaaggtcctgagaaagcagttgcctgcattctgtgagcttagtcactacagtcagtccaaatcccaggccccagggcttcagccttgcctctgttcctgggcttggcccttaaggcctcttttcccaagacaacggccttgagatgggcctgggagggaagggtcctcccgctgcttctccgggccccaggagtggaagccaggaacctacacagaagagagcctccttcacaaagctcagttcttctgggtatcttttcgttctttttctcttccctggacctcacgaatggggagattctgagggtgggcacagctttgaaattctcccaggaagaaggcaacagtccctttctccccgacaccatcctcactcacaggcctgtgctgccctcctccagcagtgcctcaactctgatccagacttctacacactcatgctctgactgttcatccctccctgctgagtccagagcctgactagacgtgcatgctgagcagacaggtcggcagcatctgtgggcccagagtctcctcctgcccacctctgtaggctgcctttccctggccctcagtccctgctctggcctggccagacagccttttcttccagcatgtgggcctaaaggtgcagtcagggtggaagagccattagggcacacatccatctccttcccctacccacctgggaagtcccaaccagaatcaccacccagccccacctggaaaacagctcccagagctttccctcactgctgctacctgcctgacctctaaacctatccctagaccgggaccacttccagctgggctcactgtcccacctgcttaatgccaaggccacaggctaccaggagctcccagactggccggaggaagccccagacccatctgtgcgcaacgtggaggtcagcggggtggagggttgaagtgtgtgtgtgtgtgtgtgtgtgtgtgtgtgtgtgtgtgtgtgtgtgtgtgtgtgtgttggtgggggcagacagtagggagccctggcagtgccggcccagccctcctaacaccctcccccacacacacaggaagaagatctctcccttattgagactcacgtgggcctgttgggcgaatacactgaggtcccaccttcgtgtgacgtgtgctctctcccctgccctgtctgtgtccctcttcttcccctgtgtgttgtgctcctgggccttcccatactctgtttccaccttggtttggcagtgctcctctgtgagcagcattccctcccctccatggacagtgcccctttcttcctcctctgttattccctttgtgggacagaccaggtagggcctcacaaagaggtggaataaagggtaagggcttgtgcctgcctgccttctccccaaccatgatgaaatgaccctgcaccctacccccatctccaggtacctgaatggaccaagtgctcaaatcgggagaagagaaaggagaaggaaaaacccttctactcggactctgagggggagtcaggccccacggagtccgcagacagtggtgagcagatggcagagctggggtcctctgtgctctgcccatgcatctgtgtgactgactatatgaggggtatatgtatatggttgtgtgtctaggggtgtgcacctgcttgtgaattgtttgtgcacctgagggattcatgttccaggtgtgtgtgcttgtgcaggtttctatccatggagtccatctgtgtttctgtcagttccagctggcatgtagggctgggggcaggtcagagaggtttgagggttcagtactgaatgtgaaggtggaacccaggtgtctgctccagacccaaggaggcctgcatatgagggaggaggcctcatattgttcctccacagaccctgagtctgagagtgaatcggacagtaagagcagcagtgagagcggctctggggagtccagcagtgagtccgacaatgaagaccaggatgaggatgaggagaaagggagaggcagtgagaggtgagaagggagctagccagatggctggtggggttcagggggctttcctggaaagagggctagcattgagctttagccagtctcctaagagcccctgagcccctcgtgagctgggtggggctgtcagctcacatgacgcctactttcgctggctgcaggagatctctgaggcctcatgggctggtgtggagaagcaaccagagtcctagagcctgagctggcacaagctggcttcaagctctcacggggtccctgctataggacctcaggtgtgaaccctcctggctcaggctccccacaccactccagcttttcagcatttctcctgcttctgtgaagcaaggagggagtgtccaggccaggcctgagccaacctttcccactccttcagtgaacagagtgaggaggatggtaagaggaagacaaagaagaaggtgccagagagaaaaggagaagcgtcatcctctgatgagggcagcgattccagcagtagctcatcagagtccgagatgacatcggagtccgaggaggagcagttagaacctgcctcctggagcaggaaaacagtgagagccttggggcagagtcagggtgtgctcatgggccagggccctccccaacctctgggccaggcccagacatctatctccctaccatccagaacagaacatgacatcttctacccaacccagaacatgccaaggtgctccccttccccacacccacatcccatttttctctttcagcctcccagcagcaaaagtgctcctgcaaccaaggagatctccctgcttgatctagaggattgtgagtttgggtggtaaaagtcacaggggaaaggaggcctggggagcatgaattagaacagcccatagggactctggatcgggttcctcaggtcttgtgggagcaggggagcagacagaacatatcttcaggcctgagagggcagcagggctgacctccccaggtctggggttgaggtctaggaatgggtattttgcgagagcctccaggcagccatgtgccccgctgtccatggtgctgaaatgcgtgctccttgatccctaggctccctgctcaacccaagccacctccactttgcctcctcatagtcttatctactcccacagtcacccctcccagtgtccagcctgtgtctcccccagcaattgtgtctaccagtctggctgctgacctggagggcctgacactcacagactccaccctggtaccgtcggtgagtgggatggaggaggggaccgggctggggcagggacacatccctgtgctgcatcctatggtgtggatgtgtgtggggggtgggtgtgatggaggatgtgatagctttgagtcccagctgctggatggccctaggggacaatgctgggacaggctctctccatcttgctcagttctgtccttccctacccctccactctagcttctgagtccagtatcgggtgttgggcggcaggagctgctgcaccgggtagctggcgaggggctggctgtggactacaccttcagccgccaacctttctccggggatccccacatggtgtccgtgcacatccacttctccaacagctctgatacccccatcaagggcctgcatgtgggcactcccaaactgcctgctggcatcagcatccaagaatttcccgaaattggtgcgaagggctttggatggggtggaggaggaggctcctgggcagagtcagtctttctgtggttgctgataccctccttgtgccaggccaggggccaagctataggggcacagagatagcatctaacatgatcaacactctggtggacaagacagatgatgaaataagcaagttcacatcagggcgggaggtgcttgcagcagcagatttgggccttggttgtttcaggactaacttaaatgtggtgagggtgagtgggggaaagggtgcttagagttcaggaggaaaccgggaacagtctccagcagccaagaaagccaagattctgtagagggctggtcagctgtgacagtggagaggagagtagggctaggctgggttctagacctatcaggtgatggtggccctccctctccccttcactgccttataccacttcagagtccctggcacctggagaatctgccactgctgtaatgggcattaatttctgtgactcaacccaggcagccaacttccagctgtggtatgtgcccaactcgaggtgggggtgagaggatgggctggaaagggacagggtaacaatgaactggaaatggaggtggtgcttagtggggatacatcatgattgggtgggtctggaagccatctcaggccctcattcctgacctcactctttcactgcctccaagctgtgcctctacacagggtgggaagtgaggggagagatgacagccttaattcttctccgtttcctcccacccctcccagcacccagacccgacagttctacgtctccattcagccacctgttggggagctgatggcccctgtgttcatgagtgaaaatgagtttaagaaggaacagggtgagtgctccctgggagtgggcagagagggaagtatagaagctgactccagaatgtccagcttggatggtagggagaatggtggtgtccttcatctagaccaggggtcagcaaactttctgtaacgggccaaagataaatgttttaggctttgagaatcatgtggtctctgttgcagttacaacacgactgtggctgttgaaacatagaaacatccacagacagtatgtaaatgaacgagtatggctgtgttccaagaaatttccatttatatttatagatactgaagtttaaatttcatgtaattttcatgtgtcatgaaatattaatcttttgattgctcccccaacacttaaaaaatattaaaaacattgtgggccatataggtggtgggctggatttggtctggaggctgtaatttgcaaaacctctggcctagaagaaagaagagtggcttgggcaagggaggagggaagatcatggttagttttggataagctgattttgaaatgcatttgggaaattcaggaggagctatttagtatgcaactgaaaatatgggtctatgcccaggaaacactttgaagctggagtcatgaacatagaggtggtaatggaagctgtgaatatgaatgagatcactctgggaggtgggagaaaataggaaggccaaggacagaaccttgggggaaaacctgaattctgcagaagaaagaggaggggagggataagagaaggagcacagggagaggtgggaggagaaccaggagagacaacaaggcagaaggtgtctgcaaaccacagttacctaagaccttcagagtcagcatataaaaggctactgccaacctgagggagagagggtcattgctaaaggagggacagaggccaactgcagtgggttgagggagaccacggctcaagtacatgcagtcctctttggaggactttagccatgaatgaggagggagacagggcattggcacgatgaaggatctcacttctggaaaggattttttggagacggggacacttgaacatgaacagattgaaggaacaaaaacaagaaaatgttattagtcatgaatgaaggggatagaagaaacaggagagggatgtcagtttctaaaaggaggtgaagaataggggaagcagtggagggaggaaagaggctgaagagaagactgctggtgtgcaggagagcagacggaggagctcccatggggggcctggatcatgtgagtggagagaagtcagccttgcagaatgaggagttctgggggtgctgtgaaggtttggaggcttcaggagccctggctaggtctggagctgctactgcagaggtacaattaaaaatgtacctgtgaatgctgcatgtgactactggattctggctgagagatcacagcagccacctgtgatctttttgtgagggcttagcttccaggagctgagtgggagttgaatgtgggttggagggccccccaggaaagatcaaagggtgtgaggttcaggatgggcgaacctcttaagaactgactggccactctcaaggggctggtagcccagatgtctgatggaggaagcgccaaatcagtctttggtaacaacatggataaaggcctgggtgggaggggtagagaggctgacaaaggcttcctgagggagggcccagtctgagagggaagtaccttctccccaagactgatgatttaaattctgacctgccctttgcatgataccttcccagcctgggagaacttgttgctcagtaagcagacccaggtgctggcctctgtacccaccatggcctctgccctcatcacgacctctacccccaggaaagctgatgggcatgaatgagatcacagagaaactcatgctgccagacacctgtcggagtgaccacattgtggtgcagaaagtgactgccactgccaacctgggtcgtgttccttgtgggacatctgatgagtacaggtactaggccaccagtagaggggaaatgatgagcatgggggccctggtttgaaggaggagccccagctgctgatccccttccaaacacagtcacccttagcagctcttcctcaccccttctattcccacctcaggtttgcagggaggacactgactggtggaagcctcgttctgctgaccctggatgcccggccagctggagctgcccagctgactgtcaacagcgagaaaatggtgattggcaccatgctggtaaaggatgtgatacaggctctgacccagtgacttccaaatgctgtgacctgtttggctcccatctatacctccccatgacacctaggctgtcagtctctctcatctttctctctctctctcatcatcctcctcatgccagatagcattcagggtgtcctctctccctctggaggaccaagccctcccctaatgccctccccatggattccttagtgatctgtgcagagagagatggcagccactcccttcagtcctcccagatttctgtagctatttatgtagcaggctcaataaaatgtcttctc

SEQ ID NO: 15423 - DNA, 50627 bp, Homo sapiens
gtgcctttaagacctcagcgcgcggccctgattgagaaatccgcgcgcagcctccgccgctgcacactgcagcctctgctgaacccctgccgcgccgccgccttcgccagcccggaccggaccggcccgccttcccttcctccgctccagccggcctccggccccgcaacctcctcctcggcgaagtctccctggccgccccatgtcggccgcccccgcctacagcgaagacaagggcggctccgctggccccggggagcccgagtacggccacgaccccgcgagcggcggcatcttctcctccgactacaagcggtgagggagcccgccaggaagctcgcgggagggttggggccggggaccgggcgaggcgcgcgggcaccatggacagcgcccggccccagcgccggccccgccccggccgcgccgaccggaagcccgcccggccccctcctgcggcctggagccccggcccagcgcgggcagcgctggcaccccggctccaggggccggcctaggacgcggaggggggcagataggggctggcgggggatgggccagctcagtttcgagaggagaaaccctccggttccaggtgtttctccggtttgcggcgttgcgttaggggttcccttcctttttcgtgctaggcgggttggcttcccaaaaatgtgggggaggggtctgagtcagcgaacttgagcttgagcctggggcctcttcaggaaggcgggccctggatgtacttgcacagcctcccagcttggccctgctgcaaattcatttcccctccctctggtccccatctccatctgaccctcacatccctgctcctggcattgcccctgtagttcagctccaccttcacaccctcccccacctttgattcgttcgtttgtttcttcatttgtttattcgtaaattctgcaacaagcatttatgaaaagccaactgtgtcgagtcctgaactagtcacggaatacaactgtgaacatgagacccttcttgtcctcacgatgctctagaggggagcacagatgaagaagcagtcagggacagtcgagtgtaatgggggcagtgggagcagggagaggacctagtctctggcgccggagagaaggaagacaggagcgtgaggtatgttccaggcagaggaaagggctttcaggaaggttgagagccaggccacaatctgtgtgagccactggactgaccagaaaagagggtggggaggactcctgaaggattctaagcaggcgacataatcagatttatattttagaaggacgtcaggctgctgcattgtggagaagagattggaggtgggccagattgaacaagagacaagggaggtgggtcttgaagttcacaggcctggcatgattgtggcctagaccaggggagaggcagaagatttgaggctgtggaagaggtggaagcctcagacctgatgattaattggatattgggtgggggtttagagggacagggggagaagatgaggattttcacgcacgtccatgtgaagagaccaccaaacaggctttgaacaataaagctttttaatcacttgggtgcaggccagctgagtccgaaaaaagagtcagcgaagggaaatggggtgggaccgttttacaggatttgggtaggtagtggaaaattacagtcaaagggggttgttctctggcggtggggggacacaaggtgctcagtgggggagcttttgagccaggatgagccaggagaaggaatttcacaagataatgtcatcagttaaggcaggcacaggccattttcactcttcagttacttcaggccatctggatgtatacgtgcaggtcacaggggatatcatggcttagcttgggctcagaggcctgacattcctgtcttcttttattaataagaaaaataacataaaatagtgttgaagtgttggggcagcaaacattttggcggggggtggtatggagagatactgcttctccatagccttgaagggctgcttcgagcgggattggggtggcgtgggaacctagagtgggagagattaagctgaaggcagattctgtggtaagggatgatattgtggggttgttagaagaaacatttgttgtataggattattggtgatggcctggatacggttttgtatgaattgaaaaactaaatggaataagagaaggagaaaaacaggtattaaaggactaagaattgggaggacccaggacatccaattagagagtgcccaaggaggttcagcatagccctgccagcaaagattatttatttactttaagagggagttaagactggcagtttggggatagcaccaggagatatcagctgtaatggtttggagaaacagtgtaaaccggcagtgtaaacaagagcagggcatgtatgagtagttgagtatggtgaataggagtatgactagtcagaagatagtagggatgacaagttttctggggcacagtccaagttggtctggtgtctggaatgagactggggcctaataaaaaggagcatctatacaggagcttgaatgggctgtaccctgcagcattccgaggacaggcccaaattctgagaagggcaagtggtaaaagtattgtcagtcctttttaagttggtggctgagcttggtgaggtgtgtttttaaaagaccattagtccgttctaccttttctgaagattgaggatggtaaggggtatgaaggtttcactgaataccaggagcctgagaaactgcttgggtgatttgaccagtaaaggctggtctgttattggactatatagaggcgggaaggccaaactgaggaattatgtctgacagaagggaagaaatgaccgcagtggccttctcagaccctgtgggaaaggcctctacccatccagtgaaagtatctacccagaccaagacgtattttagtttcctgactcggggcatgtgagtaaagtcaatttgccagtcctgggcagaggcaaatccccaggcttgatgtgtagggaagggagggggcctgaacaatccctgaggagtagtagaatagcagatggaacactgagaagtgatttccttgaggatagatttccacaatggaaaggaaatgagaggttctaagaggcaggctagcggcttgtaacctacatggaagaggttatgaaatgacgaaagaatagaatgggcctgtgaggctagaaggagatattttccttggtctgagaaccatttgccttgtgtgggaagagattcataggtgtaagtttcattgggggagtaggtaggagtgactgatgagaaggagaaaaactggccatgagggacagaagttggaatgctagctgcttttttagctaccttatcagcataagtgttgccctgagcgatgggatctgatgccttttgatggcccttgcagtgaatgactccagcttcctttggaagtaaagcggccttgagaagagtttttattaaagaggaattaatgatggaggacccttgtgtaatgaggaaagctttttgcccatataacagcatggaggtacaggatatggaaggcatatttagagtcagtataaatattgacacatagtccttttgcaagactgagggctcgagttaaggcaatgagttaagctttctgagaggtagtggaggggggcagaaagtatatgcgtcaggtgtgaggaagaaaatagattttggaagttatgagaactgtagagagtgagttgagcatagtttgtgattttgagggcctctgaaagtattaaagcagcggcagccgctgcacgcagacatgagggctaggccaaaacagtaaggtcaagttgttcggacagaaaggctacagggcgtggtcccagctcttgtgtaagaattccaaccgcacagccctgcactttggctgtgtgtgatgaaaaagggttgggatgaattagggagacctagtgtgagagcagcttctacggctgtttttaaggaatggaaaggagtggcaaaaggatttaggatctgtggggtcagctaggtttgcttttgtgagtttatataatggtttagtcaggatggtaaaactaggtatccaaaggtggaagtacctaaccatcccttgaaaggaaaggagttgttgctttgtagaagggattggggttcgggagattagccggacatgatcagcagggagagcacgtgtgttttcatgagaactatgccaagataggtaatggatgaggaagaaatttgggcttgactgaagtaatgggggctgtccgtgaagccttgcggcagtacagcctaggtagtttgctgagcctgatgggtgtcagggacagtccaagtgaaagcgaagagaggctgagatgaagggtgcaaatgaatagtaaagaaagcatgtttgaaatccagaagagaatgatgggttgtggaggggttgtggagggaggtattgaggaggagagtatatgagtttggcaccacggggtggataggcaaaacaatttggctgacaaggcacagatcctgaactaattgtaagacttgtctggtttttgaacaggtaaaatgggggaattgtaaggagagtttataggctttaaaaggccatgctgtaacaggcgagtgataacaggctttaatccttttaaagcctgctgggggatgggatattgacattgagcacggtaagggtgattaggttttaatgggatggtaaggggtgcatgatcagtcgccaaggagggaatagaggtgtcctatacttgaggattaaggtggggagatacaaggggaggatgtgaaggaggctttgaactgggggaaaaggtggcaatgaggtgtggctgtagcctaggaatagtcagggaagcagataatttaaagtgtctcggcctaataagggaactgcgcaggtggggataactgaaaaggagtgcataaaagagtattgtccaagttggcctcagagttggggagttttgagaggtttagaagcctggccatcaatacccacaacagttatggaggcaaaggaaacaggcctttgaaaagaaggtaatgtggagttggtagcctccgtattgattaagaaggggacggacttaccctccactgtaagagttacccaaagcatctgtgatggtccaggaagcttccaaggcgattgggcagtgtcagtcttcagctgctaagccgagaagatttgggaaggagtcagtcaggcagccttgggccagagttccaggggctctgggagtggctgccaggtgagttggacagtccgatttccagtggggttccacacagatgggacaaggcttaggaagaatcctgggctgtgggcattccttggcccagtggccagatttctggcacttgaagcaagatcctgatggagaaggtcctgtaggaatgcttgactgctgcagcttaggcattttgaagttcttgtgtactggagatgtggctggggtttctctcacagtggaggcaaggaactacaactcagaaatacattgctacttggctgcctttactctattattgtacaccttgaaggcgaggttaattaagtcctgttatggggtttgagggccggaatttaatttttggagttttatttaatgttgggagtggattgggtaataaaatgtatattgagaataagactgccttttgaccttttagggtctagggctgtaaagcgtctcagggttgctgcccaacgagccatgaactgggctgggtttttatatttgatgaaaaagagcctaaatactaactgatttggcagaggtcggataaaggaaaaggagcgttaaccttgactatgcctttagctccagccacctctttaagaggaaattgttgggcaggttggggagggctagtcgcagaacaaaactgtaagccggactgggtgtggggagaggaggtgatagaaggattatagggtggaggagcagaagctgagaaagaattggagtctgattcagcctggtggggagtgacctgaggagcattctggggattaggtgagaggtcagatgggtcggtagaaaaggaagattggaagattgaaaagacgcagcgacgcttggggttgggactgaggggacaggcgggagggaaagaaggaggatttgggatgagtcgcattgggaacagagactagggagggaccgatgtgtaaaagaatgcctggacatcaggcacctcagactgtttgcccattttacaacaagaattatctagatcttgtaggatggaaaaatcgaaagtgccgttttctggctatttggaaccattgttgagtttgtattggggttaagcggcattgcaaagaaaataaggcatttaggttttaggtcaggtgtgagttgaagaggttttaagttcttgagaacacaggctaagagagaagaaggaggaatggagggtggaatgttgcccacagtgaaggaggcaagcccagagaaaagagagggtagagacacggagagaaggggtggggggtgctttgccccccaggaaagtggagagaaaagagagggtagagacacagagagaaggagtcgggggtgcttgtcccccaggaacgtggagagaaaagagagggtagaaacatggagagaaggggtggggggtacttgccccccaaaaagtggtgtttgccactaagggtgaaagatcaaggcaggcatcctcgcggtgatcagacaactctgaaacgtgggtgaataatcaagcaggcgtccccgcagtgattaaacaccaagggaagactgtcttcctgagtccgtgatcggcgccggagttttgggttcacagataaaatgcatttcctgtctctaccagaaaaggaaaggaaccgaaattaagagaagggagagattgaaagatggcaccaagattgaaaggagaaagaggttgagggatagtgagagaggttggagaagagagtaaaaagaggccgcttacctgatttaaaattggtgagatgttcctcaggctggttggtctgaggacccgaggtcattaggtggatctttatcatgaagcaaagagcaggaggacaggggattgatcttccaagggtggtcccccgatccgagtcatggcaccaaatttcacgcacgtccatgtgaagagaccacccaacaggctttgtgtgagcaataaagctttttaatcacctggttgcaggccggctgagtctgaaaaaagagtcaacgaaaggagataggggtggggccattttataggatttgggtaggtagtggacaattacagtcaaaggggggtgttccttggtgggcaggggcgggggacacaaggtgctcagtgggggagcttttgagccaggatgagccaggagaaggaatttcacaaggtaatgtcatcagttaaggcaggaacaggccattttcacttcttttgtgattcttcaattacttcaggccatctggatatatacgtgcaggtcacaggggatatgatggtttagcttgggctcagaggcctgacaaggatgttactcaggttactagttcctgcaactggatggatgatggtgttattcagtgtaattggaaataaagatgttacaagcaaatttgtggaaaattaatgttgagcccagctttggacatattgagattgtaaactctgagggacatattaccctattaggtagctggatattacgatttgggttccaggagagagattagggaattattaacatatgtatgttaattaaagccacagaagtgaagataactcagggaggaggtataaaatgagttcagacactgcacaagtctgaaccctgaagacaccaacattagaagtgaccagagaacagtggaaagtgtttcaaggtacccaagaggtgaactaaaggctgaaagaaaacaatgtaatttcaagaaggagggagtggtcagtagtttcaatgcccattaaggtcaaatcaaacaaggaaaaaaatcatgaccattggttgacaaagaagagctcaattcctttctactctattccccacctcctgccctgggagataaattctggcaaagtaaggagaacaggagctagattatttctttcccagcattctgttgtggatgatttaaaacatacagaaaaatgaaatgaataatacaatgaacacatgtatatcatccatctagattcaactgtcattgacatcgtaccttatttgctttatctaaccatctattcgtatactttttttggttgaaccatgttaagttgcagagatcatgacccttcaaccccacattctaagtcgacatctaaagccagattaaaatgaataaaggagcacacaggtggtaagtagataaaacagtgaatggaaattttgctttcaagaaatttgactgtaaaagagaaagctgctggaggagaacctcactcagttcaaggaagtttgtctattttgttattttgggtttttttttttgtttcttaaaatgtatgactccatatttttgtttattattaatattaggcgggagagcctagagcaagtttaactgctgatgggaaggagcgattggtgggagagaggctgaagggaagaaaggaagtacagaacactgagtgatgggaggggaggcttactgagctgggtgggaggactagcctgggagcagggaggaccaactctgcccagagggaagagggcaggaggagaggagagtataaatgcagatggagactgggtacagtggctcatgcctgtaatcccagcactttgggaggctgaggcgggcaggtcacttgaaatcaagagttcaagactaacctggccaacatgtcaaaaccccgtctctactaaaaatacaaaaattagccagttgtggtaacgcatgtctataatcccagctactcaggaggctgaggcaggagaatcacatgaacccgggaggtggagattacagtgagccgagatggcaccactgcactccagcctgggcaacggagtgagactccatctctaaataaataaataagtaaataaatgcagatggatgggagtctggggcagggggctgcaggggatttcatctaaagactttccctttttcgggaaccaggtggtgaagccataagggcaaggctgggaatggggacttgagggtcaaaggggtttcaaatacaatgaagaaagccaaccaggccaggcgcggtggctcacgcctgtaatcctagcactttgggaggctgaggcaggcatatcacctaaggttgggagtttgagaccagcctgaccaacatggagaaaccccgtctctactaaaaatacaaaaattagccaggtgtggtggtgtatgcctgtaatcccagctacttgggaggctgaggcaggagaattgcttgaacccaggagacggaggttgcagtgagccgagatcacgccattacactccagcctgggcaataagagtgaaactccatctgaaaaaaaaaaaaaaaaaagccacccaccactggcaggccagtggcattggagaccagtgggacaagagggccaaggatgtgagagcagttggagggatagacacaggggttgcgggggagggtgctaggaggaagtagagataagagaaggttgatgggaaggaataaatcaagtattggctctggaaaggcaggtgaggattaagatgcctagggtcagtgagaagagggtatatgagatttctcaggaggctgcagtctaattgtggcagtgggattggagctgaagagggcatctctcacctctctatcaactccactgaccatctagtcccttgcccagagactaggggtaggcttggtctcctgtccctgcccttctttccctctagaggccttgtctctgagcagtgaagaggaaaccggagcatccctccctgccagtgtccggttaccaagttttgggggcgggccatctggtgactgtgacaggagccccagcgccctggccagctcagtccattcctggagaagaacctgatgcagcgattcctgcagctcccgggggccgtggtgaggcctggggtcagaggggcctgcggagctgatcaagaggctgctagccctgtgctggctcccgaaggtgggcccccactccggtaccaggccttggagcctgaggagcttcggtggctgcaggcccaggaggaagacacgaccccagaagcatctctggaaggaccttgcccagaggccagccagagccagagccagccactacggtatagaggaacccacaggaaccccctacccacacagccaggaaggccagggatgggcagttgcactctcagcccagacctcttccggtcccacctcctctgatggaggcttaggctggcatttagggtccaggctgggcggagaaggtggtcaggggcaccgtatgggggctgagggtatgagtgaggagagatgaggggcttaactccctggaggctctgaggggaggaggatagtaaaatatttgagggttgaggtcccaccttgacctctttctccccacaggcccccactggagtgggctctggacgaggtttggggacaggatacagcacagacagggtttggccagccactgcctgccagtggactggaacttaggtggtaagaggtgacagcgaggtgtatatcaagggaggtgagcatgactgacccccagtgccatgccaggccccctggctggctccagccacccccagaagagtcccttaggctaggtcagactaggggtcaggtcagagtgagtgcagcagcgtaaggggatctgactatgggagataatgtttcatggccttagggtgttgtgccttagtccctgcctctgcctcttgggaacagaagttggtgggagtgaggacgagaggcccagggcggtctcacctcaggtggtggctgcggtctgtgtcagtgcatattctgtgtcagtgcatattcgacagtcaatcttacctgtgctggctgctttaggcccagtggtcctgccccctttcattccccttctcctgcaggggcctggaatgtactcactaggctgggtggggaggatgccctggggtgtgtgcatttgacaggcgcatgtggcatttgtgggtgtggtgaggaagggaatacccagagttaaaggagattgggcaaacttggccctccttccacggaagcccagggaaaagccatcccagggtgactcctcagaagatcagaggacccttggggctggatatatttgatcttagaagcctacatttatcatcaaaaatctcaactaggagtccactgaccattttggtgaatgagactggagaggccaagtttggtccaagttatctgtgtattagatgtgatgcggcatgtgtgtgtgtgtgtagggggacgtgtgtggggtgtgtgtgtctctatgagggtgtgggggagcggggagaggtcttgtgatatatgtctgtaggggacatgtatgggatatgtgtgtctataagagggtgtgggagagtggggagaggtctcctggtggtatatgtctggggggtttgtaggtgtgtaggtgagttgtgtgggtggtttatgtgtgtagagtttttctgtgggaggtgtctgtatgtgggggagtgtgtttctctgggcgttgtgtaggcaggattttgtgggtgtgcgtgggtttatgtatggattctactagtgtctgcgggacctgtaggtatgtttgtatgagctgtccgtgaggtgtaggtatgtcgggggacatgggagtgtctgaggtatatgtgggtggtatcaatgtgtagttgtctgtggggtgtgcgtatgaaggatcctgacgtggagtgttgtgcattcatatctcagggaagctggtgcccagctctgtcatttttcctaggccctcggtgctgcccacgcctacccagctcaatggtctgtacctatgaccatgcccctggtgtcctgagctcagcctcctacccactaagaaactcaacagtctggtctgtgtttggcagggtaagagggtgattgtcttctggccctggcctgaccctggaagagtagaaggtgtcctctgatttggggggcatccccccaggtgagggagtttcagataacatgatggggctggatattttcttctgtcctcacatgacagatagcgagggcctcagataatgctggaaggcatcatctttctattttgctttccatcaaaaatctctttgggaaagacagtttctaacattcttgggatagtgacttcttagtgcccctcttcttgtctgacgtcaggtactcacgcatttctgcagccctgtgactaagttgcgtgttctgtctggttcttctcttcctctcagcattcatcacttgtttctcagcattagcagcagtcatttgccactttatgattgttatcatgctctttcctctcctaacagtgctatccccaatttctgattttctgtcatttctaaatgttgcatgtctgtgactaactttgcacacattgattttttttttattttttatttttgagatggagtctcgttctgttgcccaggctggagtgcagtggcgcgatcttggctcactgcaagctccacctcctgggttcacgccattctcctgcctcagcctactgagtagctaggactacagacgcccgccaccacacccggctaattttttttaaattttttagtagagacggggtttcaccatgttagccaggatggtctcgatctcctggccttgtgatccgcctgccttggcctcccaaagtgctgggattacaggcgtgagccaccgtgcccggcctgatttttaatttttatcactgtgatatttctcaagctgggttcttgtgcctgggtcaaagctgtgggttatcagagtgtcatctgggaaattagtgtgtgtgagtccccacacacagctgctcaccacattttggaattgtcttggcaacatatgagtgcatcagtttcacacaattctatcagctatatatagacacatttttttcatgggtttattaacaattctctgatcacttcgtgatcaccagttctgcatcctctgagtatggttagccacattgttcactgcacaagggcatctggccaaggaataccagcccatgctccacacacagaatggggagcaacagctcagggctgtgtctatctgtaggggcatgcagattgaaaatgggcttgtagcagccctgacagtgaatgctgcaaagagaccttatacatgtatatcagttccttttttaaatttttttgagatggagtctcactctgtcacccaggctggagtgcagtggcgcgatctcggctcactgcaatctccgcctcctgggttcaagcgattctcgttcctcagcctcctgagtagctgggattacaggtgtgtgccaccatgcccggctaatttttgtaattttagtagggatggggtttcaccatgttggccaggctaatctcgaactcctgaccttaagtgatctgcccaccttggcctccaaaagtgctggaattacaagcgtgagccaccacacctggcctctatttcgaatattaaactttaatttaccatatcccaaatatttttccttttgttgctattatgggctgaattgtgtccctccaaaatgcatatgttgaagttctagcccccagtacctcagaatgttacctttgaggtgattaagttaaaatgaggttattaaggggggccctaatccaatatgactgatttctttataagaagaggaaatttggatataggcacgcagaaggaagaccatgtgaagacagagaagatggttgtaagagacagaaaaacccaaagtgtgtttctcctactctcatacacaccgctcaccagagagtgcttcacctctggccacaaaaatgggtggagatttctccccaccaacaacctgttctccagcagacactaactgggtgttctctaattcaagtcaatctagtgttagattttttaggttaagggctcagtgccacaagactgctctctgcttcagatgccaattccaagtggtaagttgtcagctatacttctgaccaactggctataaatcaggggttcccatgccaccctccttgggttcaactctgtgagtggctcacagaactcagggaaactttagttatatttacccatttattataaagggtagagacaaacaccagatgaagagatgcatagggagaggtatggaaggaggggtgcagagctcccatgccctctccaggcaccacaccctccaggcaccttcacatgttccacagtctggaagctctcgaaaccctatcctcttgggtttttatgaaggcttcatgattgatcgcatctttggccatgtgatcaactcaaccatcagccccactccccattccccagaggtcaaatagtgggattgaaagtttcaaccctcagctgggcacagcagctcacgcctataatcccagcacttttggaggccaaggcgggtggatcacttgaggtcaggagttcgagaccagcctgaccaacatgatgaaacccatctctattaaaaatacaaaaatttgccaggtgtggtggtgggcaactgtagtcccagctatttggaaggctgaggcaggagaattgcttcaacccagaaggtggaggctgcagtgagccgagattgcctcactgcaccactccagcctgggcgacagagcaagactcagtgtcaaaaaaaaaaaaaaaaaaagaaagaaagaaaaaaagttccaaccatctgataacaaaagatgcttctatcacccaggaaattccaagggatttccatgtcagttgttcctctcactcaggaagttataaaggtcttaggatctctgcgtgaggaactgggtggaagaccaaatattagaacagaagttctcctagcatccctattgtcaagagttttaggagctctgtctcagaaatggggtatagagaccaaatatatatttctttacaatatcacaagaatcatctacaagccaaagaaagaggctatagaagaaaccaaccctgctgacactttaatctcagccttccagcctccagaactgtgagcaaataaatttatgttgtttaagccaccatctgtagtacttcttgtttttttttttttttagagacaggttcttgctctgttgcctaggctggagtgcagtagcacaatcatagctcactgcagcctccaacatcttggtgcaagcgatcctcccacttcagcctcctgagtagctgtgactacaggcatgtgccaccatgcctggctaattttttttatttttgtagaaacaggatctgactatgttgtccaggctggtcccaactcctgagctcaagcaatccttctgcctcagtctcccaaagtgctgggattacaagtgtgagccaccatgcctggcctgtggttctttgttatggtggttctaggaagctagtatagttgccttatttttctcataaatttagtttttagataccaaagtttaaaaattaaacctaggcctggcacagtggctcacacttgtaatcccagcactttgggaggccgaaggaggcaaatcacttgagtccaggagtttgagaccagcctggtcaacatggcgaaaccccaactctactaaaaatacaaaaaatttgccaggcatggtggtgcacacctgtaatctcagctatttaggaggctgaggcatgagaatcacttgaacccaggaggttgaggctgcagtgagccgagattgcgccactgcactccagcctgggcaacagagcgagacttcgtctcaaacagaaaaacgaaaaaaaggcctgggcgcagtggctcacacctgtaatcccagcactttgggaggctgaggtgggcggatcaactgaggtcgggagtttgagaccagcctgaccaacatggagaaacctcatctctactaaaaatacaaaaattagctgggcatggtggcgcatgcctgtaatcccagctattctggaggctgaggcaggagaattgcttgaacccaggaggtggaggttgcagtgagctgagatggcaccattgcactccagcctgggcaacaagaacgaaactctgtctcaaaaaacaaaaacgtaccaattaaacctagccatattgttgctgctaataattttatgaccttaataaaatcttcccttccttcttttgtatttaaaaataattaactgttaagcaaatgcgggatttattttggggtgaaatatgtatacaagttaaattatttgctgctggccaggtgtggtggctcacacctgtaatctcagcgctttgggaggatgaggcgggaagatcacttgaggtcaggagtttgagaccagcctgaccaacatggtgaaaccctgtctctactaaaaatacaaaaattacccgagcgtggtggtgcatgcctgtaatcccagctacttgggaggctgaggcaggagaatcacttgaacccaggaggcagaggtttcagtgacccgagatcgtgccattgcactccagcctgggcaatgagagcaaaattccatctaaaaaaaaaaaaagtgctgcaaagcagttgtcccaatagcatttatttaagtggggcgggggcgggggggtgggggcggggggagattcttattggttcgtaatttatcaagttagaccttttatgaaattccccccatgacctttgaccttctgtttttaacctggtaccaaacagcttttatcatcgtctcgtggtgtttatgttttgaagtccaatagggtgagttgtctatgattgtttccttcttttcccaaaaatattctttggagttcttacctactgattttttttttccagatgaattttgctgtcacttaagtttgacaaaatgttccctttgaaatttcaaatttttgaaatgaagtatgagatctaaaaaaaaaaagaaacctgtgtattggctcagcattacccttattcctctcagccaagtgcaagggatcacttactcaaatctttattcatcccactagagtttaatgacttccttgaatggctgttcaatgttcagtgacaggtctggcttttgttgtgaggccatctatggagtctctgggacccttccagtccctggaatcagtttggtctgagaggtcaggacttggaaacatactggaggcagggcaagggcaccctgctcttgttttggcatctacctcttttccgctggtccttcttatccatccaactagtccttttccctgagccaggtccatactttcccaccccaaacccttcctcttgtttcctggctctctgtttctggctacattcatttcctacactcctgtatcaaaagtaccacaattgcttctcgttcccacagtgcagtgcggctgagcgcctcagagcccgcggggacgctgcggggggattgcggggagggggcgttgggaggtgccgatgttgggctgggcggatgagcgcatctgcgtggtgagccttccaacgtgcgcgagaaggacgtggaagaccttttctacaagtacggccggatccgcaagatcaagcttaagaatgggcactgccttgtgcccttcgccttggtgcgctttgaggacccccgagatgcagaggatgctatttatggaagaaatagttatgattatggccagtgtcggcttcgtgtggagttctccaggacttacgaagtcggggtgggtggccccgtggtgggaggaatgggccttctgcaagaagatctgatttccgagttcttgtttcaggacttcctcaggcagctggcaggacctgaaggatcacatgcgagaagttggggatgtctgttatgccgatgtgcagaaggacggtgtggggatggttgagtatctcagaaaagaagacatggaatatgccctgcataaattggatgacactaaattccactctcatgatagtgaaacttcctacatctgagtttatcctgagagaagcaccagctatggctactcacagtctcggtttgggtcaaggggccgtgactctccatactaaagccggggttccccacaccacttctctcctttcaggccctactgagacaggtgatgggaattttttctttattttttaggttaactgagctgctttgtgctcagaatctgcattccagattgaggatttagcgtcttaggaaattattttaattttttttttttaaagaagaaaaaaaaactacatactttctaccagggccatattagcagtgaaacattttaaactgcagaaattgtggttttggttcagaaacaagttgtatatttttcactcctgaatatgggtaaaaaatcagttccgtctttgtgggttgctctgctatggagatcaacagttactgtgactgagttggcccattctgcttaaaaatatgttttaaacgtttaagaaaaatgctcatcatcactggccatcagagaaatgcaaatcaaaaccacaatgaggtaccatctcacaccagttagaatggcaatcattaaaagtcaggaaacaacaggtgctggagaggatgtggagaaatagaaacatttttacactgttggtgggagtgtaaactagttcacccattgtggaagacagtgtggcgattcctcaaggatctagaactagaaataccatttgacccagtgatcccgttattgggtatatacccaaaggattgtaaatcattctactataaagacacatgcacacgtatgtttattgcagcactgttcacaatagcaaagacttggaaccaacccaaatgtccatcagtgatagactggattaagaacatgtggcatggctgggtgcggtggctcatgcctgtaatcccagcgtggctcatgcctgtaatcccagcactttgggaggccaagacgggtagatcacgaggtcaggagatcgagaccatcctggctaacacggtgaaaccccgtctctactaaaaatacaaacaattagctgggcgtggtggtggcgggtacctgtagtcccagctactcggtaggctgaggcaggagaatggcatgaacccaggaggtggagcttgcagtgagccgagattgcgccactgcactccagcctgggcgacagagcgagactccatctcacaaaaaaaaaaaaaaaaaaaaaaaaaaagaagaagaaaatgtggcacatatacaccatggaatactatgcaaccataaaaaaggatgagttcgtgtcctttgtagggacatggatgaagctggaaaccatcattctgagcaaactactgcaaggacagaaaaccaaacactgcaggttctcactcataggtgggaattgaacaatgagaacacttgaacacggggtggggaacatcacacactggggcctgttgtggcgttgggggaggagggagggatagcattaggaggaatacctaatgtaaatgacgaattaatgggtgcagcacaccaacatggcacatgtatacatatgtaacaaagctgcacgttgtgcacatgtaccctagaacttaaaagtataattaaaaaaaaaaagtttagtaattgaaaaaaaaaagtacaacaattgggttggttggaacagcagaaatgaattgtctcacagctctggaggccaaaagtctgaactcaaggtgtcggcaggaccatgctccctctgaaacccatagggaaatccttctttgccccttctagcttctggttgtttgctggcagtctctggcattccctggcttgtagacgcatctttccaatcgtctgccttcacatggtagtctccctgtgtctgtctctttaagtggctgtcttttgttttttgtgtttttttaatttcaatttaatctattttttgtagacacattgtttcaccatgttgccaggctggtctcgaactccagggctcaagtgatcctcccgtctcagcttcccaaagtgctgggattacaggcgtgagccgccacacccagcccacatggctgtcttcttatgggaaaccagacatgggattagagacccactctattagagtaggattgcatttaactaattacatctgcaacaactctatttccaaataaggttacattctgaggtactaggggttaagacttaaatatatcctttttaggaaggacacagttcaacccacaatattagctggccacatgtttcccctgatctgtactttacttgttccccctggctctggtccctcctcgggtcaggtcctgcctgagcctcccctggccatgtcccttctttgtgcctggaccctcctgattaataccccatccccacccttgtgccctcagctgacttcttgtacctcccaccaggcatgatgacctgaaggagatgctggacaccaacaaggattctctcaagctggaggccatgaagaggattgtggcggtaagaggggaaggaggaggcctccctccgggcggggcctgggtggccaagagcagctctccttagctccttgtagaccttccctctagttagtgctgtgcctctcgctttgtccctcttcccctaccttgaccccaccacccagatgattgcccgaggaaagaatgcttcagacctgtttcccgcggtggtgaagaacgtggcctgtaagaacatagaggtgagcactacctggtgagggattgcttgtccccacctcccccaggaccacactcaagcttggggtgaggaaggaaatgatttagcccctgggggcccgacctgctgagaaatgtctctgagccaggagaagacactgtctccatgtccctgaactggatgtggatcaaggtaaaggacccggatacactcaggggtgctctcccccactgggagagtttgtccccatggaccgcagctggctggggagatgacatcccaggggtaggggggtgggcacaggtgcctgctgagaagcgttctgctgagaaacgtgctctccccaaggtgaagaagcttgtctatgtgtacctggtacgctacgctgaggagcagcaagacctggccctgctgtccatctccaccttccaacgtggcctaaaggtcaggggtctcagtttgcctcccagggcctgggcctcgttggcgctgtatcggaggagtaggcctggggagaggccatgagcatgggagcgggctctgcagaccccttcctacctgcctaaaattgggagggtcacagtcagaagaggccagccagaccctcagagagtggaagctgggctcagaaggggcgtaagagatgaagtgggtacccagggcccctgtctctcttcccaggagcctgtggtaatggctgcttctagtatgaaccacttgagcccccggagagtggagagtctctagcaatggagaacccctcaaccctcacccccctttgtgtaaaggtgtgaattgtggtccacagccaggtagatttcaacctttagcagtggcctgaatcccccacaccattctcaccttttgtttcattttgcccaaggcctctagttggatttacatatgttaggtgcatgtataagtctcccccctaagggcttttctggttagtctaagacatcttgagggtaaagacagccatttcaaggccattctctccatattggatttttcagctctgattacaaccattaactcctctatttttgcatacctttatttatttatttatttatgagacaggttctcactgtgttgcccaggctggagtgcagtggtgcaatcatggctcactggagcctcgacttccctgagctcaggtgattctcccacctctgtctcctgagtagctgcgactactcagcctgcatcaccatgctcggctaatttttttgtagtttttgtagagatggggtttcaccctgttgcctatgctggtcttggactcctgggctcaagtggcctcagcttcccaaagtgctgggattacagggatgagctaatactcctagcctggatacttttagttcaaatttctgtgagagagattgtgaaaggtccagctcatcttttcatatccagaagttctgtaggttgctgggtagacaggattgctgctcaaatccagggcccaccccttgtccaatctgctatggccagcaagaggggttgacagtcggcttctttggggtgagagtagaaagcatggtcacttgaatatacaattcattcatttagtaaatacttgggtgtctctatgccacacattgtgctagatttctttttataagtcaaaaccatggaatccgtcttagattggcaagtaatcttttggtttgagtaagggttaagtataaaaactaatctgaaattgttgtacagattttcacctatagtctctaccaactgaccctgtcccccttttagaaaaccagagctcatttagttcaactcaatgtgataatttctttctgcaaagtgccaaatagtattttaggttttgtaggccttatagtctcaactatgcaactactcaattttgcccttatggtgcaaatgcagccattgacaagtgggcgtggccgtgttccaataaatctatataaaaaacaggcaatagacagattttatccaagggctgtagcatgccagcctttgctctagaacatgtctaacaggtcatcttttctgatagggacctcactccttcataaggcaacttgctccatctcaagacaactaccactatttggggtgttttttaaaccattctcttttgttgaaacctccacaactataatttttaaaaattgatttcaggctgggtgtggtggctcatgcctgtaatcccagcactttgggaggccgaagcaggcaaatcacaaggtcaggagttcaagaccagcctggccaacatggtgaaactccatctctactaaaaatacaaaaaattagcttggcatggtggcgggtgcccataatcccagctactcaggaggctgacgcaggagaatggcttgaacccgggaggcagaggttgcaatgagccgagaacgtgccactgcagtccagcccaggcgacagtgtgagatccatctcaaaaaaaaaaaaaattgatttcaggctgtactgcattatgactgcacctgtgaatagccactgtactccagcctgggcaacatagggagaccctgtatctaaaaaataaaataaaatttactacaggttcacaaaaggcataaagaataatataatgaatatccataagaaatgacacatttctcaaatagccaaagcctcctatatatcttctcttgtttatcattcataggtatgtatttattcctgtgctagtaatttgcatattgttaagcaatataaaatgttttgtaaatggtgtcatcgtactacatatgtattcctttaaaacttgttttcttttttgttgtcactggcttttggtctctcctgcatgttggaaccaatcatttcaatccagccttctcccttctttcaatcctagcccaggctagggccgtgttcactttcttaggagatccctcatggaatcaaacctctgactggcaagcagataatccaggtctccctacatcctgtctttgtacagttggtcccttgaaccccctatgaaaccctactctatttcattttatcagtttagcacagggtccaaaccagggtgattctgaatcttaattatgtccctcctgattttgtgtcttctttcaagatactgataagctatttggaccagggcaaaagactgaggcatagcatgtttccaggttgacactgatctgttaataaaccttctccaagtatatttcaccacgttgtagacccacctgactgtacagacagctggcatttttctatcttgttaggaaggatcttattcaatagcaataaataaataaataaataacacctttcatgtgcaaagggttgtgggtgacacagagataaaacagatgtgaattctgctcttaaaaatgcttggctattaggtgaaacaaaaggcctacctaaaaaatagcaatgcaggaaatgctatgagacttccacaaacatatcactgaaatcaagatactaatatccaccggcctagttaccccatcaaaaaggaaaacacattttttttgataactttctgtgaatctataatcatttcccaaataaaatgctcacacacaaaaaaggaaaacaggtttaagcagatgatgtgactatttgtctctaagaaaacagagactccttccttttcaataaatgtttctaacccatctgtttaaaagtcaattccagaattttgtcaggaattagcatcaattttacctgcaattgtgaggatcttgtcttgtctttttccatttcagaaagtcagggtaatatctacccttctttagtgttctattcccgtcattctctaagagtaatagtacaggcacacctcattgtattgcactttgcagatattgccagatattgcactttttacaaattgagggtttgtggcaaccctacatcaatcaagtctatcagtgccatttttccaacagtatgtgctcacattgtgcctctgtcacattctggtaattctcacaatattccaaactttttaatgattattatatgttatggtgatcagtgatctttgatgttactattgtaattgttttggggtgccacaaaccatgctcagacatgaaagtgaaattaatcaataaatgttgtgtgtgttctgactgttcccccatctccttcaccttgggcctcttcattccctgagacacaacaatattgaaattagatcaattaataaccctacaatggcctctaagtgttcaagtgaaaggaggaaccacacatctctcactttaaatcaaaagctagaaatggttaggcttagtgaggaaggtatgttaaaagctgtgataggctgaaagctaggccacttgctccaaacatttagccaagttgtgaatgcaaagtaaaagttcttgaaggaaattaaaagtgctactccaggctgggcgtggtggctcacacctgtaatcccagcactttgggaggccgaggcaggaggatcacttgagaccaggggttcaagaccgtctctataaaaaatttttttaagttagcctgatgtggtggtacgcacctgtagtcttagctacttgggaggctgaggtgggaggatcacttgaacccagaagtttgaggtgcttctccagtaaacacatgaatgataaagaaagcaagacaggattattgctgatataggaaaatttaagtggtctggatagacgatcaaaccagctaccacattcccttaagccaaagcctaattcataggcaggtcttaaatctctccaattctatgatggctgagagaggtgaggaagctacagaagaaaagacggaagctagtggaggttggttcatgaagtttaagtacagaagccatctccataacaaaaaaatgcaaggtgaagcaaaagtgctgatggagaagctgcagcaagttgtccagaagatctagctaagatcattgatagatgtgactatgttcaacaagagatgctcaatgtaaatgaaacagcctcttactggaagaagatgccatctagcactttcctacctagagagaagtcaatgcctggctttaaaaaacaggctggctcttgttaggggccaatgcagctagtgactttaagttgaggccagtgctcaatgaccattctgaaaatcctggggtccttaagaattatggcagatctcctctgcctgtgctctataaatggaacaacagtgccatgacagcacatctgtttgcagttatggtttactgaattttttaagcccactgttgatacctaccgcttaaagattcctttcataatattactgctcattgacaatgcatttgttcactcaagagctctgatggagaggtacaaggagattaatgatttcatgcctgctaacacaaaatcagttctgcagcctatggatcaatgagtaattttgacttttaagtcttattatttaagaaatacatctcgtaaggctagagctgccatagatagtgattcctctcatggatctggacaaagtaaattgaaaaccttctggaaaggtttatagaaaccttctggaaaggtttaccattatagatgccattaggaacattcatgattcatgggaggaggtcaaaatattaacattaacaggagtttggaagaagttgattctaaactccatggatgactttgaggggttcactacttcagtggaggaagtaactacatatgtggtggaattctacctagaagtagaagtagaattaaaagtggagcctgaagatgtgactgaattgctgcaatctcatgataaaacttgaatggatgaggacttgcttcttatgagtgaacaaagaaagtcctttcttaaaatggaatctgccgggtgcagtggctcacgcctgtaatcccagcattttgggtggccgaggtgggtggatcacgaggtcaggagatcgagaccatcctggctaacacagtgaaaccccgtctctactaaaaacagaaaaattagccaggcatggtggcgggcacctgtagtcccagctactcgggaggctgaggcaggagaatggcgtgaacctgggaggtggagcttgcagtgacccgagatctcgccactgcattccagcctgggcgacagagcgagactccgttacaaaaaaaaaaaaaaaaaaaaaaaaaaaaactcctggtgcagatgctgtgaacattgttgaaatgacaacaaaggatttagaatattacataaacttagttgataaagcagaggcagagtttaagaggactgacttcaattttttttttttttgtagagactggggtctccctatgttgcccaggctggtcttgaactcctaggctcaagcaatcctcctacctcagcctcccaaagtgttgggattacaggcacaagccatcacgcccagcctacattgtttttttaaagacataatgctattgcatgcttagtagactacagtatattgtaaacataactttttttttttttttggagataggatctcactctgttgctcagtctggagtgcagtggcatgaacatatgtagctcacttcagcctccaactccctgggctcaagtgattctcccacttcagcttcccaagcagctgtaactataagcataacttgtatgcaccaggaaacaaaaaatttatgtgactcgttttagtgcgatatttgctttattgttgaggtctagaatcaaacccacaatatctccgaggtatgcctgtaatatatagctgctgctgctgatagtgggaagacagtcctaagccccatgatcacaatacagtgtaaggaatgcttttatacgttctgtataggatgcagtaggaataaagaagaagggcttggggccgggcgtggtggctcacgtctgtaatcccagtactttgggaggccgaggtgggcggatcacttgcggccaggagttcgagaccagcctggccaacacggcgaaacctaatctctactaaaaatacaaaaaattagctgggtgtggtggtgcgcgcctgtagtcccagctacttgggaggctgaggcaggagaatcgcttgaacccaggaggtggaggttgcagtgagccgagattgcaccaccgcactccagcctggcgacagagcgagactccatctcaaaaaaaaaaaaaaaaaaaaaaaggaagggcctacacccctattttgttttaaacactgtggaagaacagcagcttttgcaatgatttctgggagaaaggagtgtaaggttgaactccggaagggagaccagcttgcatctgctgggcggtcacctcaggcattaaaacaggcacctccaaaaaaacccttacaaggaacaggaagtgtttcaggtgtttcagcaattttaggtgttctgaaagtttttcagtgtttctggaagtgaagctacccattgcaacacctgttcaggtgtcagatttctgcaaccagagccaaaattaagtgtcccccagatacccatcactggcacaccatccaggctccagtcaagcggcagggaagcaagagctagtggtcgctggggacagtgacttccaaaggtgtggcctccccccatcagggcacctggtgccctttcatagctctgcctccacctctgcctttaggatcccaaccagctgattcgtgccagtgccctccgtgtcctctctagcatccgtgtgcccatcatagtgcccatcatgatgctagctatcaaggaagccgcctcggacatgtcaccctatgtgcggaaaacagctgcccacgccatccctaaactctacaggtatgccccagccctgtcccacgctccccaggaggctggttcctaagttctcaacccacccctggcctttcctaagtcttgcctgctgcttctcagagggtttgaggagggtagtttgggggactgacagagatggaggagaacaataaggctggggtgcaggaggtgagcatggcttggacagatattgggaaggctggggctgagagtggcaaattcccctcaccgatttctccctcagtttggactctgaccagaaggatcagctgatagaagtcattgagaagcttctggctgacaagaccacggtgcgtgtataggggcgctccgggaggggtggtgaccggcagccggccttccacccttcgcgttcaccctctcgtctttgttctttccccagctggtggcgggcagtgtggtgatggcctttgaggaggtctgcccggagcgcatcgacctgattcacaaaaactaccggaaactctgtaacctgctgatcgacgtggaggagtggggccaggtggtcatcatcagcatgctcacccgctacgcccgcacgcagttcctgagccccacccagaacgtaagtgggcccagcccaggcagagcgggccgaagtgtgtcccggggaggcgcccacagacccgtcggtctccccgtccaggaatccctactagaggagaacgcggaaaaagccttctacggctcagaggaggacgaggccaagggcgcggggtctgaggagacggccgccgcggccgccccctcccgaaagccctatgtcatggaccccgaccaccggctgctgctgcgcaacaccaaacccctgctgcagagccgcagcgccgcggtggtgatggcggtggcgcagctctacttccacctggcgcccaaggcggaagtgggcgtcatcgccaaggcgctggtgcgcctgctgcgcagccacaggtgcgctccgcccccagccccgccccctccctcgcctcctgccccgccccacgggctgcccggctccgccccctcacgcccaccagccgcttccacctctgcccacccgctccacactgaccgtagtcctgccctccgcactggtcctctccccgcaacgacttgccccaccttttcccctcatccgctgacccttgccccaaccgaggggcccggggtgctctgacccgtcctctccgcagtgaggtgcagtacgttgtgctccagaacgtggccaccatgtccatcaagcgccgggtgagcctgcgacggcgggctgtcctcgctgtccgagggccgcttctgcgggcactggaggcgttgtcggggctgggaccggggccggggaaagggaagatggaggaataccctggctgtgcagaggatggggcaggggaggctccaaatacagatagggagcagggcctggatcctgaggggccgctgaggggatgtccagtggaaaaagagctagtcagatctgagatggacgagggaagacttgaggagtggagggcagtggtgaggaggcaaggatcctgggcgctgggtcaggataggaggggtgtctctgggcagcgaggcaggcctggggcttcggtggagctccctagctgcctctcttgtgccagggtatgtttgagccctacctgaagagcttctacatcaggtccaccgaccccacccagattaagatcctgaaggtgagtgagggacagaagtgcatgtgcttcccagccctccccaccccatgtacccactcaaataactcacagtggcccccctggtgcctgcctattcctggggctgagcccaggagcccatgactgccccagctggagctgtttgttcagggagctgggctaaggagggtcagggggagaagggaactgctctttgcctagtacctggtatacacctgctactcttcataaatgaagtaacctgatatcacctcataataatcccaggatgtgtacattatattccttttataaaaatatagactctggccaggcacagtggctcacgcctaatcccagcactttgggaggccgagacaggcagatcgcctgaggtcaggagttcaagaccagcctggccaacatagcaaaacctcgtctcaacgaaaaatacaaaaattagccaggcgtggtggcaggtgcctgtaatcccagctactcgagaggctgaggctagagaattgcctgaacctgggagacagaggttgcagtgagctgagattgtgccattgcactccagcctgggtgacaagagcgaaactccatctcaatctaagaaaaagaaaaaaagactctgggaggtaactgccccaggtcacataattctgctgactccaaggttcacacttttctctcccacccacagtgttatggcccccacacacctgccccctcaggctctcctgcaaacattcacggacaaggaaagtggcgggagcccatacctccatttgattcctgctctgctgcctcattattgagtgatttccttcagcaacagttaatcttcctaacccttgtgaacatccactatgttctaggggtacatgatgagcaaactaatcagggaccctgcctttgtggagcttacagatgtggggaggaggagacattaagcagttaatcacaaggcaaatgtaaaagtccacttacaaaatatggaagaaagtgtggagagctataagggcataaaatagggagacctcatctagtctggtgccagggaagttttcccggaggatatgagacttgagctgaagcctgagagatgaacatgaattatgcagggacagaaatgggaagaactgctccacgcagaggaaacagcatctgcgaagaccctgggttaggaagtggagtgggattggggcctggaagacaagggggacagtgatgggagatgggaggtagacagcaagcagatcattcagggacttacagaccatggtgaatacgatggtctccatcctgaaagcaataggaagctttaagttttcaatgcagtagggaggtgacatggtcatactgtaagcatactgtgtagggaatccacttaagaggcaaactggtcctcttgctttttagacaagtttcataacctgtcaattccctcatcagtgtgaggatgatgcagggctgtcatgaggattgttttctggtctatgaagtgtatttggaatgaaagcacagaaagtccactggccaacccacccattttctgcctctccaaccctccctgcagctggaagtgctgaccaacctggccaatgagaccaacattcctactgtcctacgggaattccaggtacaggccagctcccagccagaagggcctgggagaggggcccatcagatccttgtgccctggtgggtaaacctcctcttatgagcccaaggctggagaaactattatcttacattcccgttccaatgtgtttggctggctttgggccaaggaatcactggattgggggtggagttgtcaccccctttcccaagtcttagtcaccggcatgataagccataaaatgaaaggccacagccttcttgaaggtcaccctcaagcctgcagagtcactgagggatttctttgtcatatcccacagacctatattcgcagcatggacaaggactttgtggcagccacaatccaggccattggacgctgtgcaactaacatcggccgagtccgtgacacctgcctcaatggcctggtgcagctgctgtccaaccgtgatggtcagtgtttccctgagtgtctaaccgtgatgatcagagggtgtctgcctgcaggtctgactctgctggccactggatatccaccagtctgcctagacacaatgtgtatccattggtctgtctgtcttgatcagggcccaagtgttcctacacctctgagggctgctagagaactgaagggggttgagagaaagagccaagggcctggggcactgcaggtgtgtctgtccacctgagtgtggccatctgactgtcttggggtccacacactcatttttgttctgtagagcttgtggttgcagagtcagtggtcgtcattaagaaattgctacagatgcagccagcacaacatggagagatcatcaaacacttggcaaagcttacagacaacatccaggtgagggagaagccatattttcactccccacttcaaggtcctccccatgatttcaagactgtataattacatatgctagccttatcaaaagtaacttccaaaccttaggtcttcaggtggaaggagcagagacactggaccatgtgaccctgaccttgttacccctgatttgctttccctttggagaccctcaatgagcacgatggactttactactactcttgttttctctctaaagctctagccaaccatggttgagtgacaaatcttgtgtttttctatcgcactgctaagctgaaacatctaaacaaggcattcccaaagattctggagagtaacatggaaataaagtactgagggtacaatgaatccagaaaatcaatcttttacatcatgactgacttagggtcttgaaagctctatgctaatgaagccctagggaagaggggaaatgctgtctaggaaatgtctaccttttaacctctctctatctcaccacccccaactcccatttccagagaacccataatacaacaggccagcacagatgaggagtgctgtttccctggaagtccacaatcctacccacccactttcccgtatttacccatcttcactcctctcccacaaccacaggtgcccatggcccgagccagcatcctgtggctcatcggagagtactgtgagcatgtccccaggattgcacctgatgtcttaagaaaaatggccaagtcattcacagcagaggaggatattgtcaagctgcaggtcatcaacctggcagccaagctctacctgaccaactctaaacaggtaaagattaagagatgaccccccagatactctggtccccagaaactccctagacagtattcttttggccctccctaggcagggctgaactctagctcctattttggaaaagaagaatcagggaaggtggctggtctgcccacataaccaatgctaccccagtgcccacaaagaccttgtagtgctggtggtcactgttgaagagactctcctatgaagctgtgacctccagtctgctagtacaagagtcctgtctgccaccttggaactctggggctgtgaagaaccacagttgattgggataagggaagggcccaacagtggcaggtactgatgggagaacatgcatcccagatgtggtctgtgcttctttccaaagcttgacaatgcttggccagtctgtgccaaagataagggggtgagtctctgcttgggcttgggtggtgctggtggccactgtcattcccaaggtgaaaggttataagagatacacagccaaggatgaggctcaactaagttgtagtatcagggtgttcagagcctcctagctgtctggcatctcctgagatggttccaggagattctcctaaaatgaagcataatgtgctgagcttttcaaggtgtcagggacatcaaacaccatgacgatttccacactctcccactcagttaagcaggacagggattggcaaactactgcccataggctgaatttggcctattcctgtttttgtaataaagttttgttggaacacagccctgctcattcatttacaaattacctatggctgcttttgtgctacaacagcagggttaactagttgcaacagactgtattgcccacaaagcctagaatagttattctctggcccttttataaaaagactctgccaatccttgaagcaaaacctctggctaggtggctggggtctacagatttatagcagggatatcccctggagactgtagcatccctgccatgtccactgtgcgtgggagtctttggatggtggcacttatctttttcagtggcttctttgatccattgtggccagagtgagccccagaggctcaaggtgaggtaggcagggccaccaagtgctgtgactgtaatcaggagtcaaaggacagcagcaacatgtggaggcaactgagtctgtataattaaatatgctagccttatcaaaagtaacttccaaaccttaggtcttcaggtggaaggaggagagacactggaccatgtgaccctgagcttgttatcagtgttgtgggcaaagcagattggagagagagaagttagagggggagagagagaagttagagggagaaagagcaccatggggaagcgttcaatcgttgaaaaaatatttgtatacttcctttgttcaggtgggaggaaggagcaagtgggaggaatgtttgaaaagatgaagcagcctgggtggggagccacccaggtaggtgggagtcttgacatgctcagcaatgagccagagtcctaaaccccaggatggtgaggttggcatgttttcataagcctgggcctgtccacatgtcatttcccccaagttgtcactgtgagctacatgtgcatttgttcatttatttaacatatatgtaggtgggagtctgacatgctcagcactgagccagagtcctaaaccccaggatggtgaggttggcatgttttcataagcctgggcctgtccacatgtcatttcccccaagttgttactgtgagctacatgtgcatttgttcatttatttaacatgtaggcctactatttgcctggtactgtgctgcgtcctgaggatatgacaatgagtgagacacatttacaggtctccagatactcacagccaagtaggagaaacaggacaaaaataaacattttaaacacagcagtaacagctgtcatcagggttggcacagcgagctgtgggtatatacagctgaaccctcccctaggaatgacccctgtcagggaacccagagtaggctgttcaggcaaatggacactcacctccagggcgcccttcacctgcaagtgagtttttgcaggccccttagaatggttatttgattcaataaagatttttgtcctccctttctttctcctttcttcccagcctcttctgggagtggtaaagaagggggagtccttggggtactaggagggaggtggtttggatgcgcacatgaccatgcttgcaaaacagtagtgatgcttcccatcctgggaccatgagtggcaatctgcccagctaaaaggccacagtaatctcagtcattctctccaatttggacatgggcccacggcatgccagatcctggcccaggatgaggccaaggaaatgaccaagatgaggcctctgccctgctattgatcagcagataatcagatactagaccagaggccacaaaggcataacatgcaggtggcgggggatgggggggttggtaatcaaagtggctattacatccacctggatatagaccctggggaaactgcctagcaggttagtttgcttttatgtgtcaggtgagatgtgtggcaggagggtctgccaggggcacagtgggatctacaaccctcccatgtgaccgcctttacagtgaatagaagattctgacaaattttgcagaattgcttttaaaaacgtaaactttttttaatatgctaaaggtaatacatgcttatcatagaacatttggaaaactcagaaaattataagtttaaactattaataagtccaccatttagaagaccaccattaattatatatttccttattttttattcctatatatagtcattcagaagttgtacttttgtctattgtccaatattttaaacttttctgcttcttttcaatgctttcatatttaatacttttttttccccattcacatttcaattaaacttttcacttagaattttctccaggctgggttcagtggctcacacctgtaatcccagcactttgggagcccaaggtgggtgggtcatttgaggtcatgaattcaagaccagcctgaccaacatggcaaaaccctgtctctactaaaagtacaaaaaaattagctgggtgtggtggtgcgctgaaatctcagctacttgggaggctgtggcaggagaattgcttgaacccaggaggtggaggttacagtgagctgagatggtaccaccacactccagcctgggccacagagcaagatccatctcaaaaataaataaaaattaaaaagaatttcctccaaatttttttctactttcacatttttaaatcaattgtattagttttctgctacataataaattactataaatttggtggcttcaaacaacacacgtttattttctcagtgtctatgggtcgagaattcaggtatggcttagttggatcttatgcaaggctacaactgaggtgtcagccaaggctgagtttttatctggaggctgtactggggaaaggtccacttccaagtcacatggtgccacgatccacttccttgcagttgtaggattgtggccctggcttcttgctggctgtcagctgggggctgcccttgccttctagaggccgtccttagctcattgccataggggcctcccaacacggatgcttaatttctccaaagccacaagggagaaagtctctagagccagtctgctagcaagaccgtcttctttttattttttaatttttatgggtacatagtaggtgtatatatttatggggtatgtgagatattttgatacaggcatataatgcataacaatcacatcagggaatggggtatccatcctctcaagcatttatcttttgtgttacaaacaatcaaattacactctcttagttatttataaatgtataataaattattgttgactgtagtcaccctgttgtgctgtcaaatactagatcttacacattctatctaactataattttgtacccattaactatccccacttcccccacccactacccttctcagcctctggtaaccattattctactctccaactccatgagctcaattcttttaatttttagccctcacaaataagtgagaacatgtgaagtttgtttttctgtgcttggcttatttcacttaaaataatgacctctagttctatccatgttgttgcaaatgacaggatctcattcttttttattctttttttatagtactgcattgtgcatatgtaccgtattttctttatctatttgtctgttgatagacacttaagttgctttcaaatcttggctatggtgaacagtgctgcaataaacgtaggtgtgcagatataacttcaatatgttgatttccttacttttgggtatatacatagcattgggattgctggatcatatggtagcactatttttagtttttgtttgtttgtttgagatggagtcttgcactgtcacccaggctggagtgcaatggcatgatctcagctcactgcaacctccgcctcccaggttcaaacgattctcctgcctcagcctcctgagtagctgggattacaggcgcccgccaccaagtctggctaattttcatatttttagtagagatggggtttcaccatgttggccaggctggtcttgaactcctggccgcaagtgatctgcccgactcggcctcccaaagtgctgggattacaggcgtgagccactgcacctggcctatttgtagtgtttttttttgagatggtgtttcactcttttttcccaggctggagtgcaatggcgtgatcttgcctcactgcaacctctgcctcctgggtgcaagtgattcttcttctgcctcagcctcccaagtagctgagattacaggtgcctgccaccacgcctagctaattttttgtatttttagtagagacagggtttcaccatgttggccaggatggtcttgatctcttgacctcgcgatccacccacctcggcctcccaaagtgctgggattacaggtgtgagccaccgtgcccggcctatgtttagttttttaaggaacctccaaactgttctccagacatttccactaacagtgtacaagggttgccttttctccatgttcttgtcagcatttgttattgcctatcttttggatataagcctacttggggtgagatgatatatctttttttgttttgttttgttttttgagacggagtcttgctctgtcacccaggctggagtgtgcagtggtgcgatcttggctcactgcaacctctgcctctgtggttcaagtgattctcctgcctcagcctcctgagtagctgggactacaggcgtgcgtcaccacgccccgttaatttctgtacttttagtaaagatggggtttcgctgtgttggtcaggctggtctcaactcctgatctcaggtgatccgcctgcctcagcctcccaaagtactgggattacaggcatgagccacccgtgcctggcctttcattgtagttttgatttgcatttctctgatgctcaatgatgttgatcaccttttcatatacgtgtttgctatctgtatgtcttcttttgagaaatgtctattcagctcttttgcccatttttaaattggattattgaatttttttttcctattgagttatttgatctccttacgtattctggttattaatcccttgtcagatgggtagtttgcaaattttttcctcctattctgtggcttgtctctttgttgattcctttgctgtgcagaacctttgtaacttgatgtgatcccatttgtctacttttgctttggttgcccgtgcttgtggggtatcactcaagaaatctttgcccagtacaatgtcctggagaatttctctaatgttttcttttattagtttcatagtttgaagtgttagatttaagtttttaatccactatgatttgatttttgcatatggtgagagataggggtctggttttattgttctgcatgtggatatcccgttttcccagcgccatttattgaagagactctcctttccctaatgtatgttcttgatacctttgtcaaaaatgaattcacggccaggcgtggtggctcatgcctgtaatcccagcatcttgggaggccgaggctggtggatcacctgaagtcaggagttcaagagcagcctggccagcatggcgaaaccctgtctctactaaaaatacaaaaattagctgagcgtggtggcgggtgcctgtaatcccagctacttgggaggctgaggcaggagaattgcttgaacccgggaggcggaggttgcagtgagccaagatcgcgccactgcactccagcctaggggacaagagcgagacttcatcttcgtccccccccgccaaaaaaaaaaaagccactgatttttttttttttttttttttttggagacggagttttgctcttgttgcccaggctggagtgcaatgggtttttttttttttttttttttgagatggagttctcactctgttgcccaggctctggactgcagtgacgcgatctccactcaccacaacctctgcctcccgggttcaagcaattctcctgcctcagcctcccgagtagctgggattacaggcatgcaccaccatgcccagctaattttgtatttttagtagagacagggtttctccatgttggtcagactggtctcgaactcctgacctcaggtattctgcctgcctcggcctcccaaagtgcttgctaggattacaggtgtgagccactgtgcctggacaatgctactgattttttttttttttgaaacggagtcttgctctgtcaccaggctggagtgcagtggcgccatcttggctcactgcaaccttcacctcccgggttcaagcggttctcctgcctcagcctcctgagtagctcggactacaggtgtgcatcaccacatccagctaatttttgtatttttagtagagacaggatttcatcatgttggccacgatggtctcaatctcttgatctcacgatctgcctgcctcggcctcccaaagtgctgggattacaggcatcagccaccgcacctggccaatgctactgatttttatgtggattttgtatcctgcgactttactgaatttattagttctaatagttttttggtggaatccttaagattttttaaatataagatcatatcatctgcaaacaaggataatttgaattcttttccaatttggataccctttatttctttctcctgtctgattgctctagatagaacttccaatacagagtcttcttaataaaacataatcataggatcatatatagtcatataccacctttgccatatcctgttggttagaagcaagtctcaggttttgcccatacccaaggtgagggattgcacaaaggcatgaacaccaggaggcagctactggtggggaagaccttagaatctgtctgccacatccatctagagcttaaacttactcatgtgtaatgtgtgaattgaggatatatttcaattttttttaacagccagttttctaagcatgattagcaggcatctgcaaggtagcatgtatgttggcataggttatggaaaggaagtcagtgtttcctgcttaaaattcctctctgacaactggagcctgttggtgagggggagccttgttctgttcttggcacactggagtgtatctcagaggccttcttgaacagcctgtaattcctgcacatcctggctagatgaggtgggggtcttggtggtgcacacaggatgccacaatccacagggaatggccccttggggtggagaagggtaatgaattattataggcaaatcctgcagtgttgaggtggtgggccagccccttcctgtgttggttgttaacatgcagttaaggctgtggacagatggatccaaataccaaacagttctttctagaactaggcaaggacttgaaggagggagtctgtgatcagccagctgggaaatctgtggaggaagacattgtccaaaccaaaagagggatcagcagcctcttgataattgactatgttggtaagggcatccactagccctggccatttagatggtgtctggccaagagaggggcaggttggtgatgaaatctgttgtgatggcatcttattttcatatttttaagtctattctattagcggtgcatgggattgggattgcttatctgtgactataacagtatcgcaggtgctgctttgctggaagggactgagctgaagagggcctgtgggccagattggaggtaggaatgtggaatcatagtggctctctagagtggtgtggggcaattctgccaaagcagctgctcagactctgggtcagcatctgaggggctttgccccttatggacatctgcttgatgtccctgccagattagctgggttaaccatgtccaaggctacacgtaacagtatgtcaccataaacctcaggaagaacagagtcagttccaggctccctcctgccggcccctgatgcccttgggcattctgcttgttgaccacttggtggttttgatcttggtcacaagtgatggaaacatggagacctgggccagggcaggctccttatgtcagcaggtaggcagtgaagggaagcagatggggtgcagctccagcagatgcaggcctaggtgcagtactgatgggctccttggcctgggaaaagccccttaatgatcctgcttcttttctgtaaaatgggggcaataatgcctacttctcagaaggcttggggagattagatgagctagtgtggagcacctagcacagagttggtgccagaaggcacttgataagtgatggctgctaccgctgttgccatgttaaggcaggttagattaggccaagatcatggcagaaatggagatattttaggtctgcagttgtagcttccctgactgcagactgtgaaccctacatgaccttggcaaatgcatgggcagctgcagtttgccctgatgtcattagaagcttccagggaaggataaagacctctgagacccctgggctgctcagaatctactaaatgggtggatagggcatgagggtggcccctgccaaagggacccctgtttatctgccctgtctttttgttgtctaattccccctgggtggtggagcctggaaactgtgaggtccagcagagcattccatacttccacataccctgctgccctagagtaaagaggctggacaggcctggagtggtagggaccacaaatctagggaagaatggagtccagagccaggagtggggaaagtccaaaaggaaaacctcttttgttggcccaaggcagttgtcaaagttgggatcatcaggaggcatgtccagagagatgagagaaaattctgagcccagaacaagggcaggtggggagggacagctgggtggaagcgccggtcctaagcagggagaggagacgttctgcctgaaagtgtcggcttaaagaatctgtttctgagcctcctgtgtccccatccccccgtcagctgacccacctcttcctgttcctccagaccaagctgctgacccagtatgtgctgagtctggccaaatatgaccagaactatgatattcgcgaccgggcgcgcttcacccggcagctcatcgtcccttccgagcagggtggggccctcagccgccatgccaagaagctcttcctggcacccaaaccagctccagtcttggagtcatccttcaaaggtgggagctgaaatcaagggtaaccttcctaggggaatggaaaggaactggccagagtctctgccccagaccttcctgaggcccctagccaggcaccaggcttctgtggacagtcctgctccctggctcactccttttgtccctcctgtggcaccaggaattactctttcaccctcccataaccactgccagcatcatctcacctgagggtctgccttcctggccaggatggacttgtgcctcctctcctctcaggctcccttttccatctccctccctgagcagacactaggctttggaatacataccaagatcttaaataccaaggacccaggaaggcagaaagcaaaacaacacacaaaggagaggtgtatatttttataaaggtcctgagaaagcagttgcctgcattctgtgagcttagtcactacagtcagtccaaatcccaggccccagggcttcagccttgcctctgttcctgggcttggcccttaaggcctcttttcccaagacaacggccttgagatgggcctgggagggaagggtcctcccgctgcttctccgggccccaggagtggaagccaggaacctacacagaagagagcctccttcacaaagctcagttcttctgggtatcttttcgttctttttctcttccctggacctcacgaatggggagattctgagggtgggcacagctttgaaattctcccaggaagaaggcaacagtccctttctccccgacaccatcctcactcacaggcctgtgctgccctcctccagcagtgcctcaactctgatccagacttctacacactcatgctctgactgttcatccctccctgctgagtccagagcctgactagacgtgcatgctgagcagacaggtcggcagcatctgtgggcccagagtctcctcctgcccacctctgtaggctgcctttccctggccctcagtccctgctctggcctggccagacagccttttcttccagcatgtgggcctaaaggtgcagtcagggtggaagagccattagggcacacatccatctccttcccctacccacctgggaagtcccaaccagaatcaccacccagccccacctggaaaacagctcccagagctttccctcactgctgctacctgcctgacctctaaacctatccctagaccgggaccacttccagctgggctcactgtcccacctgcttaatgccaaggccacaggctaccaggagctcccagactggccggaggaagccccagacccatctgtgcgcaacgtggaggtcagcggggtggagggttgaagtgtgtgtgtgtgtgtgtgtgtgtgtgtgtgtgtgtgtgtgtgtgtgtgtgtgtgtgttggtgggggcagacagtagggagccctggcagtgccggcccagccctcctaacaccctcccccacacacacaggaagaagatctctcccttattgagactcacgtgggcctgttgggcgaatacactgaggtcccaccttcgtgtgacgtgtgctctctcccctgccctgtctgtgtccctcttcttcccctgtgtgttgtgctcctgggccttcccatactctgtttccaccttggtttggcagtgctcctctgtgagcagcattccctcccctccatggacagtgcccctttcttcctcctctgttattccctttgtgggacagaccaggtagggcctcacaaagaggtggaataaagggtaagggcttgtgcctgcctgccttctccccaaccatgatgaaatgaccctgcaccctacccccatctccaggtacctgaatggaccaagtgctcaaatcgggagaagagaaaggagaaggaaaaacccttctactcggactctgagggggagtcaggccccacggagtccgcagacagtggtgagcagatggcagagctggggtcctctgtgctctgcccatgcatctgtgtgactgactatatgaggggtatatgtatatggttgtgtgtctaggggtgtgcacctgcttgtgaattgtttgtgcacctgagggattcatgttccaggtgtgtgtgcttgtgcaggtttctatccatggagtccatctgtgtttctgtcagttccagctggcatgtagggctgggggcaggtcagagaggtttgagggttcagtactgaatgtgaaggtggaacccaggtgtctgctccagacccaaggaggcctgcatatgagggaggaggcctcatattgttcctccacagaccctgagtctgagagtgaatcggacagtaagagcagcagtgagagcggctctggggagtccagcagtgagtccgacaatgaagaccaggatgaggatgaggagaaagggagaggcagtgagaggtgagaagggagctagccagatggctggtggggttcagggggctttcctggaaagagggctagcattgagctttagccagtctcctaagagcccctgagcccctcgtgagctgggtggggctgtcagctcacatgacgcctactttcgctggctgcaggagatctctgaggcctcatgggctggtgtggagaagcaaccagagtcctagagcctgagctggcacaagctggcttcaagctctcacggggtccctgctataggacctcaggtgtgaaccctcctggctcaggctccccacaccactccagcttttcagcatttctcctgcttctgtgaagcaaggagggagtgtccaggccaggcctgagccaacctttcccactccttcagtgaacagagtgaggaggatggtaagaggaagacaaagaagaaggtgccagagagaaaaggagaagcgtcatcctctgatgagggcagcgattccagcagtagctcatcagagtccgagatgacatcggagtccgaggaggagcagttagaacctgcctcctggagcaggaaaacagtgagagccttggggcagagtcagggtgtgctcatgggccagggccctccccaacctctgggccaggcccagacatctatctccctaccatccagaacagaacatgacatcttctacccaacccagaacatgccaaggtgctccccttccccacacccacatcccatttttctctttcagcctcccagcagcaaaagtgctcctgcaaccaaggagatctccctgcttgatctagaggattgtgagtttgggtggtaaaagtcacaggggaaaggaggcctggggagcatgaattagaacagcccatagggactctggatcgggttcctcaggtcttgtgggagcaggggagcagacagaacatatcttcaggcctgagagggcagcagggctgacctccccaggtctggggttgaggtctaggaatgggtattttgcgagagcctccaggcagccatgtgccccgctgtccatggtgctgaaatgcgtgctccttgatccctaggctccctgctcaacccaagccacctccactttgcctcctcatagtcttatctactcccacagtcacccctcccagtgtccagcctgtgtctcccccagcaattgtgtctaccagtctggctgctgacctggagggcctgacactcacagactccaccctggtaccgtcggtgagtgggatggaggaggggaccgggctggggcagggacacatccctgtgctgcatcctatggtgtggatgtgtgtggggggtgggtgtgatggaggatgtgatagctttgagtcccagctgctggatggccctaggggacaatgctgggacaggctctctccatcttgctcagttctgtccttccctacccctccactctagcttctgagtccagtatcgggtgttgggcggcaggagctgctgcaccgggtagctggcgaggggctggctgtggactacaccttcagccgccaacctttctccggggatccccacatggtgtccgtgcacatccacttctccaacagctctgatacccccatcaagggcctgcatgtgggcactcccaaactgcctgctggcatcagcatccaagaatttcccgaaattggtgcgaagggctttggatggggtggaggaggaggctcctgggcagagtcagtctttctgtggttgctgataccctccttgtgccaggccaggggccaagctataggggcacagagatagcatctaacatgatcaacactctggtggacaagacagatgatgaaataagcaagttcacatcagggcgggaggtgcttgcagcagcagatttgggccttggttgtttcaggactaacttaaatgtggtgagggtgagtgggggaaagggtgcttagagttcaggaggaaaccgggaacagtctccagcagccaagaaagccaagattctgtagagggctggtcagctgtgacagtggagaggagagtagggctaggctgggttctagacctatcaggtgatggtggccctccctctccccttcactgccttataccacttcagagtccctggcacctggagaatctgccactgctgtaatgggcattaatttctgtgactcaacccaggcagccaacttccagctgtggtatgtgcccaactcgaggtgggggtgagaggatgggctggaaagggacagggtaacaatgaactggaaatggaggtggtgcttagtggggatacatcatgattgggtgggtctggaagccatctcaggccctcattcctgacctcactctttcactgcctccaagctgtgcctctacacagggtgggaagtgaggggagagatgacagccttaattcttctccgtttcctcccacccctcccagcacccagacccgacagttctacgtctccattcagccacctgttggggagctgatggcccctgtgttcatgagtgaaaatgagtttaagaaggaacagggtgagtgctccctgggagtgggcagagagggaagtatagaagctgactccagaatgtccagcttggatggtagggagaatggtggtgtccttcatctagaccaggggtcagcaaactttctgtaacgggccaaagataaatgttttaggctttgagaatcatgtggtctctgttgcagttacaacacgactgtggctgttgaaacatagaaacatccacagacagtatgtaaatgaacgagtatggctgtgttccaagaaatttccatttatatttatagatactgaagtttaaatttcatgtaattttcatgtgtcatgaaatattaatcttttgattgctcccccaacacttaaaaaatattaaaaacattgtgggccatataggtggtgggctggatttggtctggaggctgtaatttgcaaaacctctggcctagaagaaagaagagtggcttgggcaagggaggagggaagatcatggttagttttggataagctgattttgaaatgcatttgggaaattcaggaggagctatttagtatgcaactgaaaatatgggtctatgcccaggaaacactttgaagctggagtcatgaacatagaggtggtaatggaagctgtgaatatgaatgagatcactctgggaggtgggagaaaataggaaggccaaggacagaaccttgggggaaaacctgaattctgcagaagaaagaggaggggagggataagagaaggagcacagggagaggtgggaggagaaccaggagagacaacaaggcagaaggtgtctgcaaaccacagttacctaagaccttcagagtcagcatataaaaggctactgccaacctgagggagagagggtcattgctaaaggagggacagaggccaactgcagtgggttgagggagaccacggctcaagtacatgcagtcctctttggaggactttagccatgaatgaggagggagacagggcattggcacgatgaaggatctcacttctggaaaggattttttggagacggggacacttgaacatgaacagattgaaggaacaaaaacaagaaaatgttattagtcatgaatgaaggggatagaagaaacaggagagggatgtcagtttctaaaaggaggtgaagaataggggaagcagtggagggaggaaagaggctgaagagaagactgctggtgtgcaggagagcagacggaggagctcccatggggggcctggatcatgtgagtggagagaagtcagccttgcagaatgaggagttctgggggtgctgtgaaggtttggaggcttcaggagccctggctaggtctggagctgctactgcagaggtacaattaaaaatgtacctgtgaatgctgcatgtgactactggattctggctgagagatcacagcagccacctgtgatctttttgtgagggcttagcttccaggagctgagtgggagttgaatgtgggttggagggccccccaggaaagatcaaagggtgtgaggttcaggatgggcgaacctcttaagaactgactggccactctcaaggggctggtagcccagatgtctgatggaggaagcgccaaatcagtctttggtaacaacatggataaaggcctgggtgggaggggtagagaggctgacaaaggcttcctgagggagggcccagtctgagagggaagtaccttctccccaagactgatgatttaaattctgacctgccctttgcatgataccttcccagcctgggagaacttgttgctcagtaagcagacccaggtgctggcctctgtacccaccatggcctctgccctcatcacgacctctacccccaggaaagctgatgggcatgaatgagatcacagagaaactcatgctgccagacacctgtcggagtgaccacattgtggtgcagaaagtgactgccactgccaacctgggtcgtgttccttgtgggacatctgatgagtacaggtactaggccaccagtagaggggaaatgatgagcatgggggccctggtttgaaggaggagccccagctgctgatccccttccaaacacagtcacccttagcagctcttcctcaccccttctattcccacctcaggtttgcagggaggacactgactggtggaagcctcgttctgctgaccctggatgcccggccagctggagctgcccagctgactgtcaacagcgagaaaatggtgattggcaccatgctggtaaaggatgtgatacaggctctgacccagtgacttccaaatgctgtgacctgtttggctcccatctatacctccccatgacacctaggctgtcagtctctctcatctttctctctctctctcatcatcctcctcatgccagatagcattcagggtgtcctctctccctctggaggaccaagccctcccctaatgccctccccatggattccttagtgatctgtgcagagagagatggcagccactcccttcagtcctcccagatttctgtagctatttatgtagcaggctcaataaaatgtcttctctct

SEQ ID NO: 15424 - DNA, 40621 bp, Homo sapiens
tcagtccattcctggagaagaacctgatgcagcgattcctgcagctcccgggggccgtggtgaggcctggggtcagaggggcctgcggagctgatcaagaggctgctagccctgtgctggctcccgaaggtgggcccccactccggtaccaggccttggagcctgaggagcttcggtggctgcaggcccaggaggaagacacgaccccagaagcatctctggaaggaccttgcccagaggccagccagagccagagccagccactacggtatagaggaacccacaggaaccccctacccacacagccaggaaggccagggatgggcagttgcactctcagcccagacctcttccggtcccacctcctctgatggaggcttaggctggcatttagggtccaggctgggcggagaaggtggtcaggggcaccgtatgggggctgagggtatgagtgaggagagatgaggggcttaactccctggaggctctgaggggaggaggatagtaaaatatttgagggttgaggtcccaccttgacctctttctccccacaggcccccactggagtgggctctggacgaggtttggggacaggatacagcacagacagggtttggccagccactgcctgccagtggactggaacttaggtggtaagaggtgacagcgaggtgtatatcaagggaggtgagcatgactgacccccagtgccatgccaggccccctggctggctccagccacccccagaagagtcccttaggctaggtcagactaggggtcaggtcagagtgagtgcagcagcgtaaggggatctgactatgggagataatgtttcatggccttagggtgttgtgccttagtccctgcctctgcctcttgggaacagaagttggtgggagtgaggacgagaggcccagggcggtctcacctcaggtggtggctgcggtctgtgtcagtgcatattctgtgtcagtgcatattcgacagtcaatcttacctgtgctggctgctttaggcccagtggtcctgccccctttcattccccttctcctgcaggggcctggaatgtactcactaggctgggtggggaggatgccctggggtgtgtgcatttgacaggcgcatgtggcatttgtgggtgtggtgaggaagggaatacccagagttaaaggagattgggcaaacttggccctccttccacggaagcccagggaaaagccatcccagggtgactcctcagaagatcagaggacccttggggctggatatatttgatcttagaagcctacatttatcatcaaaaatctcaactaggagtccactgaccattttggtgaatgagactggagaggccaagtttggtccaagttatctgtgtattagatgtgatgcggcatgtgtgtgtgtgtgtagggggacgtgtgtggggtgtgtgtgtctctatgagggtgtgggggagcggggagaggtcttgtgatatatgtctgtaggggacatgtatgggatatgtgtgtctataagagggtgtgggagagtggggagaggtctcctggtggtatatgtctggggggtttgtaggtgtgtaggtgagttgtgtgggtggtttatgtgtgtagagtttttctgtgggaggtgtctgtatgtgggggagtgtgtttctctgggcgttgtgtaggcaggattttgtgggtgtgcgtgggtttatgtatggattctactagtgtctgcgggacctgtaggtatgtttgtatgagctgtccgtgaggtgtaggtatgtcgggggacatgggagtgtctgaggtatatgtgggtggtatcaatgtgtagttgtctgtggggtgtgcgtatgaaggatcctgacgtggagtgttgtgcattcatatctcagggaagctggtgcccagctctgtcatttttcctaggccctcggtgctgcccacgcctacccagctcaatggtctgtacctatgaccatgcccctggtgtcctgagctcagcctcctacccactaagaaactcaacagtctggtctgtgtttggcagggtaagagggtgattgtcttctggccctggcctgaccctggaagagtagaaggtgtcctctgatttggggggcatccccccaggtgagggagtttcagataacatgatggggctggatattttcttctgtcctcacatgacagatagcgagggcctcagataatgctggaaggcatcatctttctattttgctttccatcaaaaatctctttgggaaagacagtttctaacattcttgggatagtgacttcttagtgcccctcttcttgtctgacgtcaggtactcacgcatttctgcagccctgtgactaagttgcgtgttctgtctggttcttctcttcctctcagcattcatcacttgtttctcagcattagcagcagtcatttgccactttatgattgttatcatgctctttcctctcctaacagtgctatccccaatttctgattttctgtcatttctaaatgttgcatgtctgtgactaactttgcacacattgattttttttttattttttatttttgagatggagtctcgttctgttgcccaggctggagtgcagtggcgcgatcttggctcactgcaagctccacctcctgggttcacgccattctcctgcctcagcctactgagtagctaggactacagacgcccgccaccacacccggctaattttttttaaattttttagtagagacggggtttcaccatgttagccaggatggtctcgatctcctggccttgtgatccgcctgccttggcctcccaaagtgctgggattacaggcgtgagccaccgtgcccggcctgatttttaatttttatcactgtgatatttctcaagctgggttcttgtgcctgggtcaaagctgtgggttatcagagtgtcatctgggaaattagtgtgtgtgagtccccacacacagctgctcaccacattttggaattgtcttggcaacatatgagtgcatcagtttcacacaattctatcagctatatatagacacatttttttcatgggtttattaacaattctctgatcacttcgtgatcaccagttctgcatcctctgagtatggttagccacattgttcactgcacaagggcatctggccaaggaataccagcccatgctccacacacagaatggggagcaacagctcagggctgtgtctatctgtaggggcatgcagattgaaaatgggcttgtagcagccctgacagtgaatgctgcaaagagaccttatacatgtatatcagttccttttttaaatttttttgagatggagtctcactctgtcacccaggctggagtgcagtggcgcgatctcggctcactgcaatctccgcctcctgggttcaagcgattctcgttcctcagcctcctgagtagctgggattacaggtgtgtgccaccatgcccggctaatttttgtaattttagtagggatggggtttcaccatgttggccaggctaatctcgaactcctgaccttaagtgatctgcccaccttggcctccaaaagtgctggaattacaagcgtgagccaccacacctggcctctatttcgaatattaaactttaatttaccatatcccaaatatttttccttttgttgctattatgggctgaattgtgtccctccaaaatgcatatgttgaagttctagcccccagtacctcagaatgttacctttgaggtgattaagttaaaatgaggttattaaggggggccctaatccaatatgactgatttctttataagaagaggaaatttggatataggcacgcagaaggaagaccatgtgaagacagagaagatggttgtaagagacagaaaaacccaaagtgtgtttctcctactctcatacacaccgctcaccagagagtgcttcacctctggccacaaaaatgggtggagatttctccccaccaacaacctgttctccagcagacactaactgggtgttctctaattcaagtcaatctagtgttagattttttaggttaagggctcagtgccacaagactgctctctgcttcagatgccaattccaagtggtaagttgtcagctatacttctgaccaactggctataaatcaggggttcccatgccaccctccttgggttcaactctgtgagtggctcacagaactcagggaaactttagttatatttacccatttattataaagggtagagacaaacaccagatgaagagatgcatagggagaggtatggaaggaggggtgcagagctcccatgccctctccaggcaccacaccctccaggcaccttcacatgttccacagtctggaagctctcgaaaccctatcctcttgggtttttatgaaggcttcatgattgatcgcatctttggccatgtgatcaactcaaccatcagccccactccccattccccagaggtcaaatagtgggattgaaagtttcaaccctcagctgggcacagcagctcacgcctataatcccagcacttttggaggccaaggcgggtggatcacttgaggtcaggagttcgagaccagcctgaccaacatgatgaaacccatctctattaaaaatacaaaaatttgccaggtgtggtggtgggcaactgtagtcccagctatttggaaggctgaggcaggagaattgcttcaacccagaaggtggaggctgcagtgagccgagattgcctcactgcaccactccagcctgggcgacagagcaagactcagtgtcaaaaaaaaaaaaaaaaaaagaaagaaagaaaaaaagttccaaccatctgataacaaaagatgcttctatcacccaggaaattccaagggatttccatgtcagttgttcctctcactcaggaagttataaaggtcttaggatctctgcgtgaggaactgggtggaagaccaaatattagaacagaagttctcctagcatccctattgtcaagagttttaggagctctgtctcagaaatggggtatagagaccaaatatatatttctttacaatatcacaagaatcatctacaagccaaagaaagaggctatagaagaaaccaaccctgctgacactttaatctcagccttccagcctccagaactgtgagcaaataaatttatgttgtttaagccaccatctgtagtacttcttgtttttttttttttttagagacaggttcttgctctgttgcctaggctggagtgcagtagcacaatcatagctcactgcagcctccaacatcttggtgcaagcgatcctcccacttcagcctcctgagtagctgtgactacaggcatgtgccaccatgcctggctaattttttttatttttgtagaaacaggatctgactatgttgtccaggctggtcccaactcctgagctcaagcaatccttctgcctcagtctcccaaagtgctgggattacaagtgtgagccaccatgcctggcctgtggttctttgttatggtggttctaggaagctagtatagttgccttatttttctcataaatttagtttttagataccaaagtttaaaaattaaacctaggcctggcacagtggctcacacttgtaatcccagcactttgggaggccgaaggaggcaaatcacttgagtccaggagtttgagaccagcctggtcaacatggcgaaaccccaactctactaaaaatacaaaaaatttgccaggcatggtggtgcacacctgtaatctcagctatttaggaggctgaggcatgagaatcacttgaacccaggaggttgaggctgcagtgagccgagattgcgccactgcactccagcctgggcaacagagcgagacttcgtctcaaacagaaaaacgaaaaaaaggcctgggcgcagtggctcacacctgtaatcccagcactttgggaggctgaggtgggcggatcaactgaggtcgggagtttgagaccagcctgaccaacatggagaaacctcatctctactaaaaatacaaaaattagctgggcatggtggcgcatgcctgtaatcccagctattctggaggctgaggcaggagaattgcttgaacccaggaggtggaggttgcagtgagctgagatggcaccattgcactccagcctgggcaacaagaacgaaactctgtctcaaaaaacaaaaacgtaccaattaaacctagccatattgttgctgctaataattttatgaccttaataaaatcttcccttccttcttttgtatttaaaaataattaactgttaagcaaatgcgggatttattttggggtgaaatatgtatacaagttaaattatttgctgctggccaggtgtggtggctcacacctgtaatctcagcgctttgggaggatgaggcgggaagatcacttgaggtcaggagtttgagaccagcctgaccaacatggtgaaaccctgtctctactaaaaatacaaaaattacccgagcgtggtggtgcatgcctgtaatcccagctacttgggaggctgaggcaggagaatcacttgaacccaggaggcagaggtttcagtgacccgagatcgtgccattgcactccagcctgggcaatgagagcaaaattccatctaaaaaaaaaaaaagtgctgcaaagcagttgtcccaatagcatttatttaagtggggcgggggcgggggggtgggggcggggggagattcttattggttcgtaatttatcaagttagaccttttatgaaattccccccatgacctttgaccttctgtttttaacctggtaccaaacagcttttatcatcgtctcgtggtgtttatgttttgaagtccaatagggtgagttgtctatgattgtttccttcttttcccaaaaatattctttggagttcttacctactgattttttttttccagatgaattttgctgtcacttaagtttgacaaaatgttccctttgaaatttcaaatttttgaaatgaagtatgagatctaaaaaaaaaaagaaacctgtgtattggctcagcattacccttattcctctcagccaagtgcaagggatcacttactcaaatctttattcatcccactagagtttaatgacttccttgaatggctgttcaatgttcagtgacaggtctggcttttgttgtgaggccatctatggagtctctgggacccttccagtccctggaatcagtttggtctgagaggtcaggacttggaaacatactggaggcagggcaagggcaccctgctcttgttttggcatctacctcttttccgctggtccttcttatccatccaactagtccttttccctgagccaggtccatactttcccaccccaaacccttcctcttgtttcctggctctctgtttctggctacattcatttcctacactcctgtatcaaaagtaccacaattgcttctcgttcccacagtgcagtgcggctgagcgcctcagagcccgcggggacgctgcggggggattgcggggagggggcgttgggaggtgccgatgttgggctgggcggatgagcgcatctgcgtggtgagccttccaacgtgcgcgagaaggacgtggaagaccttttctacaagtacggccggatccgcaagatcaagcttaagaatgggcactgccttgtgcccttcgccttggtgcgctttgaggacccccgagatgcagaggatgctatttatggaagaaatagttatgattatggccagtgtcggcttcgtgtggagttctccaggacttacgaagtcggggtgggtggccccgtggtgggaggaatgggccttctgcaagaagatctgatttccgagttcttgtttcaggacttcctcaggcagctggcaggacctgaaggatcacatgcgagaagttggggatgtctgttatgccgatgtgcagaaggacggtgtggggatggttgagtatctcagaaaagaagacatggaatatgccctgcataaattggatgacactaaattccactctcatgatagtgaaacttcctacatctgagtttatcctgagagaagcaccagctatggctactcacagtctcggtttgggtcaaggggccgtgactctccatactaaagccggggttccccacaccacttctctcctttcaggccctactgagacaggtgatgggaattttttctttattttttaggttaactgagctgctttgtgctcagaatctgcattccagattgaggatttagcgtcttaggaaattattttaattttttttttttaaagaagaaaaaaaaactacatactttctaccagggccatattagcagtgaaacattttaaactgcagaaattgtggttttggttcagaaacaagttgtatatttttcactcctgaatatgggtaaaaaatcagttccgtctttgtgggttgctctgctatggagatcaacagttactgtgactgagttggcccattctgcttaaaaatatgttttaaacgtttaagaaaaatgctcatcatcactggccatcagagaaatgcaaatcaaaaccacaatgaggtaccatctcacaccagttagaatggcaatcattaaaagtcaggaaacaacaggtgctggagaggatgtggagaaatagaaacatttttacactgttggtgggagtgtaaactagttcacccattgtggaagacagtgtggcgattcctcaaggatctagaactagaaataccatttgacccagtgatcccgttattgggtatatacccaaaggattgtaaatcattctactataaagacacatgcacacgtatgtttattgcagcactgttcacaatagcaaagacttggaaccaacccaaatgtccatcagtgatagactggattaagaacatgtggcatggctgggtgcggtggctcatgcctgtaatcccagcgtggctcatgcctgtaatcccagcactttgggaggccaagacgggtagatcacgaggtcaggagatcgagaccatcctggctaacacggtgaaaccccgtctctactaaaaatacaaacaattagctgggcgtggtggtggcgggtacctgtagtcccagctactcggtaggctgaggcaggagaatggcatgaacccaggaggtggagcttgcagtgagccgagattgcgccactgcactccagcctgggcgacagagcgagactccatctcacaaaaaaaaaaaaaaaaaaaaaaaaaaagaagaagaaaatgtggcacatatacaccatggaatactatgcaaccataaaaaaggatgagttcgtgtcctttgtagggacatggatgaagctggaaaccatcattctgagcaaactactgcaaggacagaaaaccaaacactgcaggttctcactcataggtgggaattgaacaatgagaacacttgaacacggggtggggaacatcacacactggggcctgttgtggcgttgggggaggagggagggatagcattaggaggaatacctaatgtaaatgacgaattaatgggtgcagcacaccaacatggcacatgtatacatatgtaacaaagctgcacgttgtgcacatgtaccctagaacttaaaagtataattaaaaaaaaaaagtttagtaattgaaaaaaaaaagtacaacaattgggttggttggaacagcagaaatgaattgtctcacagctctggaggccaaaagtctgaactcaaggtgtcggcaggaccatgctccctctgaaacccatagggaaatccttctttgccccttctagcttctggttgtttgctggcagtctctggcattccctggcttgtagacgcatctttccaatcgtctgccttcacatggtagtctccctgtgtctgtctctttaagtggctgtcttttgttttttgtgtttttttaatttcaatttaatctattttttgtagacacattgtttcaccatgttgccaggctggtctcgaactccagggctcaagtgatcctcccgtctcagcttcccaaagtgctgggattacaggcgtgagccgccacacccagcccacatggctgtcttcttatgggaaaccagacatgggattagagacccactctattagagtaggattgcatttaactaattacatctgcaacaactctatttccaaataaggttacattctgaggtactaggggttaagacttaaatatatcctttttaggaaggacacagttcaacccacaatattagctggccacatgtttcccctgatctgtactttacttgttccccctggctctggtccctcctcgggtcaggtcctgcctgagcctcccctggccatgtcccttctttgtgcctggaccctcctgattaataccccatccccacccttgtgccctcagctgacttcttgtacctcccaccaggcatgatgacctgaaggagatgctggacaccaacaaggattctctcaagctggaggccatgaagaggattgtggcggtaagaggggaaggaggaggcctccctccgggcggggcctgggtggccaagagcagctctccttagctccttgtagaccttccctctagttagtgctgtgcctctcgctttgtccctcttcccctaccttgaccccaccacccagatgattgcccgaggaaagaatgcttcagacctgtttcccgcggtggtgaagaacgtggcctgtaagaacatagaggtgagcactacctggtgagggattgcttgtccccacctcccccaggaccacactcaagcttggggtgaggaaggaaatgatttagcccctgggggcccgacctgctgagaaatgtctctgagccaggagaagacactgtctccatgtccctgaactggatgtggatcaaggtaaaggacccggatacactcaggggtgctctcccccactgggagagtttgtccccatggaccgcagctggctggggagatgacatcccaggggtaggggggtgggcacaggtgcctgctgagaagcgttctgctgagaaacgtgctctccccaaggtgaagaagcttgtctatgtgtacctggtacgctacgctgaggagcagcaagacctggccctgctgtccatctccaccttccaacgtggcctaaaggtcaggggtctcagtttgcctcccagggcctgggcctcgttggcgctgtatcggaggagtaggcctggggagaggccatgagcatgggagcgggctctgcagaccccttcctacctgcctaaaattgggagggtcacagtcagaagaggccagccagaccctcagagagtggaagctgggctcagaaggggcgtaagagatgaagtgggtacccagggcccctgtctctcttcccaggagcctgtggtaatggctgcttctagtatgaaccacttgagcccccggagagtggagagtctctagcaatggagaacccctcaaccctcacccccctttgtgtaaaggtgtgaattgtggtccacagccaggtagatttcaacctttagcagtggcctgaatcccccacaccattctcaccttttgtttcattttgcccaaggcctctagttggatttacatatgttaggtgcatgtataagtctcccccctaagggcttttctggttagtctaagacatcttgagggtaaagacagccatttcaaggccattctctccatattggatttttcagctctgattacaaccattaactcctctatttttgcatacctttatttatttatttatttatgagacaggttctcactgtgttgcccaggctggagtgcagtggtgcaatcatggctcactggagcctcgacttccctgagctcaggtgattctcccacctctgtctcctgagtagctgcgactactcagcctgcatcaccatgctcggctaatttttttgtagtttttgtagagatggggtttcaccctgttgcctatgctggtcttggactcctgggctcaagtggcctcagcttcccaaagtgctgggattacagggatgagctaatactcctagcctggatacttttagttcaaatttctgtgagagagattgtgaaaggtccagctcatcttttcatatccagaagttctgtaggttgctgggtagacaggattgctgctcaaatccagggcccaccccttgtccaatctgctatggccagcaagaggggttgacagtcggcttctttggggtgagagtagaaagcatggtcacttgaatatacaattcattcatttagtaaatacttgggtgtctctatgccacacattgtgctagatttctttttataagtcaaaaccatggaatccgtcttagattggcaagtaatcttttggtttgagtaagggttaagtataaaaactaatctgaaattgttgtacagattttcacctatagtctctaccaactgaccctgtcccccttttagaaaaccagagctcatttagttcaactcaatgtgataatttctttctgcaaagtgccaaatagtattttaggttttgtaggccttatagtctcaactatgcaactactcaattttgcccttatggtgcaaatgcagccattgacaagtgggcgtggccgtgttccaataaatctatataaaaaacaggcaatagacagattttatccaagggctgtagcatgccagcctttgctctagaacatgtctaacaggtcatcttttctgatagggacctcactccttcataaggcaacttgctccatctcaagacaactaccactatttggggtgttttttaaaccattctcttttgttgaaacctccacaactataatttttaaaaattgatttcaggctgggtgtggtggctcatgcctgtaatcccagcactttgggaggccgaagcaggcaaatcacaaggtcaggagttcaagaccagcctggccaacatggtgaaactccatctctactaaaaatacaaaaaattagcttggcatggtggcgggtgcccataatcccagctactcaggaggctgacgcaggagaatggcttgaacccgggaggcagaggttgcaatgagccgagaacgtgccactgcagtccagcccaggcgacagtgtgagatccatctcaaaaaaaaaaaaaattgatttcaggctgtactgcattatgactgcacctgtgaatagccactgtactccagcctgggcaacatagggagaccctgtatctaaaaaataaaataaaatttactacaggttcacaaaaggcataaagaataatataatgaatatccataagaaatgacacatttctcaaatagccaaagcctcctatatatcttctcttgtttatcattcataggtatgtatttattcctgtgctagtaatttgcatattgttaagcaatataaaatgttttgtaaatggtgtcatcgtactacatatgtattcctttaaaacttgttttcttttttgttgtcactggcttttggtctctcctgcatgttggaaccaatcatttcaatccagccttctcccttctttcaatcctagcccaggctagggccgtgttcactttcttaggagatccctcatggaatcaaacctctgactggcaagcagataatccaggtctccctacatcctgtctttgtacagttggtcccttgaaccccctatgaaaccctactctatttcattttatcagtttagcacagggtccaaaccagggtgattctgaatcttaattatgtccctcctgattttgtgtcttctttcaagatactgataagctatttggaccagggcaaaagactgaggcatagcatgtttccaggttgacactgatctgttaataaaccttctccaagtatatttcaccacgttgtagacccacctgactgtacagacagctggcatttttctatcttgttaggaaggatcttattcaatagcaataaataaataaataaataacacctttcatgtgcaaagggttgtgggtgacacagagataaaacagatgtgaattctgctcttaaaaatgcttggctattaggtgaaacaaaaggcctacctaaaaaatagcaatgcaggaaatgctatgagacttccacaaacatatcactgaaatcaagatactaatatccaccggcctagttaccccatcaaaaaggaaaacacattttttttgataactttctgtgaatctataatcatttcccaaataaaatgctcacacacaaaaaaggaaaacaggtttaagcagatgatgtgactatttgtctctaagaaaacagagactccttccttttcaataaatgtttctaacccatctgtttaaaagtcaattccagaattttgtcaggaattagcatcaattttacctgcaattgtgaggatcttgtcttgtctttttccatttcagaaagtcagggtaatatctacccttctttagtgttctattcccgtcattctctaagagtaatagtacaggcacacctcattgtattgcactttgcagatattgccagatattgcactttttacaaattgagggtttgtggcaaccctacatcaatcaagtctatcagtgccatttttccaacagtatgtgctcacattgtgcctctgtcacattctggtaattctcacaatattccaaactttttaatgattattatatgttatggtgatcagtgatctttgatgttactattgtaattgttttggggtgccacaaaccatgctcagacatgaaagtgaaattaatcaataaatgttgtgtgtgttctgactgttcccccatctccttcaccttgggcctcttcattccctgagacacaacaatattgaaattagatcaattaataaccctacaatggcctctaagtgttcaagtgaaaggaggaaccacacatctctcactttaaatcaaaagctagaaatggttaggcttagtgaggaaggtatgttaaaagctgtgataggctgaaagctaggccacttgctccaaacatttagccaagttgtgaatgcaaagtaaaagttcttgaaggaaattaaaagtgctactccaggctgggcgtggtggctcacacctgtaatcccagcactttgggaggccgaggcaggaggatcacttgagaccaggggttcaagaccgtctctataaaaaatttttttaagttagcctgatgtggtggtacgcacctgtagtcttagctacttgggaggctgaggtgggaggatcacttgaacccagaagtttgaggtgcttctccagtaaacacatgaatgataaagaaagcaagacaggattattgctgatataggaaaatttaagtggtctggatagacgatcaaaccagctaccacattcccttaagccaaagcctaattcataggcaggtcttaaatctctccaattctatgatggctgagagaggtgaggaagctacagaagaaaagacggaagctagtggaggttggttcatgaagtttaagtacagaagccatctccataacaaaaaaatgcaaggtgaagcaaaagtgctgatggagaagctgcagcaagttgtccagaagatctagctaagatcattgatagatgtgactatgttcaacaagagatgctcaatgtaaatgaaacagcctcttactggaagaagatgccatctagcactttcctacctagagagaagtcaatgcctggctttaaaaaacaggctggctcttgttaggggccaatgcagctagtgactttaagttgaggccagtgctcaatgaccattctgaaaatcctggggtccttaagaattatggcagatctcctctgcctgtgctctataaatggaacaacagtgccatgacagcacatctgtttgcagttatggtttactgaattttttaagcccactgttgatacctaccgcttaaagattcctttcataatattactgctcattgacaatgcatttgttcactcaagagctctgatggagaggtacaaggagattaatgatttcatgcctgctaacacaaaatcagttctgcagcctatggatcaatgagtaattttgacttttaagtcttattatttaagaaatacatctcgtaaggctagagctgccatagatagtgattcctctcatggatctggacaaagtaaattgaaaaccttctggaaaggtttatagaaaccttctggaaaggtttaccattatagatgccattaggaacattcatgattcatgggaggaggtcaaaatattaacattaacaggagtttggaagaagttgattctaaactccatggatgactttgaggggttcactacttcagtggaggaagtaactacatatgtggtggaattctacctagaagtagaagtagaattaaaagtggagcctgaagatgtgactgaattgctgcaatctcatgataaaacttgaatggatgaggacttgcttcttatgagtgaacaaagaaagtcctttcttaaaatggaatctgccgggtgcagtggctcacgcctgtaatcccagcattttgggtggccgaggtgggtggatcacgaggtcaggagatcgagaccatcctggctaacacagtgaaaccccgtctctactaaaaacagaaaaattagccaggcatggtggcgggcacctgtagtcccagctactcgggaggctgaggcaggagaatggcgtgaacctgggaggtggagcttgcagtgacccgagatctcgccactgcattccagcctgggcgacagagcgagactccgttacaaaaaaaaaaaaaaaaaaaaaaaaaaaaactcctggtgcagatgctgtgaacattgttgaaatgacaacaaaggatttagaatattacataaacttagttgataaagcagaggcagagtttaagaggactgacttcaattttttttttttttgtagagactggggtctccctatgttgcccaggctggtcttgaactcctaggctcaagcaatcctcctacctcagcctcccaaagtgttgggattacaggcacaagccatcacgcccagcctacattgtttttttaaagacataatgctattgcatgcttagtagactacagtatattgtaaacataactttttttttttttttggagataggatctcactctgttgctcagtctggagtgcagtggcatgaacatatgtagctcacttcagcctccaactccctgggctcaagtgattctcccacttcagcttcccaagcagctgtaactataagcataacttgtatgcaccaggaaacaaaaaatttatgtgactcgttttagtgcgatatttgctttattgttgaggtctagaatcaaacccacaatatctccgaggtatgcctgtaatatatagctgctgctgctgatagtgggaagacagtcctaagccccatgatcacaatacagtgtaaggaatgcttttatacgttctgtataggatgcagtaggaataaagaagaagggcttggggccgggcgtggtggctcacgtctgtaatcccagtactttgggaggccgaggtgggcggatcacttgcggccaggagttcgagaccagcctggccaacacggcgaaacctaatctctactaaaaatacaaaaaattagctgggtgtggtggtgcgcgcctgtagtcccagctacttgggaggctgaggcaggagaatcgcttgaacccaggaggtggaggttgcagtgagccgagattgcaccaccgcactccagcctggcgacagagcgagactccatctcaaaaaaaaaaaaaaaaaaaaaaaggaagggcctacacccctattttgttttaaacactgtggaagaacagcagcttttgcaatgatttctgggagaaaggagtgtaaggttgaactccggaagggagaccagcttgcatctgctgggcggtcacctcaggcattaaaacaggcacctccaaaaaaacccttacaaggaacaggaagtgtttcaggtgtttcagcaattttaggtgttctgaaagtttttcagtgtttctggaagtgaagctacccattgcaacacctgttcaggtgtcagatttctgcaaccagagccaaaattaagtgtcccccagatacccatcactggcacaccatccaggctccagtcaagcggcagggaagcaagagctagtggtcgctggggacagtgacttccaaaggtgtggcctccccccatcagggcacctggtgccctttcatagctctgcctccacctctgcctttaggatcccaaccagctgattcgtgccagtgccctccgtgtcctctctagcatccgtgtgcccatcatagtgcccatcatgatgctagctatcaaggaagccgcctcggacatgtcaccctatgtgcggaaaacagctgcccacgccatccctaaactctacaggtatgccccagccctgtcccacgctccccaggaggctggttcctaagttctcaacccacccctggcctttcctaagtcttgcctgctgcttctcagagggtttgaggagggtagtttgggggactgacagagatggaggagaacaataaggctggggtgcaggaggtgagcatggcttggacagatattgggaaggctggggctgagagtggcaaattcccctcaccgatttctccctcagtttggactctgaccagaaggatcagctgatagaagtcattgagaagcttctggctgacaagaccacggtgcgtgtataggggcgctccgggaggggtggtgaccggcagccggccttccacccttcgcgttcaccctctcgtctttgttctttccccagctggtggcgggcagtgtggtgatggcctttgaggaggtctgcccggagcgcatcgacctgattcacaaaaactaccggaaactctgtaacctgctgatcgacgtggaggagtggggccaggtggtcatcatcagcatgctcacccgctacgcccgcacgcagttcctgagccccacccagaacgtaagtgggcccagcccaggcagagcgggccgaagtgtgtcccggggaggcgcccacagacccgtcggtctccccgtccaggaatccctactagaggagaacgcggaaaaagccttctacggctcagaggaggacgaggccaagggcgcggggtctgaggagacggccgccgcggccgccccctcccgaaagccctatgtcatggaccccgaccaccggctgctgctgcgcaacaccaaacccctgctgcagagccgcagcgccgcggtggtgatggcggtggcgcagctctacttccacctggcgcccaaggcggaagtgggcgtcatcgccaaggcgctggtgcgcctgctgcgcagccacaggtgcgctccgcccccagccccgccccctccctcgcctcctgccccgccccacgggctgcccggctccgccccctcacgcccaccagccgcttccacctctgcccacccgctccacactgaccgtagtcctgccctccgcactggtcctctccccgcaacgacttgccccaccttttcccctcatccgctgacccttgccccaaccgaggggcccggggtgctctgacccgtcctctccgcagtgaggtgcagtacgttgtgctccagaacgtggccaccatgtccatcaagcgccgggtgagcctgcgacggcgggctgtcctcgctgtccgagggccgcttctgcgggcactggaggcgttgtcggggctgggaccggggccggggaaagggaagatggaggaataccctggctgtgcagaggatggggcaggggaggctccaaatacagatagggagcagggcctggatcctgaggggccgctgaggggatgtccagtggaaaaagagctagtcagatctgagatggacgagggaagacttgaggagtggagggcagtggtgaggaggcaaggatcctgggcgctgggtcaggataggaggggtgtctctgggcagcgaggcaggcctggggcttcggtggagctccctagctgcctctcttgtgccagggtatgtttgagccctacctgaagagcttctacatcaggtccaccgaccccacccagattaagatcctgaaggtgagtgagggacagaagtgcatgtgcttcccagccctccccaccccatgtacccactcaaataactcacagtggcccccctggtgcctgcctattcctggggctgagcccaggagcccatgactgccccagctggagctgtttgttcagggagctgggctaaggagggtcagggggagaagggaactgctctttgcctagtacctggtatacacctgctactcttcataaatgaagtaacctgatatcacctcataataatcccaggatgtgtacattatattccttttataaaaatatagactctggccaggcacagtggctcacgcctaatcccagcactttgggaggccgagacaggcagatcgcctgaggtcaggagttcaagaccagcctggccaacatagcaaaacctcgtctcaacgaaaaatacaaaaattagccaggcgtggtggcaggtgcctgtaatcccagctactcgagaggctgaggctagagaattgcctgaacctgggagacagaggttgcagtgagctgagattgtgccattgcactccagcctgggtgacaagagcgaaactccatctcaatctaagaaaaagaaaaaaagactctgggaggtaactgccccaggtcacataattctgctgactccaaggttcacacttttctctcccacccacagtgttatggcccccacacacctgccccctcaggctctcctgcaaacattcacggacaaggaaagtggcgggagcccatacctccatttgattcctgctctgctgcctcattattgagtgatttccttcagcaacagttaatcttcctaacccttgtgaacatccactatgttctaggggtacatgatgagcaaactaatcagggaccctgcctttgtggagcttacagatgtggggaggaggagacattaagcagttaatcacaaggcaaatgtaaaagtccacttacaaaatatggaagaaagtgtggagagctataagggcataaaatagggagacctcatctagtctggtgccagggaagttttcccggaggatatgagacttgagctgaagcctgagagatgaacatgaattatgcagggacagaaatgggaagaactgctccacgcagaggaaacagcatctgcgaagaccctgggttaggaagtggagtgggattggggcctggaagacaagggggacagtgatgggagatgggaggtagacagcaagcagatcattcagggacttacagaccatggtgaatacgatggtctccatcctgaaagcaataggaagctttaagttttcaatgcagtagggaggtgacatggtcatactgtaagcatactgtgtagggaatccacttaagaggcaaactggtcctcttgctttttagacaagtttcataacctgtcaattccctcatcagtgtgaggatgatgcagggctgtcatgaggattgttttctggtctatgaagtgtatttggaatgaaagcacagaaagtccactggccaacccacccattttctgcctctccaaccctccctgcagctggaagtgctgaccaacctggccaatgagaccaacattcctactgtcctacgggaattccaggtacaggccagctcccagccagaagggcctgggagaggggcccatcagatccttgtgccctggtgggtaaacctcctcttatgagcccaaggctggagaaactattatcttacattcccgttccaatgtgtttggctggctttgggccaaggaatcactggattgggggtggagttgtcaccccctttcccaagtcttagtcaccggcatgataagccataaaatgaaaggccacagccttcttgaaggtcaccctcaagcctgcagagtcactgagggatttctttgtcatatcccacagacctatattcgcagcatggacaaggactttgtggcagccacaatccaggccattggacgctgtgcaactaacatcggccgagtccgtgacacctgcctcaatggcctggtgcagctgctgtccaaccgtgatggtcagtgtttccctgagtgtctaaccgtgatgatcagagggtgtctgcctgcaggtctgactctgctggccactggatatccaccagtctgcctagacacaatgtgtatccattggtctgtctgtcttgatcagggcccaagtgttcctacacctctgagggctgctagagaactgaagggggttgagagaaagagccaagggcctggggcactgcaggtgtgtctgtccacctgagtgtggccatctgactgtcttggggtccacacactcatttttgttctgtagagcttgtggttgcagagtcagtggtcgtcattaagaaattgctacagatgcagccagcacaacatggagagatcatcaaacacttggcaaagcttacagacaacatccaggtgagggagaagccatattttcactccccacttcaaggtcctccccatgatttcaagactgtataattacatatgctagccttatcaaaagtaacttccaaaccttaggtcttcaggtggaaggagcagagacactggaccatgtgaccctgaccttgttacccctgatttgctttccctttggagaccctcaatgagcacgatggactttactactactcttgttttctctctaaagctctagccaaccatggttgagtgacaaatcttgtgtttttctatcgcactgctaagctgaaacatctaaacaaggcattcccaaagattctggagagtaacatggaaataaagtactgagggtacaatgaatccagaaaatcaatcttttacatcatgactgacttagggtcttgaaagctctatgctaatgaagccctagggaagaggggaaatgctgtctaggaaatgtctaccttttaacctctctctatctcaccacccccaactcccatttccagagaacccataatacaacaggccagcacagatgaggagtgctgtttccctggaagtccacaatcctacccacccactttcccgtatttacccatcttcactcctctcccacaaccacaggtgcccatggcccgagccagcatcctgtggctcatcggagagtactgtgagcatgtccccaggattgcacctgatgtcttaagaaaaatggccaagtcattcacagcagaggaggatattgtcaagctgcaggtcatcaacctggcagccaagctctacctgaccaactctaaacaggtaaagattaagagatgaccccccagatactctggtccccagaaactccctagacagtattcttttggccctccctaggcagggctgaactctagctcctattttggaaaagaagaatcagggaaggtggctggtctgcccacataaccaatgctaccccagtgcccacaaagaccttgtagtgctggtggtcactgttgaagagactctcctatgaagctgtgacctccagtctgctagtacaagagtcctgtctgccaccttggaactctggggctgtgaagaaccacagttgattgggataagggaagggcccaacagtggcaggtactgatgggagaacatgcatcccagatgtggtctgtgcttctttccaaagcttgacaatgcttggccagtctgtgccaaagataagggggtgagtctctgcttgggcttgggtggtgctggtggccactgtcattcccaaggtgaaaggttataagagatacacagccaaggatgaggctcaactaagttgtagtatcagggtgttcagagcctcctagctgtctggcatctcctgagatggttccaggagattctcctaaaatgaagcataatgtgctgagcttttcaaggtgtcagggacatcaaacaccatgacgatttccacactctcccactcagttaagcaggacagggattggcaaactactgcccataggctgaatttggcctattcctgtttttgtaataaagttttgttggaacacagccctgctcattcatttacaaattacctatggctgcttttgtgctacaacagcagggttaactagttgcaacagactgtattgcccacaaagcctagaatagttattctctggcccttttataaaaagactctgccaatccttgaagcaaaacctctggctaggtggctggggtctacagatttatagcagggatatcccctggagactgtagcatccctgccatgtccactgtgcgtgggagtctttggatggtggcacttatctttttcagtggcttctttgatccattgtggccagagtgagccccagaggctcaaggtgaggtaggcagggccaccaagtgctgtgactgtaatcaggagtcaaaggacagcagcaacatgtggaggcaactgagtctgtataattaaatatgctagccttatcaaaagtaacttccaaaccttaggtcttcaggtggaaggaggagagacactggaccatgtgaccctgagcttgttatcagtgttgtgggcaaagcagattggagagagagaagttagagggggagagagagaagttagagggagaaagagcaccatggggaagcgttcaatcgttgaaaaaatatttgtatacttcctttgttcaggtgggaggaaggagcaagtgggaggaatgtttgaaaagatgaagcagcctgggtggggagccacccaggtaggtgggagtcttgacatgctcagcaatgagccagagtcctaaaccccaggatggtgaggttggcatgttttcataagcctgggcctgtccacatgtcatttcccccaagttgtcactgtgagctacatgtgcatttgttcatttatttaacatatatgtaggtgggagtctgacatgctcagcactgagccagagtcctaaaccccaggatggtgaggttggcatgttttcataagcctgggcctgtccacatgtcatttcccccaagttgttactgtgagctacatgtgcatttgttcatttatttaacatgtaggcctactatttgcctggtactgtgctgcgtcctgaggatatgacaatgagtgagacacatttacaggtctccagatactcacagccaagtaggagaaacaggacaaaaataaacattttaaacacagcagtaacagctgtcatcagggttggcacagcgagctgtgggtatatacagctgaaccctcccctaggaatgacccctgtcagggaacccagagtaggctgttcaggcaaatggacactcacctccagggcgcccttcacctgcaagtgagtttttgcaggccccttagaatggttatttgattcaataaagatttttgtcctccctttctttctcctttcttcccagcctcttctgggagtggtaaagaagggggagtccttggggtactaggagggaggtggtttggatgcgcacatgaccatgcttgcaaaacagtagtgatgcttcccatcctgggaccatgagtggcaatctgcccagctaaaaggccacagtaatctcagtcattctctccaatttggacatgggcccacggcatgccagatcctggcccaggatgaggccaaggaaatgaccaagatgaggcctctgccctgctattgatcagcagataatcagatactagaccagaggccacaaaggcataacatgcaggtggcgggggatgggggggttggtaatcaaagtggctattacatccacctggatatagaccctggggaaactgcctagcaggttagtttgcttttatgtgtcaggtgagatgtgtggcaggagggtctgccaggggcacagtgggatctacaaccctcccatgtgaccgcctttacagtgaatagaagattctgacaaattttgcagaattgcttttaaaaacgtaaactttttttaatatgctaaaggtaatacatgcttatcatagaacatttggaaaactcagaaaattataagtttaaactattaataagtccaccatttagaagaccaccattaattatatatttccttattttttattcctatatatagtcattcagaagttgtacttttgtctattgtccaatattttaaacttttctgcttcttttcaatgctttcatatttaatacttttttttccccattcacatttcaattaaacttttcacttagaattttctccaggctgggttcagtggctcacacctgtaatcccagcactttgggagcccaaggtgggtgggtcatttgaggtcatgaattcaagaccagcctgaccaacatggcaaaaccctgtctctactaaaagtacaaaaaaattagctgggtgtggtggtgcgctgaaatctcagctacttgggaggctgtggcaggagaattgcttgaacccaggaggtggaggttacagtgagctgagatggtaccaccacactccagcctgggccacagagcaagatccatctcaaaaataaataaaaattaaaaagaatttcctccaaatttttttctactttcacatttttaaatcaattgtattagttttctgctacataataaattactataaatttggtggcttcaaacaacacacgtttattttctcagtgtctatgggtcgagaattcaggtatggcttagttggatcttatgcaaggctacaactgaggtgtcagccaaggctgagtttttatctggaggctgtactggggaaaggtccacttccaagtcacatggtgccacgatccacttccttgcagttgtaggattgtggccctggcttcttgctggctgtcagctgggggctgcccttgccttctagaggccgtccttagctcattgccataggggcctcccaacacggatgcttaatttctccaaagccacaagggagaaagtctctagagccagtctgctagcaagaccgtcttctttttattttttaatttttatgggtacatagtaggtgtatatatttatggggtatgtgagatattttgatacaggcatataatgcataacaatcacatcagggaatggggtatccatcctctcaagcatttatcttttgtgttacaaacaatcaaattacactctcttagttatttataaatgtataataaattattgttgactgtagtcaccctgttgtgctgtcaaatactagatcttacacattctatctaactataattttgtacccattaactatccccacttcccccacccactacccttctcagcctctggtaaccattattctactctccaactccatgagctcaattcttttaatttttagccctcacaaataagtgagaacatgtgaagtttgtttttctgtgcttggcttatttcacttaaaataatgacctctagttctatccatgttgttgcaaatgacaggatctcattcttttttattctttttttatagtactgcattgtgcatatgtaccgtattttctttatctatttgtctgttgatagacacttaagttgctttcaaatcttggctatggtgaacagtgctgcaataaacgtaggtgtgcagatataacttcaatatgttgatttccttacttttgggtatatacatagcattgggattgctggatcatatggtagcactatttttagtttttgtttgtttgtttgagatggagtcttgcactgtcacccaggctggagtgcaatggcatgatctcagctcactgcaacctccgcctcccaggttcaaacgattctcctgcctcagcctcctgagtagctgggattacaggcgcccgccaccaagtctggctaattttcatatttttagtagagatggggtttcaccatgttggccaggctggtcttgaactcctggccgcaagtgatctgcccgactcggcctcccaaagtgctgggattacaggcgtgagccactgcacctggcctatttgtagtgtttttttttgagatggtgtttcactcttttttcccaggctggagtgcaatggcgtgatcttgcctcactgcaacctctgcctcctgggtgcaagtgattcttcttctgcctcagcctcccaagtagctgagattacaggtgcctgccaccacgcctagctaattttttgtatttttagtagagacagggtttcaccatgttggccaggatggtcttgatctcttgacctcgcgatccacccacctcggcctcccaaagtgctgggattacaggtgtgagccaccgtgcccggcctatgtttagttttttaaggaacctccaaactgttctccagacatttccactaacagtgtacaagggttgccttttctccatgttcttgtcagcatttgttattgcctatcttttggatataagcctacttggggtgagatgatatatctttttttgttttgttttgttttttgagacggagtcttgctctgtcacccaggctggagtgtgcagtggtgcgatcttggctcactgcaacctctgcctctgtggttcaagtgattctcctgcctcagcctcctgagtagctgggactacaggcgtgcgtcaccacgccccgttaatttctgtacttttagtaaagatggggtttcgctgtgttggtcaggctggtctcaactcctgatctcaggtgatccgcctgcctcagcctcccaaagtactgggattacaggcatgagccacccgtgcctggcctttcattgtagttttgatttgcatttctctgatgctcaatgatgttgatcaccttttcatatacgtgtttgctatctgtatgtcttcttttgagaaatgtctattcagctcttttgcccatttttaaattggattattgaatttttttttcctattgagttatttgatctccttacgtattctggttattaatcccttgtcagatgggtagtttgcaaattttttcctcctattctgtggcttgtctctttgttgattcctttgctgtgcagaacctttgtaacttgatgtgatcccatttgtctacttttgctttggttgcccgtgcttgtggggtatcactcaagaaatctttgcccagtacaatgtcctggagaatttctctaatgttttcttttattagtttcatagtttgaagtgttagatttaagtttttaatccactatgatttgatttttgcatatggtgagagataggggtctggttttattgttctgcatgtggatatcccgttttcccagcgccatttattgaagagactctcctttccctaatgtatgttcttgatacctttgtcaaaaatgaattcacggccaggcgtggtggctcatgcctgtaatcccagcatcttgggaggccgaggctggtggatcacctgaagtcaggagttcaagagcagcctggccagcatggcgaaaccctgtctctactaaaaatacaaaaattagctgagcgtggtggcgggtgcctgtaatcccagctacttgggaggctgaggcaggagaattgcttgaacccgggaggcggaggttgcagtgagccaagatcgcgccactgcactccagcctaggggacaagagcgagacttcatcttcgtccccccccgccaaaaaaaaaaaagccactgatttttttttttttttttttttttggagacggagttttgctcttgttgcccaggctggagtgcaatgggtttttttttttttttttttttgagatggagttctcactctgttgcccaggctctggactgcagtgacgcgatctccactcaccacaacctctgcctcccgggttcaagcaattctcctgcctcagcctcccgagtagctgggattacaggcatgcaccaccatgcccagctaattttgtatttttagtagagacagggtttctccatgttggtcagactggtctcgaactcctgacctcaggtattctgcctgcctcggcctcccaaagtgcttgctaggattacaggtgtgagccactgtgcctggacaatgctactgattttttttttttttgaaacggagtcttgctctgtcaccaggctggagtgcagtggcgccatcttggctcactgcaaccttcacctcccgggttcaagcggttctcctgcctcagcctcctgagtagctcggactacaggtgtgcatcaccacatccagctaatttttgtatttttagtagagacaggatttcatcatgttggccacgatggtctcaatctcttgatctcacgatctgcctgcctcggcctcccaaagtgctgggattacaggcatcagccaccgcacctggccaatgctactgatttttatgtggattttgtatcctgcgactttactgaatttattagttctaatagttttttggtggaatccttaagattttttaaatataagatcatatcatctgcaaacaaggataatttgaattcttttccaatttggataccctttatttctttctcctgtctgattgctctagatagaacttccaatacagagtcttcttaataaaacataatcataggatcatatatagtcatataccacctttgccatatcctgttggttagaagcaagtctcaggttttgcccatacccaaggtgagggattgcacaaaggcatgaacaccaggaggcagctactggtggggaagaccttagaatctgtctgccacatccatctagagcttaaacttactcatgtgtaatgtgtgaattgaggatatatttcaattttttttaacagccagttttctaagcatgattagcaggcatctgcaaggtagcatgtatgttggcataggttatggaaaggaagtcagtgtttcctgcttaaaattcctctctgacaactggagcctgttggtgagggggagccttgttctgttcttggcacactggagtgtatctcagaggccttcttgaacagcctgtaattcctgcacatcctggctagatgaggtgggggtcttggtggtgcacacaggatgccacaatccacagggaatggccccttggggtggagaagggtaatgaattattataggcaaatcctgcagtgttgaggtggtgggccagccccttcctgtgttggttgttaacatgcagttaaggctgtggacagatggatccaaataccaaacagttctttctagaactaggcaaggacttgaaggagggagtctgtgatcagccagctgggaaatctgtggaggaagacattgtccaaaccaaaagagggatcagcagcctcttgataattgactatgttggtaagggcatccactagccctggccatttagatggtgtctggccaagagaggggcaggttggtgatgaaatctgttgtgatggcatcttattttcatatttttaagtctattctattagcggtgcatgggattgggattgcttatctgtgactataacagtatcgcaggtgctgctttgctggaagggactgagctgaagagggcctgtgggccagattggaggtaggaatgtggaatcatagtggctctctagagtggtgtggggcaattctgccaaagcagctgctcagactctgggtcagcatctgaggggctttgccccttatggacatctgcttgatgtccctgccagattagctgggttaaccatgtccaaggctacacgtaacagtatgtcaccataaacctcaggaagaacagagtcagttccaggctccctcctgccggcccctgatgcccttgggcattctgcttgttgaccacttggtggttttgatcttggtcacaagtgatggaaacatggagacctgggccagggcaggctccttatgtcagcaggtaggcagtgaagggaagcagatggggtgcagctccagcagatgcaggcctaggtgcagtactgatgggctccttggcctgggaaaagccccttaatgatcctgcttcttttctgtaaaatgggggcaataatgcctacttctcagaaggcttggggagattagatgagctagtgtggagcacctagcacagagttggtgccagaaggcacttgataagtgatggctgctaccgctgttgccatgttaaggcaggttagattaggccaagatcatggcagaaatggagatattttaggtctgcagttgtagcttccctgactgcagactgtgaaccctacatgaccttggcaaatgcatgggcagctgcagtttgccctgatgtcattagaagcttccagggaaggataaagacctctgagacccctgggctgctcagaatctactaaatgggtggatagggcatgagggtggcccctgccaaagggacccctgtttatctgccctgtctttttgttgtctaattccccctgggtggtggagcctggaaactgtgaggtccagcagagcattccatacttccacataccctgctgccctagagtaaagaggctggacaggcctggagtggtagggaccacaaatctagggaagaatggagtccagagccaggagtggggaaagtccaaaaggaaaacctcttttgttggcccaaggcagttgtcaaagttgggatcatcaggaggcatgtccagagagatgagagaaaattctgagcccagaacaagggcaggtggggagggacagctgggtggaagcgccggtcctaagcagggagaggagacgttctgcctgaaagtgtcggcttaaagaatctgtttctgagcctcctgtgtccccatccccccgtcagctgacccacctcttcctgttcctccagaccaagctgctgacccagtatgtgctgagtctggccaaatatgaccagaactatgatattcgcgaccgggcgcgcttcacccggcagctcatcgtcccttccgagcagggtggggccctcagccgccatgccaagaagctcttcctggcacccaaaccagctccagtcttggagtcatccttcaaaggtgggagctgaaatcaagggtaaccttcctaggggaatggaaaggaactggccagagtctctgccccagaccttcctgaggcccctagccaggcaccaggcttctgtggacagtcctgctccctggctcactccttttgtccctcctgtggcaccaggaattactctttcaccctcccataaccactgccagcatcatctcacctgagggtctgccttcctggccaggatggacttgtgcctcctctcctctcaggctcccttttccatctccctccctgagcagacactaggctttggaatacataccaagatcttaaataccaaggacccaggaaggcagaaagcaaaacaacacacaaaggagaggtgtatatttttataaaggtcctgagaaagcagttgcctgcattctgtgagcttagtcactacagtcagtccaaatcccaggccccagggcttcagccttgcctctgttcctgggcttggcccttaaggcctcttttcccaagacaacggccttgagatgggcctgggagggaagggtcctcccgctgcttctccgggccccaggagtggaagccaggaacctacacagaagagagcctccttcacaaagctcagttcttctgggtatcttttcgttctttttctcttccctggacctcacgaatggggagattctgagggtgggcacagctttgaaattctcccaggaagaaggcaacagtccctttctccccgacaccatcctcactcacaggcctgtgctgccctcctccagcagtgcctcaactctgatccagacttctacacactcatgctctgactgttcatccctccctgctgagtccagagcctgactagacgtgcatgctgagcagacaggtcggcagcatctgtgggcccagagtctcctcctgcccacctctgtaggctgcctttccctggccctcagtccctgctctggcctggccagacagccttttcttccagcatgtgggcctaaaggtgcagtcagggtggaagagccattagggcacacatccatctccttcccctacccacctgggaagtcccaaccagaatcaccacccagccccacctggaaaacagctcccagagctttccctcactgctgctacctgcctgacctctaaacctatccctagaccgggaccacttccagctgggctcactgtcccacctgcttaatgccaaggccacaggctaccaggagctcccagactggccggaggaagccccagacccatctgtgcgcaacgtggaggtcagcggggtggagggttgaagtgtgtgtgtgtgtgtgtgtgtgtgtgtgtgtgtgtgtgtgtgtgtgtgtgtgtgtgttggtgggggcagacagtagggagccctggcagtgccggcccagccctcctaacaccctcccccacacacacaggaagaagatctctcccttattgagactcacgtgggcctgttgggcgaatacactgaggtcccaccttcgtgtgacgtgtgctctctcccctgccctgtctgtgtccctcttcttcccctgtgtgttgtgctcctgggccttcccatactctgtttccaccttggtttggcagtgctcctctgtgagcagcattccctcccctccatggacagtgcccctttcttcctcctctgttattccctttgtgggacagaccaggtagggcctcacaaagaggtggaataaagggtaagggcttgtgcctgcctgccttctccccaaccatgatgaaatgaccctgcaccctacccccatctccaggtacctgaatggaccaagtgctcaaatcgggagaagagaaaggagaaggaaaaacccttctactcggactctgagggggagtcaggccccacggagtccgcagacagtggtgagcagatggcagagctggggtcctctgtgctctgcccatgcatctgtgtgactgactatatgaggggtatatgtatatggttgtgtgtctaggggtgtgcacctgcttgtgaattgtttgtgcacctgagggattcatgttccaggtgtgtgtgcttgtgcaggtttctatccatggagtccatctgtgtttctgtcagttccagctggcatgtagggctgggggcaggtcagagaggtttgagggttcagtactgaatgtgaaggtggaacccaggtgtctgctccagacccaaggaggcctgcatatgagggaggaggcctcatattgttcctccacagaccctgagtctgagagtgaatcggacagtaagagcagcagtgagagcggctctggggagtccagcagtgagtccgacaatgaagaccaggatgaggatgaggagaaagggagaggcagtgagaggtgagaagggagctagccagatggctggtggggttcagggggctttcctggaaagagggctagcattgagctttagccagtctcctaagagcccctgagcccctcgtgagctgggtggggctgtcagctcacatgacgcctactttcgctggctgcaggagatctctgaggcctcatgggctggtgtggagaagcaaccagagtcctagagcctgagctggcacaagctggcttcaagctctcacggggtccctgctataggacctcaggtgtgaaccctcctggctcaggctccccacaccactccagcttttcagcatttctcctgcttctgtgaagcaaggagggagtgtccaggccaggcctgagccaacctttcccactccttcagtgaacagagtgaggaggatggtaagaggaagacaaagaagaaggtgccagagagaaaaggagaagcgtcatcctctgatgagggcagcgattccagcagtagctcatcagagtccgagatgacatcggagtccgaggaggagcagttagaacctgcctcctggagcaggaaaacagtgagagccttggggcagagtcagggtgtgctcatgggccagggccctccccaacctctgggccaggcccagacatctatctccctaccatccagaacagaacatgacatcttctacccaacccagaacatgccaaggtgctccccttccccacacccacatcccatttttctctttcagcctcccagcagcaaaagtgctcctgcaaccaaggagatctccctgcttgatctagaggattgtgagtttgggtggtaaaagtcacaggggaaaggaggcctggggagcatgaattagaacagcccatagggactctggatcgggttcctcaggtcttgtgggagcaggggagcagacagaacatatcttcaggcctgagagggcagcagggctgacctccccaggtctggggttgaggtctaggaatgggtattttgcgagagcctccaggcagccatgtgccccgctgtccatggtgctgaaatgcgtgctccttgatccctaggctccctgctcaacccaagccacctccactttgcctcctcatagtcttatctactcccacagtcacccctcccagtgtccagcctgtgtctcccccagcaattgtgtctaccagtctggctgctgacctggagggcctgacactcacagactccaccctggtaccgtcggtgagtgggatggaggaggggaccgggctggggcagggacacatccctgtgctgcatcctatggtgtggatgtgtgtggggggtgggtgtgatggaggatgtgatagctttgagtcccagctgctggatggccctaggggacaatgctgggacaggctctctccatcttgctcagttctgtccttccctacccctccactctagcttctgagtccagtatcgggtgttgggcggcaggagctgctgcaccgggtagctggcgaggggctggctgtggactacaccttcagccgccaacctttctccggggatccccacatggtgtccgtgcacatccacttctccaacagctctgatacccccatcaagggcctgcatgtgggcactcccaaactgcctgctggcatcagcatccaagaatttcccgaaattggtgcgaagggctttggatggggtggaggaggaggctcctgggcagagtcagtctttctgtggttgctgataccctccttgtgccaggccaggggccaagctataggggcacagagatagcatctaacatgatcaacactctggtggacaagacagatgatgaaataagcaagttcacatcagggcgggaggtgcttgcagcagcagatttgggccttggttgtttcaggactaacttaaatgtggtgagggtgagtgggggaaagggtgcttagagttcaggaggaaaccgggaacagtctccagcagccaagaaagccaagattctgtagagggctggtcagctgtgacagtggagaggagagtagggctaggctgggttctagacctatcaggtgatggtggccctccctctccccttcactgccttataccacttcagagtccctggcacctggagaatctgccactgctgtaatgggcattaatttctgtgactcaacccaggcagccaacttccagctgtggtatgtgcccaactcgaggtgggggtgagaggatgggctggaaagggacagggtaacaatgaactggaaatggaggtggtgcttagtggggatacatcatgattgggtgggtctggaagccatctcaggccctcattcctgacctcactctttcactgcctccaagctgtgcctctacacagggtgggaagtgaggggagagatgacagccttaattcttctccgtttcctcccacccctcccagcacccagacccgacagttctacgtctccattcagccacctgttggggagctgatggcccctgtgttcatgagtgaaaatgagtttaagaaggaacagggtgagtgctccctgggagtgggcagagagggaagtatagaagctgactccagaatgtccagcttggatggtagggagaatggtggtgtccttcatctagaccaggggtcagcaaactttctgtaacgggccaaagataaatgttttaggctttgagaatcatgtggtctctgttgcagttacaacacgactgtggctgttgaaacatagaaacatccacagacagtatgtaaatgaacgagtatggctgtgttccaagaaatttccatttatatttatagatactgaagtttaaatttcatgtaattttcatgtgtcatgaaatattaatcttttgattgctcccccaacacttaaaaaatattaaaaacattgtgggccatataggtggtgggctggatttggtctggaggctgtaatttgcaaaacctctggcctagaagaaagaagagtggcttgggcaagggaggagggaagatcatggttagttttggataagctgattttgaaatgcatttgggaaattcaggaggagctatttagtatgcaactgaaaatatgggtctatgcccaggaaacactttgaagctggagtcatgaacatagaggtggtaatggaagctgtgaatatgaatgagatcactctgggaggtgggagaaaataggaaggccaaggacagaaccttgggggaaaacctgaattctgcagaagaaagaggaggggagggataagagaaggagcacagggagaggtgggaggagaaccaggagagacaacaaggcagaaggtgtctgcaaaccacagttacctaagaccttcagagtcagcatataaaaggctactgccaacctgagggagagagggtcattgctaaaggagggacagaggccaactgcagtgggttgagggagaccacggctcaagtacatgcagtcctctttggaggactttagccatgaatgaggagggagacagggcattggcacgatgaaggatctcacttctggaaaggattttttggagacggggacacttgaacatgaacagattgaaggaacaaaaacaagaaaatgttattagtcatgaatgaaggggatagaagaaacaggagagggatgtcagtttctaaaaggaggtgaagaataggggaagcagtggagggaggaaagaggctgaagagaagactgctggtgtgcaggagagcagacggaggagctcccatggggggcctggatcatgtgagtggagagaagtcagccttgcagaatgaggagttctgggggtgctgtgaaggtttggaggcttcaggagccctggctaggtctggagctgctactgcagaggtacaattaaaaatgtacctgtgaatgctgcatgtgactactggattctggctgagagatcacagcagccacctgtgatctttttgtgagggcttagcttccaggagctgagtgggagttgaatgtgggttggagggccccccaggaaagatcaaagggtgtgaggttcaggatgggcgaacctcttaagaactgactggccactctcaaggggctggtagcccagatgtctgatggaggaagcgccaaatcagtctttggtaacaacatggataaaggcctgggtgggaggggtagagaggctgacaaaggcttcctgagggagggcccagtctgagagggaagtaccttctccccaagactgatgatttaaattctgacctgccctttgcatgataccttcccagcctgggagaacttgttgctcagtaagcagacccaggtgctggcctctgtacccaccatggcctctgccctcatcacgacctctacccccaggaaagctgatgggcatgaatgagatcacagagaaactcatgctgccagacacctgtcggagtgaccacattgtggtgcagaaagtgactgccactgccaacctgggtcgtgttccttgtgggacatctgatgagtacaggtactaggccaccagtagaggggaaatgatgagcatgggggccctggtttgaaggaggagccccagctgctgatccccttccaaacacagtcacccttagcagctcttcctcaccccttctattcccacctcaggtttgcagggaggacactgactggtggaagcctcgttctgctgaccctggatgcccggccagctggagctgcccagctgactgtcaacagcgagaaaatggtgattggcaccatgctggtaaaggatgtgatacaggctctgacccagtgacttccaaatgctgtgacctgtttggctcccatctatacctccccatgacacctaggctgtcagtctctctcatctttctctctctctctcatcatcctcctcatgccagatagcattcagggtgtcctctctccctctggaggaccaagccctcccctaatgccctccccatggattccttagtgatctgtgcagagagagatggcagccactcccttcagtcctcccagatttctgtagctatttatgtagcaggctcaataaaatgtcttctctcta

SEQ ID NO: 15425 - DNA, 50581 bp, Homo sapiens
gagaaatccgcgcgcagcctccgccgctgcacactgcagcctctgctgaacccctgccgcgccgccgccttcgccagcccggaccggaccggcccgccttcccttcctccgctccagccggcctccggccccgcaacctcctcctcggcgaagtctccctggccgccccatgtcggccgcccccgcctacagcgaagacaagggcggctccgctggccccggggagcccgagtacggccacgaccccgcgagcggcggcatcttctcctccgactacaagcggtgagggagcccgccaggaagctcgcgggagggttggggccggggaccgggcgaggcgcgcgggcaccatggacagcgcccggccccagcgccggccccgccccggccgcgccgaccggaagcccgcccggccccctcctgcggcctggagccccggcccagcgcgggcagcgctggcaccccggctccaggggccggcctaggacgcggaggggggcagataggggctggcgggggatgggccagctcagtttcgagaggagaaaccctccggttccaggtgtttctccggtttgcggcgttgcgttaggggttcccttcctttttcgtgctaggcgggttggcttcccaaaaatgtgggggaggggtctgagtcagcgaacttgagcttgagcctggggcctcttcaggaaggcgggccctggatgtacttgcacagcctcccagcttggccctgctgcaaattcatttcccctccctctggtccccatctccatctgaccctcacatccctgctcctggcattgcccctgtagttcagctccaccttcacaccctcccccacctttgattcgttcgtttgtttcttcatttgtttattcgtaaattctgcaacaagcatttatgaaaagccaactgtgtcgagtcctgaactagtcacggaatacaactgtgaacatgagacccttcttgtcctcacgatgctctagaggggagcacagatgaagaagcagtcagggacagtcgagtgtaatgggggcagtgggagcagggagaggacctagtctctggcgccggagagaaggaagacaggagcgtgaggtatgttccaggcagaggaaagggctttcaggaaggttgagagccaggccacaatctgtgtgagccactggactgaccagaaaagagggtggggaggactcctgaaggattctaagcaggcgacataatcagatttatattttagaaggacgtcaggctgctgcattgtggagaagagattggaggtgggccagattgaacaagagacaagggaggtgggtcttgaagttcacaggcctggcatgattgtggcctagaccaggggagaggcagaagatttgaggctgtggaagaggtggaagcctcagacctgatgattaattggatattgggtgggggtttagagggacagggggagaagatgaggattttcacgcacgtccatgtgaagagaccaccaaacaggctttgaacaataaagctttttaatcacttgggtgcaggccagctgagtccgaaaaaagagtcagcgaagggaaatggggtgggaccgttttacaggatttgggtaggtagtggaaaattacagtcaaagggggttgttctctggcggtggggggacacaaggtgctcagtgggggagcttttgagccaggatgagccaggagaaggaatttcacaagataatgtcatcagttaaggcaggcacaggccattttcactcttcagttacttcaggccatctggatgtatacgtgcaggtcacaggggatatcatggcttagcttgggctcagaggcctgacattcctgtcttcttttattaataagaaaaataacataaaatagtgttgaagtgttggggcagcaaacattttggcggggggtggtatggagagatactgcttctccatagccttgaagggctgcttcgagcgggattggggtggcgtgggaacctagagtgggagagattaagctgaaggcagattctgtggtaagggatgatattgtggggttgttagaagaaacatttgttgtataggattattggtgatggcctggatacggttttgtatgaattgaaaaactaaatggaataagagaaggagaaaaacaggtattaaaggactaagaattgggaggacccaggacatccaattagagagtgcccaaggaggttcagcatagccctgccagcaaagattatttatttactttaagagggagttaagactggcagtttggggatagcaccaggagatatcagctgtaatggtttggagaaacagtgtaaaccggcagtgtaaacaagagcagggcatgtatgagtagttgagtatggtgaataggagtatgactagtcagaagatagtagggatgacaagttttctggggcacagtccaagttggtctggtgtctggaatgagactggggcctaataaaaaggagcatctatacaggagcttgaatgggctgtaccctgcagcattccgaggacaggcccaaattctgagaagggcaagtggtaaaagtattgtcagtcctttttaagttggtggctgagcttggtgaggtgtgtttttaaaagaccattagtccgttctaccttttctgaagattgaggatggtaaggggtatgaaggtttcactgaataccaggagcctgagaaactgcttgggtgatttgaccagtaaaggctggtctgttattggactatatagaggcgggaaggccaaactgaggaattatgtctgacagaagggaagaaatgaccgcagtggccttctcagaccctgtgggaaaggcctctacccatccagtgaaagtatctacccagaccaagacgtattttagtttcctgactcggggcatgtgagtaaagtcaatttgccagtcctgggcagaggcaaatccccaggcttgatgtgtagggaagggagggggcctgaacaatccctgaggagtagtagaatagcagatggaacactgagaagtgatttccttgaggatagatttccacaatggaaaggaaatgagaggttctaagaggcaggctagcggcttgtaacctacatggaagaggttatgaaatgacgaaagaatagaatgggcctgtgaggctagaaggagatattttccttggtctgagaaccatttgccttgtgtgggaagagattcataggtgtaagtttcattgggggagtaggtaggagtgactgatgagaaggagaaaaactggccatgagggacagaagttggaatgctagctgcttttttagctaccttatcagcataagtgttgccctgagcgatgggatctgatgccttttgatggcccttgcagtgaatgactccagcttcctttggaagtaaagcggccttgagaagagtttttattaaagaggaattaatgatggaggacccttgtgtaatgaggaaagctttttgcccatataacagcatggaggtacaggatatggaaggcatatttagagtcagtataaatattgacacatagtccttttgcaagactgagggctcgagttaaggcaatgagttaagctttctgagaggtagtggaggggggcagaaagtatatgcgtcaggtgtgaggaagaaaatagattttggaagttatgagaactgtagagagtgagttgagcatagtttgtgattttgagggcctctgaaagtattaaagcagcggcagccgctgcacgcagacatgagggctaggccaaaacagtaaggtcaagttgttcggacagaaaggctacagggcgtggtcccagctcttgtgtaagaattccaaccgcacagccctgcactttggctgtgtgtgatgaaaaagggttgggatgaattagggagacctagtgtgagagcagcttctacggctgtttttaaggaatggaaaggagtggcaaaaggatttaggatctgtggggtcagctaggtttgcttttgtgagtttatataatggtttagtcaggatggtaaaactaggtatccaaaggtggaagtacctaaccatcccttgaaaggaaaggagttgttgctttgtagaagggattggggttcgggagattagccggacatgatcagcagggagagcacgtgtgttttcatgagaactatgccaagataggtaatggatgaggaagaaatttgggcttgactgaagtaatgggggctgtccgtgaagccttgcggcagtacagcctaggtagtttgctgagcctgatgggtgtcagggacagtccaagtgaaagcgaagagaggctgagatgaagggtgcaaatgaatagtaaagaaagcatgtttgaaatccagaagagaatgatgggttgtggaggggttgtggagggaggtattgaggaggagagtatatgagtttggcaccacggggtggataggcaaaacaatttggctgacaaggcacagatcctgaactaattgtaagacttgtctggtttttgaacaggtaaaatgggggaattgtaaggagagtttataggctttaaaaggccatgctgtaacaggcgagtgataacaggctttaatccttttaaagcctgctgggggatgggatattgacattgagcacggtaagggtgattaggttttaatgggatggtaaggggtgcatgatcagtcgccaaggagggaatagaggtgtcctatacttgaggattaaggtggggagatacaaggggaggatgtgaaggaggctttgaactgggggaaaaggtggcaatgaggtgtggctgtagcctaggaatagtcagggaagcagataatttaaagtgtctcggcctaataagggaactgcgcaggtggggataactgaaaaggagtgcataaaagagtattgtccaagttggcctcagagttggggagttttgagaggtttagaagcctggccatcaatacccacaacagttatggaggcaaaggaaacaggcctttgaaaagaaggtaatgtggagttggtagcctccgtattgattaagaaggggacggacttaccctccactgtaagagttacccaaagcatctgtgatggtccaggaagcttccaaggcgattgggcagtgtcagtcttcagctgctaagccgagaagatttgggaaggagtcagtcaggcagccttgggccagagttccaggggctctgggagtggctgccaggtgagttggacagtccgatttccagtggggttccacacagatgggacaaggcttaggaagaatcctgggctgtgggcattccttggcccagtggccagatttctggcacttgaagcaagatcctgatggagaaggtcctgtaggaatgcttgactgctgcagcttaggcattttgaagttcttgtgtactggagatgtggctggggtttctctcacagtggaggcaaggaactacaactcagaaatacattgctacttggctgcctttactctattattgtacaccttgaaggcgaggttaattaagtcctgttatggggtttgagggccggaatttaatttttggagttttatttaatgttgggagtggattgggtaataaaatgtatattgagaataagactgccttttgaccttttagggtctagggctgtaaagcgtctcagggttgctgcccaacgagccatgaactgggctgggtttttatatttgatgaaaaagagcctaaatactaactgatttggcagaggtcggataaaggaaaaggagcgttaaccttgactatgcctttagctccagccacctctttaagaggaaattgttgggcaggttggggagggctagtcgcagaacaaaactgtaagccggactgggtgtggggagaggaggtgatagaaggattatagggtggaggagcagaagctgagaaagaattggagtctgattcagcctggtggggagtgacctgaggagcattctggggattaggtgagaggtcagatgggtcggtagaaaaggaagattggaagattgaaaagacgcagcgacgcttggggttgggactgaggggacaggcgggagggaaagaaggaggatttgggatgagtcgcattgggaacagagactagggagggaccgatgtgtaaaagaatgcctggacatcaggcacctcagactgtttgcccattttacaacaagaattatctagatcttgtaggatggaaaaatcgaaagtgccgttttctggctatttggaaccattgttgagtttgtattggggttaagcggcattgcaaagaaaataaggcatttaggttttaggtcaggtgtgagttgaagaggttttaagttcttgagaacacaggctaagagagaagaaggaggaatggagggtggaatgttgcccacagtgaaggaggcaagcccagagaaaagagagggtagagacacggagagaaggggtggggggtgctttgccccccaggaaagtggagagaaaagagagggtagagacacagagagaaggagtcgggggtgcttgtcccccaggaacgtggagagaaaagagagggtagaaacatggagagaaggggtggggggtacttgccccccaaaaagtggtgtttgccactaagggtgaaagatcaaggcaggcatcctcgcggtgatcagacaactctgaaacgtgggtgaataatcaagcaggcgtccccgcagtgattaaacaccaagggaagactgtcttcctgagtccgtgatcggcgccggagttttgggttcacagataaaatgcatttcctgtctctaccagaaaaggaaaggaaccgaaattaagagaagggagagattgaaagatggcaccaagattgaaaggagaaagaggttgagggatagtgagagaggttggagaagagagtaaaaagaggccgcttacctgatttaaaattggtgagatgttcctcaggctggttggtctgaggacccgaggtcattaggtggatctttatcatgaagcaaagagcaggaggacaggggattgatcttccaagggtggtcccccgatccgagtcatggcaccaaatttcacgcacgtccatgtgaagagaccacccaacaggctttgtgtgagcaataaagctttttaatcacctggttgcaggccggctgagtctgaaaaaagagtcaacgaaaggagataggggtggggccattttataggatttgggtaggtagtggacaattacagtcaaaggggggtgttccttggtgggcaggggcgggggacacaaggtgctcagtgggggagcttttgagccaggatgagccaggagaaggaatttcacaaggtaatgtcatcagttaaggcaggaacaggccattttcacttcttttgtgattcttcaattacttcaggccatctggatatatacgtgcaggtcacaggggatatgatggtttagcttgggctcagaggcctgacaaggatgttactcaggttactagttcctgcaactggatggatgatggtgttattcagtgtaattggaaataaagatgttacaagcaaatttgtggaaaattaatgttgagcccagctttggacatattgagattgtaaactctgagggacatattaccctattaggtagctggatattacgatttgggttccaggagagagattagggaattattaacatatgtatgttaattaaagccacagaagtgaagataactcagggaggaggtataaaatgagttcagacactgcacaagtctgaaccctgaagacaccaacattagaagtgaccagagaacagtggaaagtgtttcaaggtacccaagaggtgaactaaaggctgaaagaaaacaatgtaatttcaagaaggagggagtggtcagtagtttcaatgcccattaaggtcaaatcaaacaaggaaaaaaatcatgaccattggttgacaaagaagagctcaattcctttctactctattccccacctcctgccctgggagataaattctggcaaagtaaggagaacaggagctagattatttctttcccagcattctgttgtggatgatttaaaacatacagaaaaatgaaatgaataatacaatgaacacatgtatatcatccatctagattcaactgtcattgacatcgtaccttatttgctttatctaaccatctattcgtatactttttttggttgaaccatgttaagttgcagagatcatgacccttcaaccccacattctaagtcgacatctaaagccagattaaaatgaataaaggagcacacaggtggtaagtagataaaacagtgaatggaaattttgctttcaagaaatttgactgtaaaagagaaagctgctggaggagaacctcactcagttcaaggaagtttgtctattttgttattttgggtttttttttttgtttcttaaaatgtatgactccatatttttgtttattattaatattaggcgggagagcctagagcaagtttaactgctgatgggaaggagcgattggtgggagagaggctgaagggaagaaaggaagtacagaacactgagtgatgggaggggaggcttactgagctgggtgggaggactagcctgggagcagggaggaccaactctgcccagagggaagagggcaggaggagaggagagtataaatgcagatggagactgggtacagtggctcatgcctgtaatcccagcactttgggaggctgaggcgggcaggtcacttgaaatcaagagttcaagactaacctggccaacatgtcaaaaccccgtctctactaaaaatacaaaaattagccagttgtggtaacgcatgtctataatcccagctactcaggaggctgaggcaggagaatcacatgaacccgggaggtggagattacagtgagccgagatggcaccactgcactccagcctgggcaacggagtgagactccatctctaaataaataaataagtaaataaatgcagatggatgggagtctggggcagggggctgcaggggatttcatctaaagactttccctttttcgggaaccaggtggtgaagccataagggcaaggctgggaatggggacttgagggtcaaaggggtttcaaatacaatgaagaaagccaaccaggccaggcgcggtggctcacgcctgtaatcctagcactttgggaggctgaggcaggcatatcacctaaggttgggagtttgagaccagcctgaccaacatggagaaaccccgtctctactaaaaatacaaaaattagccaggtgtggtggtgtatgcctgtaatcccagctacttgggaggctgaggcaggagaattgcttgaacccaggagacggaggttgcagtgagccgagatcacgccattacactccagcctgggcaataagagtgaaactccatctgaaaaaaaaaaaaaaaaaagccacccaccactggcaggccagtggcattggagaccagtgggacaagagggccaaggatgtgagagcagttggagggatagacacaggggttgcgggggagggtgctaggaggaagtagagataagagaaggttgatgggaaggaataaatcaagtattggctctggaaaggcaggtgaggattaagatgcctagggtcagtgagaagagggtatatgagatttctcaggaggctgcagtctaattgtggcagtgggattggagctgaagagggcatctctcacctctctatcaactccactgaccatctagtcccttgcccagagactaggggtaggcttggtctcctgtccctgcccttctttccctctagaggccttgtctctgagcagtgaagaggaaaccggagcatccctccctgccagtgtccggttaccaagttttgggggcgggccatctggtgactgtgacaggagccccagcgccctggccagctcagtccattcctggagaagaacctgatgcagcgattcctgcagctcccgggggccgtggtgaggcctggggtcagaggggcctgcggagctgatcaagaggctgctagccctgtgctggctcccgaaggtgggcccccactccggtaccaggccttggagcctgaggagcttcggtggctgcaggcccaggaggaagacacgaccccagaagcatctctggaaggaccttgcccagaggccagccagagccagagccagccactacggtatagaggaacccacaggaaccccctacccacacagccaggaaggccagggatgggcagttgcactctcagcccagacctcttccggtcccacctcctctgatggaggcttaggctggcatttagggtccaggctgggcggagaaggtggtcaggggcaccgtatgggggctgagggtatgagtgaggagagatgaggggcttaactccctggaggctctgaggggaggaggatagtaaaatatttgagggttgaggtcccaccttgacctctttctccccacaggcccccactggagtgggctctggacgaggtttggggacaggatacagcacagacagggtttggccagccactgcctgccagtggactggaacttaggtggtaagaggtgacagcgaggtgtatatcaagggaggtgagcatgactgacccccagtgccatgccaggccccctggctggctccagccacccccagaagagtcccttaggctaggtcagactaggggtcaggtcagagtgagtgcagcagcgtaaggggatctgactatgggagataatgtttcatggccttagggtgttgtgccttagtccctgcctctgcctcttgggaacagaagttggtgggagtgaggacgagaggcccagggcggtctcacctcaggtggtggctgcggtctgtgtcagtgcatattctgtgtcagtgcatattcgacagtcaatcttacctgtgctggctgctttaggcccagtggtcctgccccctttcattccccttctcctgcaggggcctggaatgtactcactaggctgggtggggaggatgccctggggtgtgtgcatttgacaggcgcatgtggcatttgtgggtgtggtgaggaagggaatacccagagttaaaggagattgggcaaacttggccctccttccacggaagcccagggaaaagccatcccagggtgactcctcagaagatcagaggacccttggggctggatatatttgatcttagaagcctacatttatcatcaaaaatctcaactaggagtccactgaccattttggtgaatgagactggagaggccaagtttggtccaagttatctgtgtattagatgtgatgcggcatgtgtgtgtgtgtgtagggggacgtgtgtggggtgtgtgtgtctctatgagggtgtgggggagcggggagaggtcttgtgatatatgtctgtaggggacatgtatgggatatgtgtgtctataagagggtgtgggagagtggggagaggtctcctggtggtatatgtctggggggtttgtaggtgtgtaggtgagttgtgtgggtggtttatgtgtgtagagtttttctgtgggaggtgtctgtatgtgggggagtgtgtttctctgggcgttgtgtaggcaggattttgtgggtgtgcgtgggtttatgtatggattctactagtgtctgcgggacctgtaggtatgtttgtatgagctgtccgtgaggtgtaggtatgtcgggggacatgggagtgtctgaggtatatgtgggtggtatcaatgtgtagttgtctgtggggtgtgcgtatgaaggatcctgacgtggagtgttgtgcattcatatctcagggaagctggtgcccagctctgtcatttttcctaggccctcggtgctgcccacgcctacccagctcaatggtctgtacctatgaccatgcccctggtgtcctgagctcagcctcctacccactaagaaactcaacagtctggtctgtgtttggcagggtaagagggtgattgtcttctggccctggcctgaccctggaagagtagaaggtgtcctctgatttggggggcatccccccaggtgagggagtttcagataacatgatggggctggatattttcttctgtcctcacatgacagatagcgagggcctcagataatgctggaaggcatcatctttctattttgctttccatcaaaaatctctttgggaaagacagtttctaacattcttgggatagtgacttcttagtgcccctcttcttgtctgacgtcaggtactcacgcatttctgcagccctgtgactaagttgcgtgttctgtctggttcttctcttcctctcagcattcatcacttgtttctcagcattagcagcagtcatttgccactttatgattgttatcatgctctttcctctcctaacagtgctatccccaatttctgattttctgtcatttctaaatgttgcatgtctgtgactaactttgcacacattgattttttttttattttttatttttgagatggagtctcgttctgttgcccaggctggagtgcagtggcgcgatcttggctcactgcaagctccacctcctgggttcacgccattctcctgcctcagcctactgagtagctaggactacagacgcccgccaccacacccggctaattttttttaaattttttagtagagacggggtttcaccatgttagccaggatggtctcgatctcctggccttgtgatccgcctgccttggcctcccaaagtgctgggattacaggcgtgagccaccgtgcccggcctgatttttaatttttatcactgtgatatttctcaagctgggttcttgtgcctgggtcaaagctgtgggttatcagagtgtcatctgggaaattagtgtgtgtgagtccccacacacagctgctcaccacattttggaattgtcttggcaacatatgagtgcatcagtttcacacaattctatcagctatatatagacacatttttttcatgggtttattaacaattctctgatcacttcgtgatcaccagttctgcatcctctgagtatggttagccacattgttcactgcacaagggcatctggccaaggaataccagcccatgctccacacacagaatggggagcaacagctcagggctgtgtctatctgtaggggcatgcagattgaaaatgggcttgtagcagccctgacagtgaatgctgcaaagagaccttatacatgtatatcagttccttttttaaatttttttgagatggagtctcactctgtcacccaggctggagtgcagtggcgcgatctcggctcactgcaatctccgcctcctgggttcaagcgattctcgttcctcagcctcctgagtagctgggattacaggtgtgtgccaccatgcccggctaatttttgtaattttagtagggatggggtttcaccatgttggccaggctaatctcgaactcctgaccttaagtgatctgcccaccttggcctccaaaagtgctggaattacaagcgtgagccaccacacctggcctctatttcgaatattaaactttaatttaccatatcccaaatatttttccttttgttgctattatgggctgaattgtgtccctccaaaatgcatatgttgaagttctagcccccagtacctcagaatgttacctttgaggtgattaagttaaaatgaggttattaaggggggccctaatccaatatgactgatttctttataagaagaggaaatttggatataggcacgcagaaggaagaccatgtgaagacagagaagatggttgtaagagacagaaaaacccaaagtgtgtttctcctactctcatacacaccgctcaccagagagtgcttcacctctggccacaaaaatgggtggagatttctccccaccaacaacctgttctccagcagacactaactgggtgttctctaattcaagtcaatctagtgttagattttttaggttaagggctcagtgccacaagactgctctctgcttcagatgccaattccaagtggtaagttgtcagctatacttctgaccaactggctataaatcaggggttcccatgccaccctccttgggttcaactctgtgagtggctcacagaactcagggaaactttagttatatttacccatttattataaagggtagagacaaacaccagatgaagagatgcatagggagaggtatggaaggaggggtgcagagctcccatgccctctccaggcaccacaccctccaggcaccttcacatgttccacagtctggaagctctcgaaaccctatcctcttgggtttttatgaaggcttcatgattgatcgcatctttggccatgtgatcaactcaaccatcagccccactccccattccccagaggtcaaatagtgggattgaaagtttcaaccctcagctgggcacagcagctcacgcctataatcccagcacttttggaggccaaggcgggtggatcacttgaggtcaggagttcgagaccagcctgaccaacatgatgaaacccatctctattaaaaatacaaaaatttgccaggtgtggtggtgggcaactgtagtcccagctatttggaaggctgaggcaggagaattgcttcaacccagaaggtggaggctgcagtgagccgagattgcctcactgcaccactccagcctgggcgacagagcaagactcagtgtcaaaaaaaaaaaaaaaaaaagaaagaaagaaaaaaagttccaaccatctgataacaaaagatgcttctatcacccaggaaattccaagggatttccatgtcagttgttcctctcactcaggaagttataaaggtcttaggatctctgcgtgaggaactgggtggaagaccaaatattagaacagaagttctcctagcatccctattgtcaagagttttaggagctctgtctcagaaatggggtatagagaccaaatatatatttctttacaatatcacaagaatcatctacaagccaaagaaagaggctatagaagaaaccaaccctgctgacactttaatctcagccttccagcctccagaactgtgagcaaataaatttatgttgtttaagccaccatctgtagtacttcttgtttttttttttttttagagacaggttcttgctctgttgcctaggctggagtgcagtagcacaatcatagctcactgcagcctccaacatcttggtgcaagcgatcctcccacttcagcctcctgagtagctgtgactacaggcatgtgccaccatgcctggctaattttttttatttttgtagaaacaggatctgactatgttgtccaggctggtcccaactcctgagctcaagcaatccttctgcctcagtctcccaaagtgctgggattacaagtgtgagccaccatgcctggcctgtggttctttgttatggtggttctaggaagctagtatagttgccttatttttctcataaatttagtttttagataccaaagtttaaaaattaaacctaggcctggcacagtggctcacacttgtaatcccagcactttgggaggccgaaggaggcaaatcacttgagtccaggagtttgagaccagcctggtcaacatggcgaaaccccaactctactaaaaatacaaaaaatttgccaggcatggtggtgcacacctgtaatctcagctatttaggaggctgaggcatgagaatcacttgaacccaggaggttgaggctgcagtgagccgagattgcgccactgcactccagcctgggcaacagagcgagacttcgtctcaaacagaaaaacgaaaaaaaggcctgggcgcagtggctcacacctgtaatcccagcactttgggaggctgaggtgggcggatcaactgaggtcgggagtttgagaccagcctgaccaacatggagaaacctcatctctactaaaaatacaaaaattagctgggcatggtggcgcatgcctgtaatcccagctattctggaggctgaggcaggagaattgcttgaacccaggaggtggaggttgcagtgagctgagatggcaccattgcactccagcctgggcaacaagaacgaaactctgtctcaaaaaacaaaaacgtaccaattaaacctagccatattgttgctgctaataattttatgaccttaataaaatcttcccttccttcttttgtatttaaaaataattaactgttaagcaaatgcgggatttattttggggtgaaatatgtatacaagttaaattatttgctgctggccaggtgtggtggctcacacctgtaatctcagcgctttgggaggatgaggcgggaagatcacttgaggtcaggagtttgagaccagcctgaccaacatggtgaaaccctgtctctactaaaaatacaaaaattacccgagcgtggtggtgcatgcctgtaatcccagctacttgggaggctgaggcaggagaatcacttgaacccaggaggcagaggtttcagtgacccgagatcgtgccattgcactccagcctgggcaatgagagcaaaattccatctaaaaaaaaaaaaagtgctgcaaagcagttgtcccaatagcatttatttaagtggggcgggggcgggggggtgggggcggggggagattcttattggttcgtaatttatcaagttagaccttttatgaaattccccccatgacctttgaccttctgtttttaacctggtaccaaacagcttttatcatcgtctcgtggtgtttatgttttgaagtccaatagggtgagttgtctatgattgtttccttcttttcccaaaaatattctttggagttcttacctactgattttttttttccagatgaattttgctgtcacttaagtttgacaaaatgttccctttgaaatttcaaatttttgaaatgaagtatgagatctaaaaaaaaaaagaaacctgtgtattggctcagcattacccttattcctctcagccaagtgcaagggatcacttactcaaatctttattcatcccactagagtttaatgacttccttgaatggctgttcaatgttcagtgacaggtctggcttttgttgtgaggccatctatggagtctctgggacccttccagtccctggaatcagtttggtctgagaggtcaggacttggaaacatactggaggcagggcaagggcaccctgctcttgttttggcatctacctcttttccgctggtccttcttatccatccaactagtccttttccctgagccaggtccatactttcccaccccaaacccttcctcttgtttcctggctctctgtttctggctacattcatttcctacactcctgtatcaaaagtaccacaattgcttctcgttcccacagtgcagtgcggctgagcgcctcagagcccgcggggacgctgcggggggattgcggggagggggcgttgggaggtgccgatgttgggctgggcggatgagcgcatctgcgtggtgagccttccaacgtgcgcgagaaggacgtggaagaccttttctacaagtacggccggatccgcaagatcaagcttaagaatgggcactgccttgtgcccttcgccttggtgcgctttgaggacccccgagatgcagaggatgctatttatggaagaaatagttatgattatggccagtgtcggcttcgtgtggagttctccaggacttacgaagtcggggtgggtggccccgtggtgggaggaatgggccttctgcaagaagatctgatttccgagttcttgtttcaggacttcctcaggcagctggcaggacctgaaggatcacatgcgagaagttggggatgtctgttatgccgatgtgcagaaggacggtgtggggatggttgagtatctcagaaaagaagacatggaatatgccctgcataaattggatgacactaaattccactctcatgatagtgaaacttcctacatctgagtttatcctgagagaagcaccagctatggctactcacagtctcggtttgggtcaaggggccgtgactctccatactaaagccggggttccccacaccacttctctcctttcaggccctactgagacaggtgatgggaattttttctttattttttaggttaactgagctgctttgtgctcagaatctgcattccagattgaggatttagcgtcttaggaaattattttaattttttttttttaaagaagaaaaaaaaactacatactttctaccagggccatattagcagtgaaacattttaaactgcagaaattgtggttttggttcagaaacaagttgtatatttttcactcctgaatatgggtaaaaaatcagttccgtctttgtgggttgctctgctatggagatcaacagttactgtgactgagttggcccattctgcttaaaaatatgttttaaacgtttaagaaaaatgctcatcatcactggccatcagagaaatgcaaatcaaaaccacaatgaggtaccatctcacaccagttagaatggcaatcattaaaagtcaggaaacaacaggtgctggagaggatgtggagaaatagaaacatttttacactgttggtgggagtgtaaactagttcacccattgtggaagacagtgtggcgattcctcaaggatctagaactagaaataccatttgacccagtgatcccgttattgggtatatacccaaaggattgtaaatcattctactataaagacacatgcacacgtatgtttattgcagcactgttcacaatagcaaagacttggaaccaacccaaatgtccatcagtgatagactggattaagaacatgtggcatggctgggtgcggtggctcatgcctgtaatcccagcgtggctcatgcctgtaatcccagcactttgggaggccaagacgggtagatcacgaggtcaggagatcgagaccatcctggctaacacggtgaaaccccgtctctactaaaaatacaaacaattagctgggcgtggtggtggcgggtacctgtagtcccagctactcggtaggctgaggcaggagaatggcatgaacccaggaggtggagcttgcagtgagccgagattgcgccactgcactccagcctgggcgacagagcgagactccatctcacaaaaaaaaaaaaaaaaaaaaaaaaaaagaagaagaaaatgtggcacatatacaccatggaatactatgcaaccataaaaaaggatgagttcgtgtcctttgtagggacatggatgaagctggaaaccatcattctgagcaaactactgcaaggacagaaaaccaaacactgcaggttctcactcataggtgggaattgaacaatgagaacacttgaacacggggtggggaacatcacacactggggcctgttgtggcgttgggggaggagggagggatagcattaggaggaatacctaatgtaaatgacgaattaatgggtgcagcacaccaacatggcacatgtatacatatgtaacaaagctgcacgttgtgcacatgtaccctagaacttaaaagtataattaaaaaaaaaaagtttagtaattgaaaaaaaaaagtacaacaattgggttggttggaacagcagaaatgaattgtctcacagctctggaggccaaaagtctgaactcaaggtgtcggcaggaccatgctccctctgaaacccatagggaaatccttctttgccccttctagcttctggttgtttgctggcagtctctggcattccctggcttgtagacgcatctttccaatcgtctgccttcacatggtagtctccctgtgtctgtctctttaagtggctgtcttttgttttttgtgtttttttaatttcaatttaatctattttttgtagacacattgtttcaccatgttgccaggctggtctcgaactccagggctcaagtgatcctcccgtctcagcttcccaaagtgctgggattacaggcgtgagccgccacacccagcccacatggctgtcttcttatgggaaaccagacatgggattagagacccactctattagagtaggattgcatttaactaattacatctgcaacaactctatttccaaataaggttacattctgaggtactaggggttaagacttaaatatatcctttttaggaaggacacagttcaacccacaatattagctggccacatgtttcccctgatctgtactttacttgttccccctggctctggtccctcctcgggtcaggtcctgcctgagcctcccctggccatgtcccttctttgtgcctggaccctcctgattaataccccatccccacccttgtgccctcagctgacttcttgtacctcccaccaggcatgatgacctgaaggagatgctggacaccaacaaggattctctcaagctggaggccatgaagaggattgtggcggtaagaggggaaggaggaggcctccctccgggcggggcctgggtggccaagagcagctctccttagctccttgtagaccttccctctagttagtgctgtgcctctcgctttgtccctcttcccctaccttgaccccaccacccagatgattgcccgaggaaagaatgcttcagacctgtttcccgcggtggtgaagaacgtggcctgtaagaacatagaggtgagcactacctggtgagggattgcttgtccccacctcccccaggaccacactcaagcttggggtgaggaaggaaatgatttagcccctgggggcccgacctgctgagaaatgtctctgagccaggagaagacactgtctccatgtccctgaactggatgtggatcaaggtaaaggacccggatacactcaggggtgctctcccccactgggagagtttgtccccatggaccgcagctggctggggagatgacatcccaggggtaggggggtgggcacaggtgcctgctgagaagcgttctgctgagaaacgtgctctccccaaggtgaagaagcttgtctatgtgtacctggtacgctacgctgaggagcagcaagacctggccctgctgtccatctccaccttccaacgtggcctaaaggtcaggggtctcagtttgcctcccagggcctgggcctcgttggcgctgtatcggaggagtaggcctggggagaggccatgagcatgggagcgggctctgcagaccccttcctacctgcctaaaattgggagggtcacagtcagaagaggccagccagaccctcagagagtggaagctgggctcagaaggggcgtaagagatgaagtgggtacccagggcccctgtctctcttcccaggagcctgtggtaatggctgcttctagtatgaaccacttgagcccccggagagtggagagtctctagcaatggagaacccctcaaccctcacccccctttgtgtaaaggtgtgaattgtggtccacagccaggtagatttcaacctttagcagtggcctgaatcccccacaccattctcaccttttgtttcattttgcccaaggcctctagttggatttacatatgttaggtgcatgtataagtctcccccctaagggcttttctggttagtctaagacatcttgagggtaaagacagccatttcaaggccattctctccatattggatttttcagctctgattacaaccattaactcctctatttttgcatacctttatttatttatttatttatgagacaggttctcactgtgttgcccaggctggagtgcagtggtgcaatcatggctcactggagcctcgacttccctgagctcaggtgattctcccacctctgtctcctgagtagctgcgactactcagcctgcatcaccatgctcggctaatttttttgtagtttttgtagagatggggtttcaccctgttgcctatgctggtcttggactcctgggctcaagtggcctcagcttcccaaagtgctgggattacagggatgagctaatactcctagcctggatacttttagttcaaatttctgtgagagagattgtgaaaggtccagctcatcttttcatatccagaagttctgtaggttgctgggtagacaggattgctgctcaaatccagggcccaccccttgtccaatctgctatggccagcaagaggggttgacagtcggcttctttggggtgagagtagaaagcatggtcacttgaatatacaattcattcatttagtaaatacttgggtgtctctatgccacacattgtgctagatttctttttataagtcaaaaccatggaatccgtcttagattggcaagtaatcttttggtttgagtaagggttaagtataaaaactaatctgaaattgttgtacagattttcacctatagtctctaccaactgaccctgtcccccttttagaaaaccagagctcatttagttcaactcaatgtgataatttctttctgcaaagtgccaaatagtattttaggttttgtaggccttatagtctcaactatgcaactactcaattttgcccttatggtgcaaatgcagccattgacaagtgggcgtggccgtgttccaataaatctatataaaaaacaggcaatagacagattttatccaagggctgtagcatgccagcctttgctctagaacatgtctaacaggtcatcttttctgatagggacctcactccttcataaggcaacttgctccatctcaagacaactaccactatttggggtgttttttaaaccattctcttttgttgaaacctccacaactataatttttaaaaattgatttcaggctgggtgtggtggctcatgcctgtaatcccagcactttgggaggccgaagcaggcaaatcacaaggtcaggagttcaagaccagcctggccaacatggtgaaactccatctctactaaaaatacaaaaaattagcttggcatggtggcgggtgcccataatcccagctactcaggaggctgacgcaggagaatggcttgaacccgggaggcagaggttgcaatgagccgagaacgtgccactgcagtccagcccaggcgacagtgtgagatccatctcaaaaaaaaaaaaaattgatttcaggctgtactgcattatgactgcacctgtgaatagccactgtactccagcctgggcaacatagggagaccctgtatctaaaaaataaaataaaatttactacaggttcacaaaaggcataaagaataatataatgaatatccataagaaatgacacatttctcaaatagccaaagcctcctatatatcttctcttgtttatcattcataggtatgtatttattcctgtgctagtaatttgcatattgttaagcaatataaaatgttttgtaaatggtgtcatcgtactacatatgtattcctttaaaacttgttttcttttttgttgtcactggcttttggtctctcctgcatgttggaaccaatcatttcaatccagccttctcccttctttcaatcctagcccaggctagggccgtgttcactttcttaggagatccctcatggaatcaaacctctgactggcaagcagataatccaggtctccctacatcctgtctttgtacagttggtcccttgaaccccctatgaaaccctactctatttcattttatcagtttagcacagggtccaaaccagggtgattctgaatcttaattatgtccctcctgattttgtgtcttctttcaagatactgataagctatttggaccagggcaaaagactgaggcatagcatgtttccaggttgacactgatctgttaataaaccttctccaagtatatttcaccacgttgtagacccacctgactgtacagacagctggcatttttctatcttgttaggaaggatcttattcaatagcaataaataaataaataaataacacctttcatgtgcaaagggttgtgggtgacacagagataaaacagatgtgaattctgctcttaaaaatgcttggctattaggtgaaacaaaaggcctacctaaaaaatagcaatgcaggaaatgctatgagacttccacaaacatatcactgaaatcaagatactaatatccaccggcctagttaccccatcaaaaaggaaaacacattttttttgataactttctgtgaatctataatcatttcccaaataaaatgctcacacacaaaaaaggaaaacaggtttaagcagatgatgtgactatttgtctctaagaaaacagagactccttccttttcaataaatgtttctaacccatctgtttaaaagtcaattccagaattttgtcaggaattagcatcaattttacctgcaattgtgaggatcttgtcttgtctttttccatttcagaaagtcagggtaatatctacccttctttagtgttctattcccgtcattctctaagagtaatagtacaggcacacctcattgtattgcactttgcagatattgccagatattgcactttttacaaattgagggtttgtggcaaccctacatcaatcaagtctatcagtgccatttttccaacagtatgtgctcacattgtgcctctgtcacattctggtaattctcacaatattccaaactttttaatgattattatatgttatggtgatcagtgatctttgatgttactattgtaattgttttggggtgccacaaaccatgctcagacatgaaagtgaaattaatcaataaatgttgtgtgtgttctgactgttcccccatctccttcaccttgggcctcttcattccctgagacacaacaatattgaaattagatcaattaataaccctacaatggcctctaagtgttcaagtgaaaggaggaaccacacatctctcactttaaatcaaaagctagaaatggttaggcttagtgaggaaggtatgttaaaagctgtgataggctgaaagctaggccacttgctccaaacatttagccaagttgtgaatgcaaagtaaaagttcttgaaggaaattaaaagtgctactccaggctgggcgtggtggctcacacctgtaatcccagcactttgggaggccgaggcaggaggatcacttgagaccaggggttcaagaccgtctctataaaaaatttttttaagttagcctgatgtggtggtacgcacctgtagtcttagctacttgggaggctgaggtgggaggatcacttgaacccagaagtttgaggtgcttctccagtaaacacatgaatgataaagaaagcaagacaggattattgctgatataggaaaatttaagtggtctggatagacgatcaaaccagctaccacattcccttaagccaaagcctaattcataggcaggtcttaaatctctccaattctatgatggctgagagaggtgaggaagctacagaagaaaagacggaagctagtggaggttggttcatgaagtttaagtacagaagccatctccataacaaaaaaatgcaaggtgaagcaaaagtgctgatggagaagctgcagcaagttgtccagaagatctagctaagatcattgatagatgtgactatgttcaacaagagatgctcaatgtaaatgaaacagcctcttactggaagaagatgccatctagcactttcctacctagagagaagtcaatgcctggctttaaaaaacaggctggctcttgttaggggccaatgcagctagtgactttaagttgaggccagtgctcaatgaccattctgaaaatcctggggtccttaagaattatggcagatctcctctgcctgtgctctataaatggaacaacagtgccatgacagcacatctgtttgcagttatggtttactgaattttttaagcccactgttgatacctaccgcttaaagattcctttcataatattactgctcattgacaatgcatttgttcactcaagagctctgatggagaggtacaaggagattaatgatttcatgcctgctaacacaaaatcagttctgcagcctatggatcaatgagtaattttgacttttaagtcttattatttaagaaatacatctcgtaaggctagagctgccatagatagtgattcctctcatggatctggacaaagtaaattgaaaaccttctggaaaggtttatagaaaccttctggaaaggtttaccattatagatgccattaggaacattcatgattcatgggaggaggtcaaaatattaacattaacaggagtttggaagaagttgattctaaactccatggatgactttgaggggttcactacttcagtggaggaagtaactacatatgtggtggaattctacctagaagtagaagtagaattaaaagtggagcctgaagatgtgactgaattgctgcaatctcatgataaaacttgaatggatgaggacttgcttcttatgagtgaacaaagaaagtcctttcttaaaatggaatctgccgggtgcagtggctcacgcctgtaatcccagcattttgggtggccgaggtgggtggatcacgaggtcaggagatcgagaccatcctggctaacacagtgaaaccccgtctctactaaaaacagaaaaattagccaggcatggtggcgggcacctgtagtcccagctactcgggaggctgaggcaggagaatggcgtgaacctgggaggtggagcttgcagtgacccgagatctcgccactgcattccagcctgggcgacagagcgagactccgttacaaaaaaaaaaaaaaaaaaaaaaaaaaaaactcctggtgcagatgctgtgaacattgttgaaatgacaacaaaggatttagaatattacataaacttagttgataaagcagaggcagagtttaagaggactgacttcaattttttttttttttgtagagactggggtctccctatgttgcccaggctggtcttgaactcctaggctcaagcaatcctcctacctcagcctcccaaagtgttgggattacaggcacaagccatcacgcccagcctacattgtttttttaaagacataatgctattgcatgcttagtagactacagtatattgtaaacataactttttttttttttttggagataggatctcactctgttgctcagtctggagtgcagtggcatgaacatatgtagctcacttcagcctccaactccctgggctcaagtgattctcccacttcagcttcccaagcagctgtaactataagcataacttgtatgcaccaggaaacaaaaaatttatgtgactcgttttagtgcgatatttgctttattgttgaggtctagaatcaaacccacaatatctccgaggtatgcctgtaatatatagctgctgctgctgatagtgggaagacagtcctaagccccatgatcacaatacagtgtaaggaatgcttttatacgttctgtataggatgcagtaggaataaagaagaagggcttggggccgggcgtggtggctcacgtctgtaatcccagtactttgggaggccgaggtgggcggatcacttgcggccaggagttcgagaccagcctggccaacacggcgaaacctaatctctactaaaaatacaaaaaattagctgggtgtggtggtgcgcgcctgtagtcccagctacttgggaggctgaggcaggagaatcgcttgaacccaggaggtggaggttgcagtgagccgagattgcaccaccgcactccagcctggcgacagagcgagactccatctcaaaaaaaaaaaaaaaaaaaaaaaggaagggcctacacccctattttgttttaaacactgtggaagaacagcagcttttgcaatgatttctgggagaaaggagtgtaaggttgaactccggaagggagaccagcttgcatctgctgggcggtcacctcaggcattaaaacaggcacctccaaaaaaacccttacaaggaacaggaagtgtttcaggtgtttcagcaattttaggtgttctgaaagtttttcagtgtttctggaagtgaagctacccattgcaacacctgttcaggtgtcagatttctgcaaccagagccaaaattaagtgtcccccagatacccatcactggcacaccatccaggctccagtcaagcggcagggaagcaagagctagtggtcgctggggacagtgacttccaaaggtgtggcctccccccatcagggcacctggtgccctttcatagctctgcctccacctctgcctttaggatcccaaccagctgattcgtgccagtgccctccgtgtcctctctagcatccgtgtgcccatcatagtgcccatcatgatgctagctatcaaggaagccgcctcggacatgtcaccctatgtgcggaaaacagctgcccacgccatccctaaactctacaggtatgccccagccctgtcccacgctccccaggaggctggttcctaagttctcaacccacccctggcctttcctaagtcttgcctgctgcttctcagagggtttgaggagggtagtttgggggactgacagagatggaggagaacaataaggctggggtgcaggaggtgagcatggcttggacagatattgggaaggctggggctgagagtggcaaattcccctcaccgatttctccctcagtttggactctgaccagaaggatcagctgatagaagtcattgagaagcttctggctgacaagaccacggtgcgtgtataggggcgctccgggaggggtggtgaccggcagccggccttccacccttcgcgttcaccctctcgtctttgttctttccccagctggtggcgggcagtgtggtgatggcctttgaggaggtctgcccggagcgcatcgacctgattcacaaaaactaccggaaactctgtaacctgctgatcgacgtggaggagtggggccaggtggtcatcatcagcatgctcacccgctacgcccgcacgcagttcctgagccccacccagaacgtaagtgggcccagcccaggcagagcgggccgaagtgtgtcccggggaggcgcccacagacccgtcggtctccccgtccaggaatccctactagaggagaacgcggaaaaagccttctacggctcagaggaggacgaggccaagggcgcggggtctgaggagacggccgccgcggccgccccctcccgaaagccctatgtcatggaccccgaccaccggctgctgctgcgcaacaccaaacccctgctgcagagccgcagcgccgcggtggtgatggcggtggcgcagctctacttccacctggcgcccaaggcggaagtgggcgtcatcgccaaggcgctggtgcgcctgctgcgcagccacaggtgcgctccgcccccagccccgccccctccctcgcctcctgccccgccccacgggctgcccggctccgccccctcacgcccaccagccgcttccacctctgcccacccgctccacactgaccgtagtcctgccctccgcactggtcctctccccgcaacgacttgccccaccttttcccctcatccgctgacccttgccccaaccgaggggcccggggtgctctgacccgtcctctccgcagtgaggtgcagtacgttgtgctccagaacgtggccaccatgtccatcaagcgccgggtgagcctgcgacggcgggctgtcctcgctgtccgagggccgcttctgcgggcactggaggcgttgtcggggctgggaccggggccggggaaagggaagatggaggaataccctggctgtgcagaggatggggcaggggaggctccaaatacagatagggagcagggcctggatcctgaggggccgctgaggggatgtccagtggaaaaagagctagtcagatctgagatggacgagggaagacttgaggagtggagggcagtggtgaggaggcaaggatcctgggcgctgggtcaggataggaggggtgtctctgggcagcgaggcaggcctggggcttcggtggagctccctagctgcctctcttgtgccagggtatgtttgagccctacctgaagagcttctacatcaggtccaccgaccccacccagattaagatcctgaaggtgagtgagggacagaagtgcatgtgcttcccagccctccccaccccatgtacccactcaaataactcacagtggcccccctggtgcctgcctattcctggggctgagcccaggagcccatgactgccccagctggagctgtttgttcagggagctgggctaaggagggtcagggggagaagggaactgctctttgcctagtacctggtatacacctgctactcttcataaatgaagtaacctgatatcacctcataataatcccaggatgtgtacattatattccttttataaaaatatagactctggccaggcacagtggctcacgcctaatcccagcactttgggaggccgagacaggcagatcgcctgaggtcaggagttcaagaccagcctggccaacatagcaaaacctcgtctcaacgaaaaatacaaaaattagccaggcgtggtggcaggtgcctgtaatcccagctactcgagaggctgaggctagagaattgcctgaacctgggagacagaggttgcagtgagctgagattgtgccattgcactccagcctgggtgacaagagcgaaactccatctcaatctaagaaaaagaaaaaaagactctgggaggtaactgccccaggtcacataattctgctgactccaaggttcacacttttctctcccacccacagtgttatggcccccacacacctgccccctcaggctctcctgcaaacattcacggacaaggaaagtggcgggagcccatacctccatttgattcctgctctgctgcctcattattgagtgatttccttcagcaacagttaatcttcctaacccttgtgaacatccactatgttctaggggtacatgatgagcaaactaatcagggaccctgcctttgtggagcttacagatgtggggaggaggagacattaagcagttaatcacaaggcaaatgtaaaagtccacttacaaaatatggaagaaagtgtggagagctataagggcataaaatagggagacctcatctagtctggtgccagggaagttttcccggaggatatgagacttgagctgaagcctgagagatgaacatgaattatgcagggacagaaatgggaagaactgctccacgcagaggaaacagcatctgcgaagaccctgggttaggaagtggagtgggattggggcctggaagacaagggggacagtgatgggagatgggaggtagacagcaagcagatcattcagggacttacagaccatggtgaatacgatggtctccatcctgaaagcaataggaagctttaagttttcaatgcagtagggaggtgacatggtcatactgtaagcatactgtgtagggaatccacttaagaggcaaactggtcctcttgctttttagacaagtttcataacctgtcaattccctcatcagtgtgaggatgatgcagggctgtcatgaggattgttttctggtctatgaagtgtatttggaatgaaagcacagaaagtccactggccaacccacccattttctgcctctccaaccctccctgcagctggaagtgctgaccaacctggccaatgagaccaacattcctactgtcctacgggaattccaggtacaggccagctcccagccagaagggcctgggagaggggcccatcagatccttgtgccctggtgggtaaacctcctcttatgagcccaaggctggagaaactattatcttacattcccgttccaatgtgtttggctggctttgggccaaggaatcactggattgggggtggagttgtcaccccctttcccaagtcttagtcaccggcatgataagccataaaatgaaaggccacagccttcttgaaggtcaccctcaagcctgcagagtcactgagggatttctttgtcatatcccacagacctatattcgcagcatggacaaggactttgtggcagccacaatccaggccattggacgctgtgcaactaacatcggccgagtccgtgacacctgcctcaatggcctggtgcagctgctgtccaaccgtgatggtcagtgtttccctgagtgtctaaccgtgatgatcagagggtgtctgcctgcaggtctgactctgctggccactggatatccaccagtctgcctagacacaatgtgtatccattggtctgtctgtcttgatcagggcccaagtgttcctacacctctgagggctgctagagaactgaagggggttgagagaaagagccaagggcctggggcactgcaggtgtgtctgtccacctgagtgtggccatctgactgtcttggggtccacacactcatttttgttctgtagagcttgtggttgcagagtcagtggtcgtcattaagaaattgctacagatgcagccagcacaacatggagagatcatcaaacacttggcaaagcttacagacaacatccaggtgagggagaagccatattttcactccccacttcaaggtcctccccatgatttcaagactgtataattacatatgctagccttatcaaaagtaacttccaaaccttaggtcttcaggtggaaggagcagagacactggaccatgtgaccctgaccttgttacccctgatttgctttccctttggagaccctcaatgagcacgatggactttactactactcttgttttctctctaaagctctagccaaccatggttgagtgacaaatcttgtgtttttctatcgcactgctaagctgaaacatctaaacaaggcattcccaaagattctggagagtaacatggaaataaagtactgagggtacaatgaatccagaaaatcaatcttttacatcatgactgacttagggtcttgaaagctctatgctaatgaagccctagggaagaggggaaatgctgtctaggaaatgtctaccttttaacctctctctatctcaccacccccaactcccatttccagagaacccataatacaacaggccagcacagatgaggagtgctgtttccctggaagtccacaatcctacccacccactttcccgtatttacccatcttcactcctctcccacaaccacaggtgcccatggcccgagccagcatcctgtggctcatcggagagtactgtgagcatgtccccaggattgcacctgatgtcttaagaaaaatggccaagtcattcacagcagaggaggatattgtcaagctgcaggtcatcaacctggcagccaagctctacctgaccaactctaaacaggtaaagattaagagatgaccccccagatactctggtccccagaaactccctagacagtattcttttggccctccctaggcagggctgaactctagctcctattttggaaaagaagaatcagggaaggtggctggtctgcccacataaccaatgctaccccagtgcccacaaagaccttgtagtgctggtggtcactgttgaagagactctcctatgaagctgtgacctccagtctgctagtacaagagtcctgtctgccaccttggaactctggggctgtgaagaaccacagttgattgggataagggaagggcccaacagtggcaggtactgatgggagaacatgcatcccagatgtggtctgtgcttctttccaaagcttgacaatgcttggccagtctgtgccaaagataagggggtgagtctctgcttgggcttgggtggtgctggtggccactgtcattcccaaggtgaaaggttataagagatacacagccaaggatgaggctcaactaagttgtagtatcagggtgttcagagcctcctagctgtctggcatctcctgagatggttccaggagattctcctaaaatgaagcataatgtgctgagcttttcaaggtgtcagggacatcaaacaccatgacgatttccacactctcccactcagttaagcaggacagggattggcaaactactgcccataggctgaatttggcctattcctgtttttgtaataaagttttgttggaacacagccctgctcattcatttacaaattacctatggctgcttttgtgctacaacagcagggttaactagttgcaacagactgtattgcccacaaagcctagaatagttattctctggcccttttataaaaagactctgccaatccttgaagcaaaacctctggctaggtggctggggtctacagatttatagcagggatatcccctggagactgtagcatccctgccatgtccactgtgcgtgggagtctttggatggtggcacttatctttttcagtggcttctttgatccattgtggccagagtgagccccagaggctcaaggtgaggtaggcagggccaccaagtgctgtgactgtaatcaggagtcaaaggacagcagcaacatgtggaggcaactgagtctgtataattaaatatgctagccttatcaaaagtaacttccaaaccttaggtcttcaggtggaaggaggagagacactggaccatgtgaccctgagcttgttatcagtgttgtgggcaaagcagattggagagagagaagttagagggggagagagagaagttagagggagaaagagcaccatggggaagcgttcaatcgttgaaaaaatatttgtatacttcctttgttcaggtgggaggaaggagcaagtgggaggaatgtttgaaaagatgaagcagcctgggtggggagccacccaggtaggtgggagtcttgacatgctcagcaatgagccagagtcctaaaccccaggatggtgaggttggcatgttttcataagcctgggcctgtccacatgtcatttcccccaagttgtcactgtgagctacatgtgcatttgttcatttatttaacatatatgtaggtgggagtctgacatgctcagcactgagccagagtcctaaaccccaggatggtgaggttggcatgttttcataagcctgggcctgtccacatgtcatttcccccaagttgttactgtgagctacatgtgcatttgttcatttatttaacatgtaggcctactatttgcctggtactgtgctgcgtcctgaggatatgacaatgagtgagacacatttacaggtctccagatactcacagccaagtaggagaaacaggacaaaaataaacattttaaacacagcagtaacagctgtcatcagggttggcacagcgagctgtgggtatatacagctgaaccctcccctaggaatgacccctgtcagggaacccagagtaggctgttcaggcaaatggacactcacctccagggcgcccttcacctgcaagtgagtttttgcaggccccttagaatggttatttgattcaataaagatttttgtcctccctttctttctcctttcttcccagcctcttctgggagtggtaaagaagggggagtccttggggtactaggagggaggtggtttggatgcgcacatgaccatgcttgcaaaacagtagtgatgcttcccatcctgggaccatgagtggcaatctgcccagctaaaaggccacagtaatctcagtcattctctccaatttggacatgggcccacggcatgccagatcctggcccaggatgaggccaaggaaatgaccaagatgaggcctctgccctgctattgatcagcagataatcagatactagaccagaggccacaaaggcataacatgcaggtggcgggggatgggggggttggtaatcaaagtggctattacatccacctggatatagaccctggggaaactgcctagcaggttagtttgcttttatgtgtcaggtgagatgtgtggcaggagggtctgccaggggcacagtgggatctacaaccctcccatgtgaccgcctttacagtgaatagaagattctgacaaattttgcagaattgcttttaaaaacgtaaactttttttaatatgctaaaggtaatacatgcttatcatagaacatttggaaaactcagaaaattataagtttaaactattaataagtccaccatttagaagaccaccattaattatatatttccttattttttattcctatatatagtcattcagaagttgtacttttgtctattgtccaatattttaaacttttctgcttcttttcaatgctttcatatttaatacttttttttccccattcacatttcaattaaacttttcacttagaattttctccaggctgggttcagtggctcacacctgtaatcccagcactttgggagcccaaggtgggtgggtcatttgaggtcatgaattcaagaccagcctgaccaacatggcaaaaccctgtctctactaaaagtacaaaaaaattagctgggtgtggtggtgcgctgaaatctcagctacttgggaggctgtggcaggagaattgcttgaacccaggaggtggaggttacagtgagctgagatggtaccaccacactccagcctgggccacagagcaagatccatctcaaaaataaataaaaattaaaaagaatttcctccaaatttttttctactttcacatttttaaatcaattgtattagttttctgctacataataaattactataaatttggtggcttcaaacaacacacgtttattttctcagtgtctatgggtcgagaattcaggtatggcttagttggatcttatgcaaggctacaactgaggtgtcagccaaggctgagtttttatctggaggctgtactggggaaaggtccacttccaagtcacatggtgccacgatccacttccttgcagttgtaggattgtggccctggcttcttgctggctgtcagctgggggctgcccttgccttctagaggccgtccttagctcattgccataggggcctcccaacacggatgcttaatttctccaaagccacaagggagaaagtctctagagccagtctgctagcaagaccgtcttctttttattttttaatttttatgggtacatagtaggtgtatatatttatggggtatgtgagatattttgatacaggcatataatgcataacaatcacatcagggaatggggtatccatcctctcaagcatttatcttttgtgttacaaacaatcaaattacactctcttagttatttataaatgtataataaattattgttgactgtagtcaccctgttgtgctgtcaaatactagatcttacacattctatctaactataattttgtacccattaactatccccacttcccccacccactacccttctcagcctctggtaaccattattctactctccaactccatgagctcaattcttttaatttttagccctcacaaataagtgagaacatgtgaagtttgtttttctgtgcttggcttatttcacttaaaataatgacctctagttctatccatgttgttgcaaatgacaggatctcattcttttttattctttttttatagtactgcattgtgcatatgtaccgtattttctttatctatttgtctgttgatagacacttaagttgctttcaaatcttggctatggtgaacagtgctgcaataaacgtaggtgtgcagatataacttcaatatgttgatttccttacttttgggtatatacatagcattgggattgctggatcatatggtagcactatttttagtttttgtttgtttgtttgagatggagtcttgcactgtcacccaggctggagtgcaatggcatgatctcagctcactgcaacctccgcctcccaggttcaaacgattctcctgcctcagcctcctgagtagctgggattacaggcgcccgccaccaagtctggctaattttcatatttttagtagagatggggtttcaccatgttggccaggctggtcttgaactcctggccgcaagtgatctgcccgactcggcctcccaaagtgctgggattacaggcgtgagccactgcacctggcctatttgtagtgtttttttttgagatggtgtttcactcttttttcccaggctggagtgcaatggcgtgatcttgcctcactgcaacctctgcctcctgggtgcaagtgattcttcttctgcctcagcctcccaagtagctgagattacaggtgcctgccaccacgcctagctaattttttgtatttttagtagagacagggtttcaccatgttggccaggatggtcttgatctcttgacctcgcgatccacccacctcggcctcccaaagtgctgggattacaggtgtgagccaccgtgcccggcctatgtttagttttttaaggaacctccaaactgttctccagacatttccactaacagtgtacaagggttgccttttctccatgttcttgtcagcatttgttattgcctatcttttggatataagcctacttggggtgagatgatatatctttttttgttttgttttgttttttgagacggagtcttgctctgtcacccaggctggagtgtgcagtggtgcgatcttggctcactgcaacctctgcctctgtggttcaagtgattctcctgcctcagcctcctgagtagctgggactacaggcgtgcgtcaccacgccccgttaatttctgtacttttagtaaagatggggtttcgctgtgttggtcaggctggtctcaactcctgatctcaggtgatccgcctgcctcagcctcccaaagtactgggattacaggcatgagccacccgtgcctggcctttcattgtagttttgatttgcatttctctgatgctcaatgatgttgatcaccttttcatatacgtgtttgctatctgtatgtcttcttttgagaaatgtctattcagctcttttgcccatttttaaattggattattgaatttttttttcctattgagttatttgatctccttacgtattctggttattaatcccttgtcagatgggtagtttgcaaattttttcctcctattctgtggcttgtctctttgttgattcctttgctgtgcagaacctttgtaacttgatgtgatcccatttgtctacttttgctttggttgcccgtgcttgtggggtatcactcaagaaatctttgcccagtacaatgtcctggagaatttctctaatgttttcttttattagtttcatagtttgaagtgttagatttaagtttttaatccactatgatttgatttttgcatatggtgagagataggggtctggttttattgttctgcatgtggatatcccgttttcccagcgccatttattgaagagactctcctttccctaatgtatgttcttgatacctttgtcaaaaatgaattcacggccaggcgtggtggctcatgcctgtaatcccagcatcttgggaggccgaggctggtggatcacctgaagtcaggagttcaagagcagcctggccagcatggcgaaaccctgtctctactaaaaatacaaaaattagctgagcgtggtggcgggtgcctgtaatcccagctacttgggaggctgaggcaggagaattgcttgaacccgggaggcggaggttgcagtgagccaagatcgcgccactgcactccagcctaggggacaagagcgagacttcatcttcgtccccccccgccaaaaaaaaaaaagccactgatttttttttttttttttttttttggagacggagttttgctcttgttgcccaggctggagtgcaatgggtttttttttttttttttttttgagatggagttctcactctgttgcccaggctctggactgcagtgacgcgatctccactcaccacaacctctgcctcccgggttcaagcaattctcctgcctcagcctcccgagtagctgggattacaggcatgcaccaccatgcccagctaattttgtatttttagtagagacagggtttctccatgttggtcagactggtctcgaactcctgacctcaggtattctgcctgcctcggcctcccaaagtgcttgctaggattacaggtgtgagccactgtgcctggacaatgctactgattttttttttttttgaaacggagtcttgctctgtcaccaggctggagtgcagtggcgccatcttggctcactgcaaccttcacctcccgggttcaagcggttctcctgcctcagcctcctgagtagctcggactacaggtgtgcatcaccacatccagctaatttttgtatttttagtagagacaggatttcatcatgttggccacgatggtctcaatctcttgatctcacgatctgcctgcctcggcctcccaaagtgctgggattacaggcatcagccaccgcacctggccaatgctactgatttttatgtggattttgtatcctgcgactttactgaatttattagttctaatagttttttggtggaatccttaagattttttaaatataagatcatatcatctgcaaacaaggataatttgaattcttttccaatttggataccctttatttctttctcctgtctgattgctctagatagaacttccaatacagagtcttcttaataaaacataatcataggatcatatatagtcatataccacctttgccatatcctgttggttagaagcaagtctcaggttttgcccatacccaaggtgagggattgcacaaaggcatgaacaccaggaggcagctactggtggggaagaccttagaatctgtctgccacatccatctagagcttaaacttactcatgtgtaatgtgtgaattgaggatatatttcaattttttttaacagccagttttctaagcatgattagcaggcatctgcaaggtagcatgtatgttggcataggttatggaaaggaagtcagtgtttcctgcttaaaattcctctctgacaactggagcctgttggtgagggggagccttgttctgttcttggcacactggagtgtatctcagaggccttcttgaacagcctgtaattcctgcacatcctggctagatgaggtgggggtcttggtggtgcacacaggatgccacaatccacagggaatggccccttggggtggagaagggtaatgaattattataggcaaatcctgcagtgttgaggtggtgggccagccccttcctgtgttggttgttaacatgcagttaaggctgtggacagatggatccaaataccaaacagttctttctagaactaggcaaggacttgaaggagggagtctgtgatcagccagctgggaaatctgtggaggaagacattgtccaaaccaaaagagggatcagcagcctcttgataattgactatgttggtaagggcatccactagccctggccatttagatggtgtctggccaagagaggggcaggttggtgatgaaatctgttgtgatggcatcttattttcatatttttaagtctattctattagcggtgcatgggattgggattgcttatctgtgactataacagtatcgcaggtgctgctttgctggaagggactgagctgaagagggcctgtgggccagattggaggtaggaatgtggaatcatagtggctctctagagtggtgtggggcaattctgccaaagcagctgctcagactctgggtcagcatctgaggggctttgccccttatggacatctgcttgatgtccctgccagattagctgggttaaccatgtccaaggctacacgtaacagtatgtcaccataaacctcaggaagaacagagtcagttccaggctccctcctgccggcccctgatgcccttgggcattctgcttgttgaccacttggtggttttgatcttggtcacaagtgatggaaacatggagacctgggccagggcaggctccttatgtcagcaggtaggcagtgaagggaagcagatggggtgcagctccagcagatgcaggcctaggtgcagtactgatgggctccttggcctgggaaaagccccttaatgatcctgcttcttttctgtaaaatgggggcaataatgcctacttctcagaaggcttggggagattagatgagctagtgtggagcacctagcacagagttggtgccagaaggcacttgataagtgatggctgctaccgctgttgccatgttaaggcaggttagattaggccaagatcatggcagaaatggagatattttaggtctgcagttgtagcttccctgactgcagactgtgaaccctacatgaccttggcaaatgcatgggcagctgcagtttgccctgatgtcattagaagcttccagggaaggataaagacctctgagacccctgggctgctcagaatctactaaatgggtggatagggcatgagggtggcccctgccaaagggacccctgtttatctgccctgtctttttgttgtctaattccccctgggtggtggagcctggaaactgtgaggtccagcagagcattccatacttccacataccctgctgccctagagtaaagaggctggacaggcctggagtggtagggaccacaaatctagggaagaatggagtccagagccaggagtggggaaagtccaaaaggaaaacctcttttgttggcccaaggcagttgtcaaagttgggatcatcaggaggcatgtccagagagatgagagaaaattctgagcccagaacaagggcaggtggggagggacagctgggtggaagcgccggtcctaagcagggagaggagacgttctgcctgaaagtgtcggcttaaagaatctgtttctgagcctcctgtgtccccatccccccgtcagctgacccacctcttcctgttcctccagaccaagctgctgacccagtatgtgctgagtctggccaaatatgaccagaactatgatattcgcgaccgggcgcgcttcacccggcagctcatcgtcccttccgagcagggtggggccctcagccgccatgccaagaagctcttcctggcacccaaaccagctccagtcttggagtcatccttcaaaggtgggagctgaaatcaagggtaaccttcctaggggaatggaaaggaactggccagagtctctgccccagaccttcctgaggcccctagccaggcaccaggcttctgtggacagtcctgctccctggctcactccttttgtccctcctgtggcaccaggaattactctttcaccctcccataaccactgccagcatcatctcacctgagggtctgccttcctggccaggatggacttgtgcctcctctcctctcaggctcccttttccatctccctccctgagcagacactaggctttggaatacataccaagatcttaaataccaaggacccaggaaggcagaaagcaaaacaacacacaaaggagaggtgtatatttttataaaggtcctgagaaagcagttgcctgcattctgtgagcttagtcactacagtcagtccaaatcccaggccccagggcttcagccttgcctctgttcctgggcttggcccttaaggcctcttttcccaagacaacggccttgagatgggcctgggagggaagggtcctcccgctgcttctccgggccccaggagtggaagccaggaacctacacagaagagagcctccttcacaaagctcagttcttctgggtatcttttcgttctttttctcttccctggacctcacgaatggggagattctgagggtgggcacagctttgaaattctcccaggaagaaggcaacagtccctttctccccgacaccatcctcactcacaggcctgtgctgccctcctccagcagtgcctcaactctgatccagacttctacacactcatgctctgactgttcatccctccctgctgagtccagagcctgactagacgtgcatgctgagcagacaggtcggcagcatctgtgggcccagagtctcctcctgcccacctctgtaggctgcctttccctggccctcagtccctgctctggcctggccagacagccttttcttccagcatgtgggcctaaaggtgcagtcagggtggaagagccattagggcacacatccatctccttcccctacccacctgggaagtcccaaccagaatcaccacccagccccacctggaaaacagctcccagagctttccctcactgctgctacctgcctgacctctaaacctatccctagaccgggaccacttccagctgggctcactgtcccacctgcttaatgccaaggccacaggctaccaggagctcccagactggccggaggaagccccagacccatctgtgcgcaacgtggaggtcagcggggtggagggttgaagtgtgtgtgtgtgtgtgtgtgtgtgtgtgtgtgtgtgtgtgtgtgtgtgtgtgtgtgttggtgggggcagacagtagggagccctggcagtgccggcccagccctcctaacaccctcccccacacacacaggaagaagatctctcccttattgagactcacgtgggcctgttgggcgaatacactgaggtcccaccttcgtgtgacgtgtgctctctcccctgccctgtctgtgtccctcttcttcccctgtgtgttgtgctcctgggccttcccatactctgtttccaccttggtttggcagtgctcctctgtgagcagcattccctcccctccatggacagtgcccctttcttcctcctctgttattccctttgtgggacagaccaggtagggcctcacaaagaggtggaataaagggtaagggcttgtgcctgcctgccttctccccaaccatgatgaaatgaccctgcaccctacccccatctccaggtacctgaatggaccaagtgctcaaatcgggagaagagaaaggagaaggaaaaacccttctactcggactctgagggggagtcaggccccacggagtccgcagacagtggtgagcagatggcagagctggggtcctctgtgctctgcccatgcatctgtgtgactgactatatgaggggtatatgtatatggttgtgtgtctaggggtgtgcacctgcttgtgaattgtttgtgcacctgagggattcatgttccaggtgtgtgtgcttgtgcaggtttctatccatggagtccatctgtgtttctgtcagttccagctggcatgtagggctgggggcaggtcagagaggtttgagggttcagtactgaatgtgaaggtggaacccaggtgtctgctccagacccaaggaggcctgcatatgagggaggaggcctcatattgttcctccacagaccctgagtctgagagtgaatcggacagtaagagcagcagtgagagcggctctggggagtccagcagtgagtccgacaatgaagaccaggatgaggatgaggagaaagggagaggcagtgagaggtgagaagggagctagccagatggctggtggggttcagggggctttcctggaaagagggctagcattgagctttagccagtctcctaagagcccctgagcccctcgtgagctgggtggggctgtcagctcacatgacgcctactttcgctggctgcaggagatctctgaggcctcatgggctggtgtggagaagcaaccagagtcctagagcctgagctggcacaagctggcttcaagctctcacggggtccctgctataggacctcaggtgtgaaccctcctggctcaggctccccacaccactccagcttttcagcatttctcctgcttctgtgaagcaaggagggagtgtccaggccaggcctgagccaacctttcccactccttcagtgaacagagtgaggaggatggtaagaggaagacaaagaagaaggtgccagagagaaaaggagaagcgtcatcctctgatgagggcagcgattccagcagtagctcatcagagtccgagatgacatcggagtccgaggaggagcagttagaacctgcctcctggagcaggaaaacagtgagagccttggggcagagtcagggtgtgctcatgggccagggccctccccaacctctgggccaggcccagacatctatctccctaccatccagaacagaacatgacatcttctacccaacccagaacatgccaaggtgctccccttccccacacccacatcccatttttctctttcagcctcccagcagcaaaagtgctcctgcaaccaaggagatctccctgcttgatctagaggattgtgagtttgggtggtaaaagtcacaggggaaaggaggcctggggagcatgaattagaacagcccatagggactctggatcgggttcctcaggtcttgtgggagcaggggagcagacagaacatatcttcaggcctgagagggcagcagggctgacctccccaggtctggggttgaggtctaggaatgggtattttgcgagagcctccaggcagccatgtgccccgctgtccatggtgctgaaatgcgtgctccttgatccctaggctccctgctcaacccaagccacctccactttgcctcctcatagtcttatctactcccacagtcacccctcccagtgtccagcctgtgtctcccccagcaattgtgtctaccagtctggctgctgacctggagggcctgacactcacagactccaccctggtaccgtcggtgagtgggatggaggaggggaccgggctggggcagggacacatccctgtgctgcatcctatggtgtggatgtgtgtggggggtgggtgtgatggaggatgtgatagctttgagtcccagctgctggatggccctaggggacaatgctgggacaggctctctccatcttgctcagttctgtccttccctacccctccactctagcttctgagtccagtatcgggtgttgggcggcaggagctgctgcaccgggtagctggcgaggggctggctgtggactacaccttcagccgccaacctttctccggggatccccacatggtgtccgtgcacatccacttctccaacagctctgatacccccatcaagggcctgcatgtgggcactcccaaactgcctgctggcatcagcatccaagaatttcccgaaattggtgcgaagggctttggatggggtggaggaggaggctcctgggcagagtcagtctttctgtggttgctgataccctccttgtgccaggccaggggccaagctataggggcacagagatagcatctaacatgatcaacactctggtggacaagacagatgatgaaataagcaagttcacatcagggcgggaggtgcttgcagcagcagatttgggccttggttgtttcaggactaacttaaatgtggtgagggtgagtgggggaaagggtgcttagagttcaggaggaaaccgggaacagtctccagcagccaagaaagccaagattctgtagagggctggtcagctgtgacagtggagaggagagtagggctaggctgggttctagacctatcaggtgatggtggccctccctctccccttcactgccttataccacttcagagtccctggcacctggagaatctgccactgctgtaatgggcattaatttctgtgactcaacccaggcagccaacttccagctgtggtatgtgcccaactcgaggtgggggtgagaggatgggctggaaagggacagggtaacaatgaactggaaatggaggtggtgcttagtggggatacatcatgattgggtgggtctggaagccatctcaggccctcattcctgacctcactctttcactgcctccaagctgtgcctctacacagggtgggaagtgaggggagagatgacagccttaattcttctccgtttcctcccacccctcccagcacccagacccgacagttctacgtctccattcagccacctgttggggagctgatggcccctgtgttcatgagtgaaaatgagtttaagaaggaacagggtgagtgctccctgggagtgggcagagagggaagtatagaagctgactccagaatgtccagcttggatggtagggagaatggtggtgtccttcatctagaccaggggtcagcaaactttctgtaacgggccaaagataaatgttttaggctttgagaatcatgtggtctctgttgcagttacaacacgactgtggctgttgaaacatagaaacatccacagacagtatgtaaatgaacgagtatggctgtgttccaagaaatttccatttatatttatagatactgaagtttaaatttcatgtaattttcatgtgtcatgaaatattaatcttttgattgctcccccaacacttaaaaaatattaaaaacattgtgggccatataggtggtgggctggatttggtctggaggctgtaatttgcaaaacctctggcctagaagaaagaagagtggcttgggcaagggaggagggaagatcatggttagttttggataagctgattttgaaatgcatttgggaaattcaggaggagctatttagtatgcaactgaaaatatgggtctatgcccaggaaacactttgaagctggagtcatgaacatagaggtggtaatggaagctgtgaatatgaatgagatcactctgggaggtgggagaaaataggaaggccaaggacagaaccttgggggaaaacctgaattctgcagaagaaagaggaggggagggataagagaaggagcacagggagaggtgggaggagaaccaggagagacaacaaggcagaaggtgtctgcaaaccacagttacctaagaccttcagagtcagcatataaaaggctactgccaacctgagggagagagggtcattgctaaaggagggacagaggccaactgcagtgggttgagggagaccacggctcaagtacatgcagtcctctttggaggactttagccatgaatgaggagggagacagggcattggcacgatgaaggatctcacttctggaaaggattttttggagacggggacacttgaacatgaacagattgaaggaacaaaaacaagaaaatgttattagtcatgaatgaaggggatagaagaaacaggagagggatgtcagtttctaaaaggaggtgaagaataggggaagcagtggagggaggaaagaggctgaagagaagactgctggtgtgcaggagagcagacggaggagctcccatggggggcctggatcatgtgagtggagagaagtcagccttgcagaatgaggagttctgggggtgctgtgaaggtttggaggcttcaggagccctggctaggtctggagctgctactgcagaggtacaattaaaaatgtacctgtgaatgctgcatgtgactactggattctggctgagagatcacagcagccacctgtgatctttttgtgagggcttagcttccaggagctgagtgggagttgaatgtgggttggagggccccccaggaaagatcaaagggtgtgaggttcaggatgggcgaacctcttaagaactgactggccactctcaaggggctggtagcccagatgtctgatggaggaagcgccaaatcagtctttggtaacaacatggataaaggcctgggtgggaggggtagagaggctgacaaaggcttcctgagggagggcccagtctgagagggaagtaccttctccccaagactgatgatttaaattctgacctgccctttgcatgataccttcccagcctgggagaacttgttgctcagtaagcagacccaggtgctggcctctgtacccaccatggcctctgccctcatcacgacctctacccccaggaaagctgatgggcatgaatgagatcacagagaaactcatgctgccagacacctgtcggagtgaccacattgtggtgcagaaagtgactgccactgccaacctgggtcgtgttccttgtgggacatctgatgagtacaggtactaggccaccagtagaggggaaatgatgagcatgggggccctggtttgaaggaggagccccagctgctgatccccttccaaacacagtcacccttagcagctcttcctcaccccttctattcccacctcaggtttgcagggaggacactgactggtggaagcctcgttctgctgaccctggatgcccggccagctggagctgcccagctgactgtcaacagcgagaaaatggtgattggcaccatgctggtaaaggatgtgatacaggctctgacccagtgacttccaaatgctgtgacctgtttggctcccatctatacctccccatgacacctaggctgtcagtctctctcatctttctctctctctctcatcatcctcctcatgccagatagcattcagggtgtcctctctccctctggaggaccaagccctcccctaatgccctccccatggattccttagtgatctgtgcagagagagatggcagccactcccttcagtcctcccagatttctgtagctatttatgtagcaggctcaataaa

SEQ ID NO: 15426 - DNA, 50297 bp, Homo sapiens
cggaccggcccgccttcccttcctccgctccagccggcctccggccccgcaacctcctcctcggcgaagtctccctggccgccccatgtcggccgcccccgcctacagcgaagacaagggcggctccgctggccccggggagcccgagtacggccacgaccccgcgagcggcggcatcttctcctccgactacaagcggtgagggagcccgccaggaagctcgcgggagggttggggccggggaccgggcgaggcgcgcgggcaccatggacagcgcccggccccagcgccggccccgccccggccgcgccgaccggaagcccgcccggccccctcctgcggcctggagccccggcccagcgcgggcagcgctggcaccccggctccaggggccggcctaggacgcggaggggggcagataggggctggcgggggatgggccagctcagtttcgagaggagaaaccctccggttccaggtgtttctccggtttgcggcgttgcgttaggggttcccttcctttttcgtgctaggcgggttggcttcccaaaaatgtgggggaggggtctgagtcagcgaacttgagcttgagcctggggcctcttcaggaaggcgggccctggatgtacttgcacagcctcccagcttggccctgctgcaaattcatttcccctccctctggtccccatctccatctgaccctcacatccctgctcctggcattgcccctgtagttcagctccaccttcacaccctcccccacctttgattcgttcgtttgtttcttcatttgtttattcgtaaattctgcaacaagcatttatgaaaagccaactgtgtcgagtcctgaactagtcacggaatacaactgtgaacatgagacccttcttgtcctcacgatgctctagaggggagcacagatgaagaagcagtcagggacagtcgagtgtaatgggggcagtgggagcagggagaggacctagtctctggcgccggagagaaggaagacaggagcgtgaggtatgttccaggcagaggaaagggctttcaggaaggttgagagccaggccacaatctgtgtgagccactggactgaccagaaaagagggtggggaggactcctgaaggattctaagcaggcgacataatcagatttatattttagaaggacgtcaggctgctgcattgtggagaagagattggaggtgggccagattgaacaagagacaagggaggtgggtcttgaagttcacaggcctggcatgattgtggcctagaccaggggagaggcagaagatttgaggctgtggaagaggtggaagcctcagacctgatgattaattggatattgggtgggggtttagagggacagggggagaagatgaggattttcacgcacgtccatgtgaagagaccaccaaacaggctttgaacaataaagctttttaatcacttgggtgcaggccagctgagtccgaaaaaagagtcagcgaagggaaatggggtgggaccgttttacaggatttgggtaggtagtggaaaattacagtcaaagggggttgttctctggcggtggggggacacaaggtgctcagtgggggagcttttgagccaggatgagccaggagaaggaatttcacaagataatgtcatcagttaaggcaggcacaggccattttcactcttcagttacttcaggccatctggatgtatacgtgcaggtcacaggggatatcatggcttagcttgggctcagaggcctgacattcctgtcttcttttattaataagaaaaataacataaaatagtgttgaagtgttggggcagcaaacattttggcggggggtggtatggagagatactgcttctccatagccttgaagggctgcttcgagcgggattggggtggcgtgggaacctagagtgggagagattaagctgaaggcagattctgtggtaagggatgatattgtggggttgttagaagaaacatttgttgtataggattattggtgatggcctggatacggttttgtatgaattgaaaaactaaatggaataagagaaggagaaaaacaggtattaaaggactaagaattgggaggacccaggacatccaattagagagtgcccaaggaggttcagcatagccctgccagcaaagattatttatttactttaagagggagttaagactggcagtttggggatagcaccaggagatatcagctgtaatggtttggagaaacagtgtaaaccggcagtgtaaacaagagcagggcatgtatgagtagttgagtatggtgaataggagtatgactagtcagaagatagtagggatgacaagttttctggggcacagtccaagttggtctggtgtctggaatgagactggggcctaataaaaaggagcatctatacaggagcttgaatgggctgtaccctgcagcattccgaggacaggcccaaattctgagaagggcaagtggtaaaagtattgtcagtcctttttaagttggtggctgagcttggtgaggtgtgtttttaaaagaccattagtccgttctaccttttctgaagattgaggatggtaaggggtatgaaggtttcactgaataccaggagcctgagaaactgcttgggtgatttgaccagtaaaggctggtctgttattggactatatagaggcgggaaggccaaactgaggaattatgtctgacagaagggaagaaatgaccgcagtggccttctcagaccctgtgggaaaggcctctacccatccagtgaaagtatctacccagaccaagacgtattttagtttcctgactcggggcatgtgagtaaagtcaatttgccagtcctgggcagaggcaaatccccaggcttgatgtgtagggaagggagggggcctgaacaatccctgaggagtagtagaatagcagatggaacactgagaagtgatttccttgaggatagatttccacaatggaaaggaaatgagaggttctaagaggcaggctagcggcttgtaacctacatggaagaggttatgaaatgacgaaagaatagaatgggcctgtgaggctagaaggagatattttccttggtctgagaaccatttgccttgtgtgggaagagattcataggtgtaagtttcattgggggagtaggtaggagtgactgatgagaaggagaaaaactggccatgagggacagaagttggaatgctagctgcttttttagctaccttatcagcataagtgttgccctgagcgatgggatctgatgccttttgatggcccttgcagtgaatgactccagcttcctttggaagtaaagcggccttgagaagagtttttattaaagaggaattaatgatggaggacccttgtgtaatgaggaaagctttttgcccatataacagcatggaggtacaggatatggaaggcatatttagagtcagtataaatattgacacatagtccttttgcaagactgagggctcgagttaaggcaatgagttaagctttctgagaggtagtggaggggggcagaaagtatatgcgtcaggtgtgaggaagaaaatagattttggaagttatgagaactgtagagagtgagttgagcatagtttgtgattttgagggcctctgaaagtattaaagcagcggcagccgctgcacgcagacatgagggctaggccaaaacagtaaggtcaagttgttcggacagaaaggctacagggcgtggtcccagctcttgtgtaagaattccaaccgcacagccctgcactttggctgtgtgtgatgaaaaagggttgggatgaattagggagacctagtgtgagagcagcttctacggctgtttttaaggaatggaaaggagtggcaaaaggatttaggatctgtggggtcagctaggtttgcttttgtgagtttatataatggtttagtcaggatggtaaaactaggtatccaaaggtggaagtacctaaccatcccttgaaaggaaaggagttgttgctttgtagaagggattggggttcgggagattagccggacatgatcagcagggagagcacgtgtgttttcatgagaactatgccaagataggtaatggatgaggaagaaatttgggcttgactgaagtaatgggggctgtccgtgaagccttgcggcagtacagcctaggtagtttgctgagcctgatgggtgtcagggacagtccaagtgaaagcgaagagaggctgagatgaagggtgcaaatgaatagtaaagaaagcatgtttgaaatccagaagagaatgatgggttgtggaggggttgtggagggaggtattgaggaggagagtatatgagtttggcaccacggggtggataggcaaaacaatttggctgacaaggcacagatcctgaactaattgtaagacttgtctggtttttgaacaggtaaaatgggggaattgtaaggagagtttataggctttaaaaggccatgctgtaacaggcgagtgataacaggctttaatccttttaaagcctgctgggggatgggatattgacattgagcacggtaagggtgattaggttttaatgggatggtaaggggtgcatgatcagtcgccaaggagggaatagaggtgtcctatacttgaggattaaggtggggagatacaaggggaggatgtgaaggaggctttgaactgggggaaaaggtggcaatgaggtgtggctgtagcctaggaatagtcagggaagcagataatttaaagtgtctcggcctaataagggaactgcgcaggtggggataactgaaaaggagtgcataaaagagtattgtccaagttggcctcagagttggggagttttgagaggtttagaagcctggccatcaatacccacaacagttatggaggcaaaggaaacaggcctttgaaaagaaggtaatgtggagttggtagcctccgtattgattaagaaggggacggacttaccctccactgtaagagttacccaaagcatctgtgatggtccaggaagcttccaaggcgattgggcagtgtcagtcttcagctgctaagccgagaagatttgggaaggagtcagtcaggcagccttgggccagagttccaggggctctgggagtggctgccaggtgagttggacagtccgatttccagtggggttccacacagatgggacaaggcttaggaagaatcctgggctgtgggcattccttggcccagtggccagatttctggcacttgaagcaagatcctgatggagaaggtcctgtaggaatgcttgactgctgcagcttaggcattttgaagttcttgtgtactggagatgtggctggggtttctctcacagtggaggcaaggaactacaactcagaaatacattgctacttggctgcctttactctattattgtacaccttgaaggcgaggttaattaagtcctgttatggggtttgagggccggaatttaatttttggagttttatttaatgttgggagtggattgggtaataaaatgtatattgagaataagactgccttttgaccttttagggtctagggctgtaaagcgtctcagggttgctgcccaacgagccatgaactgggctgggtttttatatttgatgaaaaagagcctaaatactaactgatttggcagaggtcggataaaggaaaaggagcgttaaccttgactatgcctttagctccagccacctctttaagaggaaattgttgggcaggttggggagggctagtcgcagaacaaaactgtaagccggactgggtgtggggagaggaggtgatagaaggattatagggtggaggagcagaagctgagaaagaattggagtctgattcagcctggtggggagtgacctgaggagcattctggggattaggtgagaggtcagatgggtcggtagaaaaggaagattggaagattgaaaagacgcagcgacgcttggggttgggactgaggggacaggcgggagggaaagaaggaggatttgggatgagtcgcattgggaacagagactagggagggaccgatgtgtaaaagaatgcctggacatcaggcacctcagactgtttgcccattttacaacaagaattatctagatcttgtaggatggaaaaatcgaaagtgccgttttctggctatttggaaccattgttgagtttgtattggggttaagcggcattgcaaagaaaataaggcatttaggttttaggtcaggtgtgagttgaagaggttttaagttcttgagaacacaggctaagagagaagaaggaggaatggagggtggaatgttgcccacagtgaaggaggcaagcccagagaaaagagagggtagagacacggagagaaggggtggggggtgctttgccccccaggaaagtggagagaaaagagagggtagagacacagagagaaggagtcgggggtgcttgtcccccaggaacgtggagagaaaagagagggtagaaacatggagagaaggggtggggggtacttgccccccaaaaagtggtgtttgccactaagggtgaaagatcaaggcaggcatcctcgcggtgatcagacaactctgaaacgtgggtgaataatcaagcaggcgtccccgcagtgattaaacaccaagggaagactgtcttcctgagtccgtgatcggcgccggagttttgggttcacagataaaatgcatttcctgtctctaccagaaaaggaaaggaaccgaaattaagagaagggagagattgaaagatggcaccaagattgaaaggagaaagaggttgagggatagtgagagaggttggagaagagagtaaaaagaggccgcttacctgatttaaaattggtgagatgttcctcaggctggttggtctgaggacccgaggtcattaggtggatctttatcatgaagcaaagagcaggaggacaggggattgatcttccaagggtggtcccccgatccgagtcatggcaccaaatttcacgcacgtccatgtgaagagaccacccaacaggctttgtgtgagcaataaagctttttaatcacctggttgcaggccggctgagtctgaaaaaagagtcaacgaaaggagataggggtggggccattttataggatttgggtaggtagtggacaattacagtcaaaggggggtgttccttggtgggcaggggcgggggacacaaggtgctcagtgggggagcttttgagccaggatgagccaggagaaggaatttcacaaggtaatgtcatcagttaaggcaggaacaggccattttcacttcttttgtgattcttcaattacttcaggccatctggatatatacgtgcaggtcacaggggatatgatggtttagcttgggctcagaggcctgacaaggatgttactcaggttactagttcctgcaactggatggatgatggtgttattcagtgtaattggaaataaagatgttacaagcaaatttgtggaaaattaatgttgagcccagctttggacatattgagattgtaaactctgagggacatattaccctattaggtagctggatattacgatttgggttccaggagagagattagggaattattaacatatgtatgttaattaaagccacagaagtgaagataactcagggaggaggtataaaatgagttcagacactgcacaagtctgaaccctgaagacaccaacattagaagtgaccagagaacagtggaaagtgtttcaaggtacccaagaggtgaactaaaggctgaaagaaaacaatgtaatttcaagaaggagggagtggtcagtagtttcaatgcccattaaggtcaaatcaaacaaggaaaaaaatcatgaccattggttgacaaagaagagctcaattcctttctactctattccccacctcctgccctgggagataaattctggcaaagtaaggagaacaggagctagattatttctttcccagcattctgttgtggatgatttaaaacatacagaaaaatgaaatgaataatacaatgaacacatgtatatcatccatctagattcaactgtcattgacatcgtaccttatttgctttatctaaccatctattcgtatactttttttggttgaaccatgttaagttgcagagatcatgacccttcaaccccacattctaagtcgacatctaaagccagattaaaatgaataaaggagcacacaggtggtaagtagataaaacagtgaatggaaattttgctttcaagaaatttgactgtaaaagagaaagctgctggaggagaacctcactcagttcaaggaagtttgtctattttgttattttgggtttttttttttgtttcttaaaatgtatgactccatatttttgtttattattaatattaggcgggagagcctagagcaagtttaactgctgatgggaaggagcgattggtgggagagaggctgaagggaagaaaggaagtacagaacactgagtgatgggaggggaggcttactgagctgggtgggaggactagcctgggagcagggaggaccaactctgcccagagggaagagggcaggaggagaggagagtataaatgcagatggagactgggtacagtggctcatgcctgtaatcccagcactttgggaggctgaggcgggcaggtcacttgaaatcaagagttcaagactaacctggccaacatgtcaaaaccccgtctctactaaaaatacaaaaattagccagttgtggtaacgcatgtctataatcccagctactcaggaggctgaggcaggagaatcacatgaacccgggaggtggagattacagtgagccgagatggcaccactgcactccagcctgggcaacggagtgagactccatctctaaataaataaataagtaaataaatgcagatggatgggagtctggggcagggggctgcaggggatttcatctaaagactttccctttttcgggaaccaggtggtgaagccataagggcaaggctgggaatggggacttgagggtcaaaggggtttcaaatacaatgaagaaagccaaccaggccaggcgcggtggctcacgcctgtaatcctagcactttgggaggctgaggcaggcatatcacctaaggttgggagtttgagaccagcctgaccaacatggagaaaccccgtctctactaaaaatacaaaaattagccaggtgtggtggtgtatgcctgtaatcccagctacttgggaggctgaggcaggagaattgcttgaacccaggagacggaggttgcagtgagccgagatcacgccattacactccagcctgggcaataagagtgaaactccatctgaaaaaaaaaaaaaaaaaagccacccaccactggcaggccagtggcattggagaccagtgggacaagagggccaaggatgtgagagcagttggagggatagacacaggggttgcgggggagggtgctaggaggaagtagagataagagaaggttgatgggaaggaataaatcaagtattggctctggaaaggcaggtgaggattaagatgcctagggtcagtgagaagagggtatatgagatttctcaggaggctgcagtctaattgtggcagtgggattggagctgaagagggcatctctcacctctctatcaactccactgaccatctagtcccttgcccagagactaggggtaggcttggtctcctgtccctgcccttctttccctctagaggccttgtctctgagcagtgaagaggaaaccggagcatccctccctgccagtgtccggttaccaagttttgggggcgggccatctggtgactgtgacaggagccccagcgccctggccagctcagtccattcctggagaagaacctgatgcagcgattcctgcagctcccgggggccgtggtgaggcctggggtcagaggggcctgcggagctgatcaagaggctgctagccctgtgctggctcccgaaggtgggcccccactccggtaccaggccttggagcctgaggagcttcggtggctgcaggcccaggaggaagacacgaccccagaagcatctctggaaggaccttgcccagaggccagccagagccagagccagccactacggtatagaggaacccacaggaaccccctacccacacagccaggaaggccagggatgggcagttgcactctcagcccagacctcttccggtcccacctcctctgatggaggcttaggctggcatttagggtccaggctgggcggagaaggtggtcaggggcaccgtatgggggctgagggtatgagtgaggagagatgaggggcttaactccctggaggctctgaggggaggaggatagtaaaatatttgagggttgaggtcccaccttgacctctttctccccacaggcccccactggagtgggctctggacgaggtttggggacaggatacagcacagacagggtttggccagccactgcctgccagtggactggaacttaggtggtaagaggtgacagcgaggtgtatatcaagggaggtgagcatgactgacccccagtgccatgccaggccccctggctggctccagccacccccagaagagtcccttaggctaggtcagactaggggtcaggtcagagtgagtgcagcagcgtaaggggatctgactatgggagataatgtttcatggccttagggtgttgtgccttagtccctgcctctgcctcttgggaacagaagttggtgggagtgaggacgagaggcccagggcggtctcacctcaggtggtggctgcggtctgtgtcagtgcatattctgtgtcagtgcatattcgacagtcaatcttacctgtgctggctgctttaggcccagtggtcctgccccctttcattccccttctcctgcaggggcctggaatgtactcactaggctgggtggggaggatgccctggggtgtgtgcatttgacaggcgcatgtggcatttgtgggtgtggtgaggaagggaatacccagagttaaaggagattgggcaaacttggccctccttccacggaagcccagggaaaagccatcccagggtgactcctcagaagatcagaggacccttggggctggatatatttgatcttagaagcctacatttatcatcaaaaatctcaactaggagtccactgaccattttggtgaatgagactggagaggccaagtttggtccaagttatctgtgtattagatgtgatgcggcatgtgtgtgtgtgtgtagggggacgtgtgtggggtgtgtgtgtctctatgagggtgtgggggagcggggagaggtcttgtgatatatgtctgtaggggacatgtatgggatatgtgtgtctataagagggtgtgggagagtggggagaggtctcctggtggtatatgtctggggggtttgtaggtgtgtaggtgagttgtgtgggtggtttatgtgtgtagagtttttctgtgggaggtgtctgtatgtgggggagtgtgtttctctgggcgttgtgtaggcaggattttgtgggtgtgcgtgggtttatgtatggattctactagtgtctgcgggacctgtaggtatgtttgtatgagctgtccgtgaggtgtaggtatgtcgggggacatgggagtgtctgaggtatatgtgggtggtatcaatgtgtagttgtctgtggggtgtgcgtatgaaggatcctgacgtggagtgttgtgcattcatatctcagggaagctggtgcccagctctgtcatttttcctaggccctcggtgctgcccacgcctacccagctcaatggtctgtacctatgaccatgcccctggtgtcctgagctcagcctcctacccactaagaaactcaacagtctggtctgtgtttggcagggtaagagggtgattgtcttctggccctggcctgaccctggaagagtagaaggtgtcctctgatttggggggcatccccccaggtgagggagtttcagataacatgatggggctggatattttcttctgtcctcacatgacagatagcgagggcctcagataatgctggaaggcatcatctttctattttgctttccatcaaaaatctctttgggaaagacagtttctaacattcttgggatagtgacttcttagtgcccctcttcttgtctgacgtcaggtactcacgcatttctgcagccctgtgactaagttgcgtgttctgtctggttcttctcttcctctcagcattcatcacttgtttctcagcattagcagcagtcatttgccactttatgattgttatcatgctctttcctctcctaacagtgctatccccaatttctgattttctgtcatttctaaatgttgcatgtctgtgactaactttgcacacattgattttttttttattttttatttttgagatggagtctcgttctgttgcccaggctggagtgcagtggcgcgatcttggctcactgcaagctccacctcctgggttcacgccattctcctgcctcagcctactgagtagctaggactacagacgcccgccaccacacccggctaattttttttaaattttttagtagagacggggtttcaccatgttagccaggatggtctcgatctcctggccttgtgatccgcctgccttggcctcccaaagtgctgggattacaggcgtgagccaccgtgcccggcctgatttttaatttttatcactgtgatatttctcaagctgggttcttgtgcctgggtcaaagctgtgggttatcagagtgtcatctgggaaattagtgtgtgtgagtccccacacacagctgctcaccacattttggaattgtcttggcaacatatgagtgcatcagtttcacacaattctatcagctatatatagacacatttttttcatgggtttattaacaattctctgatcacttcgtgatcaccagttctgcatcctctgagtatggttagccacattgttcactgcacaagggcatctggccaaggaataccagcccatgctccacacacagaatggggagcaacagctcagggctgtgtctatctgtaggggcatgcagattgaaaatgggcttgtagcagccctgacagtgaatgctgcaaagagaccttatacatgtatatcagttccttttttaaatttttttgagatggagtctcactctgtcacccaggctggagtgcagtggcgcgatctcggctcactgcaatctccgcctcctgggttcaagcgattctcgttcctcagcctcctgagtagctgggattacaggtgtgtgccaccatgcccggctaatttttgtaattttagtagggatggggtttcaccatgttggccaggctaatctcgaactcctgaccttaagtgatctgcccaccttggcctccaaaagtgctggaattacaagcgtgagccaccacacctggcctctatttcgaatattaaactttaatttaccatatcccaaatatttttccttttgttgctattatgggctgaattgtgtccctccaaaatgcatatgttgaagttctagcccccagtacctcagaatgttacctttgaggtgattaagttaaaatgaggttattaaggggggccctaatccaatatgactgatttctttataagaagaggaaatttggatataggcacgcagaaggaagaccatgtgaagacagagaagatggttgtaagagacagaaaaacccaaagtgtgtttctcctactctcatacacaccgctcaccagagagtgcttcacctctggccacaaaaatgggtggagatttctccccaccaacaacctgttctccagcagacactaactgggtgttctctaattcaagtcaatctagtgttagattttttaggttaagggctcagtgccacaagactgctctctgcttcagatgccaattccaagtggtaagttgtcagctatacttctgaccaactggctataaatcaggggttcccatgccaccctccttgggttcaactctgtgagtggctcacagaactcagggaaactttagttatatttacccatttattataaagggtagagacaaacaccagatgaagagatgcatagggagaggtatggaaggaggggtgcagagctcccatgccctctccaggcaccacaccctccaggcaccttcacatgttccacagtctggaagctctcgaaaccctatcctcttgggtttttatgaaggcttcatgattgatcgcatctttggccatgtgatcaactcaaccatcagccccactccccattccccagaggtcaaatagtgggattgaaagtttcaaccctcagctgggcacagcagctcacgcctataatcccagcacttttggaggccaaggcgggtggatcacttgaggtcaggagttcgagaccagcctgaccaacatgatgaaacccatctctattaaaaatacaaaaatttgccaggtgtggtggtgggcaactgtagtcccagctatttggaaggctgaggcaggagaattgcttcaacccagaaggtggaggctgcagtgagccgagattgcctcactgcaccactccagcctgggcgacagagcaagactcagtgtcaaaaaaaaaaaaaaaaaaagaaagaaagaaaaaaagttccaaccatctgataacaaaagatgcttctatcacccaggaaattccaagggatttccatgtcagttgttcctctcactcaggaagttataaaggtcttaggatctctgcgtgaggaactgggtggaagaccaaatattagaacagaagttctcctagcatccctattgtcaagagttttaggagctctgtctcagaaatggggtatagagaccaaatatatatttctttacaatatcacaagaatcatctacaagccaaagaaagaggctatagaagaaaccaaccctgctgacactttaatctcagccttccagcctccagaactgtgagcaaataaatttatgttgtttaagccaccatctgtagtacttcttgtttttttttttttttagagacaggttcttgctctgttgcctaggctggagtgcagtagcacaatcatagctcactgcagcctccaacatcttggtgcaagcgatcctcccacttcagcctcctgagtagctgtgactacaggcatgtgccaccatgcctggctaattttttttatttttgtagaaacaggatctgactatgttgtccaggctggtcccaactcctgagctcaagcaatccttctgcctcagtctcccaaagtgctgggattacaagtgtgagccaccatgcctggcctgtggttctttgttatggtggttctaggaagctagtatagttgccttatttttctcataaatttagtttttagataccaaagtttaaaaattaaacctaggcctggcacagtggctcacacttgtaatcccagcactttgggaggccgaaggaggcaaatcacttgagtccaggagtttgagaccagcctggtcaacatggcgaaaccccaactctactaaaaatacaaaaaatttgccaggcatggtggtgcacacctgtaatctcagctatttaggaggctgaggcatgagaatcacttgaacccaggaggttgaggctgcagtgagccgagattgcgccactgcactccagcctgggcaacagagcgagacttcgtctcaaacagaaaaacgaaaaaaaggcctgggcgcagtggctcacacctgtaatcccagcactttgggaggctgaggtgggcggatcaactgaggtcgggagtttgagaccagcctgaccaacatggagaaacctcatctctactaaaaatacaaaaattagctgggcatggtggcgcatgcctgtaatcccagctattctggaggctgaggcaggagaattgcttgaacccaggaggtggaggttgcagtgagctgagatggcaccattgcactccagcctgggcaacaagaacgaaactctgtctcaaaaaacaaaaacgtaccaattaaacctagccatattgttgctgctaataattttatgaccttaataaaatcttcccttccttcttttgtatttaaaaataattaactgttaagcaaatgcgggatttattttggggtgaaatatgtatacaagttaaattatttgctgctggccaggtgtggtggctcacacctgtaatctcagcgctttgggaggatgaggcgggaagatcacttgaggtcaggagtttgagaccagcctgaccaacatggtgaaaccctgtctctactaaaaatacaaaaattacccgagcgtggtggtgcatgcctgtaatcccagctacttgggaggctgaggcaggagaatcacttgaacccaggaggcagaggtttcagtgacccgagatcgtgccattgcactccagcctgggcaatgagagcaaaattccatctaaaaaaaaaaaaagtgctgcaaagcagttgtcccaatagcatttatttaagtggggcgggggcgggggggtgggggcggggggagattcttattggttcgtaatttatcaagttagaccttttatgaaattccccccatgacctttgaccttctgtttttaacctggtaccaaacagcttttatcatcgtctcgtggtgtttatgttttgaagtccaatagggtgagttgtctatgattgtttccttcttttcccaaaaatattctttggagttcttacctactgattttttttttccagatgaattttgctgtcacttaagtttgacaaaatgttccctttgaaatttcaaatttttgaaatgaagtatgagatctaaaaaaaaaaagaaacctgtgtattggctcagcattacccttattcctctcagccaagtgcaagggatcacttactcaaatctttattcatcccactagagtttaatgacttccttgaatggctgttcaatgttcagtgacaggtctggcttttgttgtgaggccatctatggagtctctgggacccttccagtccctggaatcagtttggtctgagaggtcaggacttggaaacatactggaggcagggcaagggcaccctgctcttgttttggcatctacctcttttccgctggtccttcttatccatccaactagtccttttccctgagccaggtccatactttcccaccccaaacccttcctcttgtttcctggctctctgtttctggctacattcatttcctacactcctgtatcaaaagtaccacaattgcttctcgttcccacagtgcagtgcggctgagcgcctcagagcccgcggggacgctgcggggggattgcggggagggggcgttgggaggtgccgatgttgggctgggcggatgagcgcatctgcgtggtgagccttccaacgtgcgcgagaaggacgtggaagaccttttctacaagtacggccggatccgcaagatcaagcttaagaatgggcactgccttgtgcccttcgccttggtgcgctttgaggacccccgagatgcagaggatgctatttatggaagaaatagttatgattatggccagtgtcggcttcgtgtggagttctccaggacttacgaagtcggggtgggtggccccgtggtgggaggaatgggccttctgcaagaagatctgatttccgagttcttgtttcaggacttcctcaggcagctggcaggacctgaaggatcacatgcgagaagttggggatgtctgttatgccgatgtgcagaaggacggtgtggggatggttgagtatctcagaaaagaagacatggaatatgccctgcataaattggatgacactaaattccactctcatgatagtgaaacttcctacatctgagtttatcctgagagaagcaccagctatggctactcacagtctcggtttgggtcaaggggccgtgactctccatactaaagccggggttccccacaccacttctctcctttcaggccctactgagacaggtgatgggaattttttctttattttttaggttaactgagctgctttgtgctcagaatctgcattccagattgaggatttagcgtcttaggaaattattttaattttttttttttaaagaagaaaaaaaaactacatactttctaccagggccatattagcagtgaaacattttaaactgcagaaattgtggttttggttcagaaacaagttgtatatttttcactcctgaatatgggtaaaaaatcagttccgtctttgtgggttgctctgctatggagatcaacagttactgtgactgagttggcccattctgcttaaaaatatgttttaaacgtttaagaaaaatgctcatcatcactggccatcagagaaatgcaaatcaaaaccacaatgaggtaccatctcacaccagttagaatggcaatcattaaaagtcaggaaacaacaggtgctggagaggatgtggagaaatagaaacatttttacactgttggtgggagtgtaaactagttcacccattgtggaagacagtgtggcgattcctcaaggatctagaactagaaataccatttgacccagtgatcccgttattgggtatatacccaaaggattgtaaatcattctactataaagacacatgcacacgtatgtttattgcagcactgttcacaatagcaaagacttggaaccaacccaaatgtccatcagtgatagactggattaagaacatgtggcatggctgggtgcggtggctcatgcctgtaatcccagcgtggctcatgcctgtaatcccagcactttgggaggccaagacgggtagatcacgaggtcaggagatcgagaccatcctggctaacacggtgaaaccccgtctctactaaaaatacaaacaattagctgggcgtggtggtggcgggtacctgtagtcccagctactcggtaggctgaggcaggagaatggcatgaacccaggaggtggagcttgcagtgagccgagattgcgccactgcactccagcctgggcgacagagcgagactccatctcacaaaaaaaaaaaaaaaaaaaaaaaaaaagaagaagaaaatgtggcacatatacaccatggaatactatgcaaccataaaaaaggatgagttcgtgtcctttgtagggacatggatgaagctggaaaccatcattctgagcaaactactgcaaggacagaaaaccaaacactgcaggttctcactcataggtgggaattgaacaatgagaacacttgaacacggggtggggaacatcacacactggggcctgttgtggcgttgggggaggagggagggatagcattaggaggaatacctaatgtaaatgacgaattaatgggtgcagcacaccaacatggcacatgtatacatatgtaacaaagctgcacgttgtgcacatgtaccctagaacttaaaagtataattaaaaaaaaaaagtttagtaattgaaaaaaaaaagtacaacaattgggttggttggaacagcagaaatgaattgtctcacagctctggaggccaaaagtctgaactcaaggtgtcggcaggaccatgctccctctgaaacccatagggaaatccttctttgccccttctagcttctggttgtttgctggcagtctctggcattccctggcttgtagacgcatctttccaatcgtctgccttcacatggtagtctccctgtgtctgtctctttaagtggctgtcttttgttttttgtgtttttttaatttcaatttaatctattttttgtagacacattgtttcaccatgttgccaggctggtctcgaactccagggctcaagtgatcctcccgtctcagcttcccaaagtgctgggattacaggcgtgagccgccacacccagcccacatggctgtcttcttatgggaaaccagacatgggattagagacccactctattagagtaggattgcatttaactaattacatctgcaacaactctatttccaaataaggttacattctgaggtactaggggttaagacttaaatatatcctttttaggaaggacacagttcaacccacaatattagctggccacatgtttcccctgatctgtactttacttgttccccctggctctggtccctcctcgggtcaggtcctgcctgagcctcccctggccatgtcccttctttgtgcctggaccctcctgattaataccccatccccacccttgtgccctcagctgacttcttgtacctcccaccaggcatgatgacctgaaggagatgctggacaccaacaaggattctctcaagctggaggccatgaagaggattgtggcggtaagaggggaaggaggaggcctccctccgggcggggcctgggtggccaagagcagctctccttagctccttgtagaccttccctctagttagtgctgtgcctctcgctttgtccctcttcccctaccttgaccccaccacccagatgattgcccgaggaaagaatgcttcagacctgtttcccgcggtggtgaagaacgtggcctgtaagaacatagaggtgagcactacctggtgagggattgcttgtccccacctcccccaggaccacactcaagcttggggtgaggaaggaaatgatttagcccctgggggcccgacctgctgagaaatgtctctgagccaggagaagacactgtctccatgtccctgaactggatgtggatcaaggtaaaggacccggatacactcaggggtgctctcccccactgggagagtttgtccccatggaccgcagctggctggggagatgacatcccaggggtaggggggtgggcacaggtgcctgctgagaagcgttctgctgagaaacgtgctctccccaaggtgaagaagcttgtctatgtgtacctggtacgctacgctgaggagcagcaagacctggccctgctgtccatctccaccttccaacgtggcctaaaggtcaggggtctcagtttgcctcccagggcctgggcctcgttggcgctgtatcggaggagtaggcctggggagaggccatgagcatgggagcgggctctgcagaccccttcctacctgcctaaaattgggagggtcacagtcagaagaggccagccagaccctcagagagtggaagctgggctcagaaggggcgtaagagatgaagtgggtacccagggcccctgtctctcttcccaggagcctgtggtaatggctgcttctagtatgaaccacttgagcccccggagagtggagagtctctagcaatggagaacccctcaaccctcacccccctttgtgtaaaggtgtgaattgtggtccacagccaggtagatttcaacctttagcagtggcctgaatcccccacaccattctcaccttttgtttcattttgcccaaggcctctagttggatttacatatgttaggtgcatgtataagtctcccccctaagggcttttctggttagtctaagacatcttgagggtaaagacagccatttcaaggccattctctccatattggatttttcagctctgattacaaccattaactcctctatttttgcatacctttatttatttatttatttatgagacaggttctcactgtgttgcccaggctggagtgcagtggtgcaatcatggctcactggagcctcgacttccctgagctcaggtgattctcccacctctgtctcctgagtagctgcgactactcagcctgcatcaccatgctcggctaatttttttgtagtttttgtagagatggggtttcaccctgttgcctatgctggtcttggactcctgggctcaagtggcctcagcttcccaaagtgctgggattacagggatgagctaatactcctagcctggatacttttagttcaaatttctgtgagagagattgtgaaaggtccagctcatcttttcatatccagaagttctgtaggttgctgggtagacaggattgctgctcaaatccagggcccaccccttgtccaatctgctatggccagcaagaggggttgacagtcggcttctttggggtgagagtagaaagcatggtcacttgaatatacaattcattcatttagtaaatacttgggtgtctctatgccacacattgtgctagatttctttttataagtcaaaaccatggaatccgtcttagattggcaagtaatcttttggtttgagtaagggttaagtataaaaactaatctgaaattgttgtacagattttcacctatagtctctaccaactgaccctgtcccccttttagaaaaccagagctcatttagttcaactcaatgtgataatttctttctgcaaagtgccaaatagtattttaggttttgtaggccttatagtctcaactatgcaactactcaattttgcccttatggtgcaaatgcagccattgacaagtgggcgtggccgtgttccaataaatctatataaaaaacaggcaatagacagattttatccaagggctgtagcatgccagcctttgctctagaacatgtctaacaggtcatcttttctgatagggacctcactccttcataaggcaacttgctccatctcaagacaactaccactatttggggtgttttttaaaccattctcttttgttgaaacctccacaactataatttttaaaaattgatttcaggctgggtgtggtggctcatgcctgtaatcccagcactttgggaggccgaagcaggcaaatcacaaggtcaggagttcaagaccagcctggccaacatggtgaaactccatctctactaaaaatacaaaaaattagcttggcatggtggcgggtgcccataatcccagctactcaggaggctgacgcaggagaatggcttgaacccgggaggcagaggttgcaatgagccgagaacgtgccactgcagtccagcccaggcgacagtgtgagatccatctcaaaaaaaaaaaaaattgatttcaggctgtactgcattatgactgcacctgtgaatagccactgtactccagcctgggcaacatagggagaccctgtatctaaaaaataaaataaaatttactacaggttcacaaaaggcataaagaataatataatgaatatccataagaaatgacacatttctcaaatagccaaagcctcctatatatcttctcttgtttatcattcataggtatgtatttattcctgtgctagtaatttgcatattgttaagcaatataaaatgttttgtaaatggtgtcatcgtactacatatgtattcctttaaaacttgttttcttttttgttgtcactggcttttggtctctcctgcatgttggaaccaatcatttcaatccagccttctcccttctttcaatcctagcccaggctagggccgtgttcactttcttaggagatccctcatggaatcaaacctctgactggcaagcagataatccaggtctccctacatcctgtctttgtacagttggtcccttgaaccccctatgaaaccctactctatttcattttatcagtttagcacagggtccaaaccagggtgattctgaatcttaattatgtccctcctgattttgtgtcttctttcaagatactgataagctatttggaccagggcaaaagactgaggcatagcatgtttccaggttgacactgatctgttaataaaccttctccaagtatatttcaccacgttgtagacccacctgactgtacagacagctggcatttttctatcttgttaggaaggatcttattcaatagcaataaataaataaataaataacacctttcatgtgcaaagggttgtgggtgacacagagataaaacagatgtgaattctgctcttaaaaatgcttggctattaggtgaaacaaaaggcctacctaaaaaatagcaatgcaggaaatgctatgagacttccacaaacatatcactgaaatcaagatactaatatccaccggcctagttaccccatcaaaaaggaaaacacattttttttgataactttctgtgaatctataatcatttcccaaataaaatgctcacacacaaaaaaggaaaacaggtttaagcagatgatgtgactatttgtctctaagaaaacagagactccttccttttcaataaatgtttctaacccatctgtttaaaagtcaattccagaattttgtcaggaattagcatcaattttacctgcaattgtgaggatcttgtcttgtctttttccatttcagaaagtcagggtaatatctacccttctttagtgttctattcccgtcattctctaagagtaatagtacaggcacacctcattgtattgcactttgcagatattgccagatattgcactttttacaaattgagggtttgtggcaaccctacatcaatcaagtctatcagtgccatttttccaacagtatgtgctcacattgtgcctctgtcacattctggtaattctcacaatattccaaactttttaatgattattatatgttatggtgatcagtgatctttgatgttactattgtaattgttttggggtgccacaaaccatgctcagacatgaaagtgaaattaatcaataaatgttgtgtgtgttctgactgttcccccatctccttcaccttgggcctcttcattccctgagacacaacaatattgaaattagatcaattaataaccctacaatggcctctaagtgttcaagtgaaaggaggaaccacacatctctcactttaaatcaaaagctagaaatggttaggcttagtgaggaaggtatgttaaaagctgtgataggctgaaagctaggccacttgctccaaacatttagccaagttgtgaatgcaaagtaaaagttcttgaaggaaattaaaagtgctactccaggctgggcgtggtggctcacacctgtaatcccagcactttgggaggccgaggcaggaggatcacttgagaccaggggttcaagaccgtctctataaaaaatttttttaagttagcctgatgtggtggtacgcacctgtagtcttagctacttgggaggctgaggtgggaggatcacttgaacccagaagtttgaggtgcttctccagtaaacacatgaatgataaagaaagcaagacaggattattgctgatataggaaaatttaagtggtctggatagacgatcaaaccagctaccacattcccttaagccaaagcctaattcataggcaggtcttaaatctctccaattctatgatggctgagagaggtgaggaagctacagaagaaaagacggaagctagtggaggttggttcatgaagtttaagtacagaagccatctccataacaaaaaaatgcaaggtgaagcaaaagtgctgatggagaagctgcagcaagttgtccagaagatctagctaagatcattgatagatgtgactatgttcaacaagagatgctcaatgtaaatgaaacagcctcttactggaagaagatgccatctagcactttcctacctagagagaagtcaatgcctggctttaaaaaacaggctggctcttgttaggggccaatgcagctagtgactttaagttgaggccagtgctcaatgaccattctgaaaatcctggggtccttaagaattatggcagatctcctctgcctgtgctctataaatggaacaacagtgccatgacagcacatctgtttgcagttatggtttactgaattttttaagcccactgttgatacctaccgcttaaagattcctttcataatattactgctcattgacaatgcatttgttcactcaagagctctgatggagaggtacaaggagattaatgatttcatgcctgctaacacaaaatcagttctgcagcctatggatcaatgagtaattttgacttttaagtcttattatttaagaaatacatctcgtaaggctagagctgccatagatagtgattcctctcatggatctggacaaagtaaattgaaaaccttctggaaaggtttatagaaaccttctggaaaggtttaccattatagatgccattaggaacattcatgattcatgggaggaggtcaaaatattaacattaacaggagtttggaagaagttgattctaaactccatggatgactttgaggggttcactacttcagtggaggaagtaactacatatgtggtggaattctacctagaagtagaagtagaattaaaagtggagcctgaagatgtgactgaattgctgcaatctcatgataaaacttgaatggatgaggacttgcttcttatgagtgaacaaagaaagtcctttcttaaaatggaatctgccgggtgcagtggctcacgcctgtaatcccagcattttgggtggccgaggtgggtggatcacgaggtcaggagatcgagaccatcctggctaacacagtgaaaccccgtctctactaaaaacagaaaaattagccaggcatggtggcgggcacctgtagtcccagctactcgggaggctgaggcaggagaatggcgtgaacctgggaggtggagcttgcagtgacccgagatctcgccactgcattccagcctgggcgacagagcgagactccgttacaaaaaaaaaaaaaaaaaaaaaaaaaaaaactcctggtgcagatgctgtgaacattgttgaaatgacaacaaaggatttagaatattacataaacttagttgataaagcagaggcagagtttaagaggactgacttcaattttttttttttttgtagagactggggtctccctatgttgcccaggctggtcttgaactcctaggctcaagcaatcctcctacctcagcctcccaaagtgttgggattacaggcacaagccatcacgcccagcctacattgtttttttaaagacataatgctattgcatgcttagtagactacagtatattgtaaacataactttttttttttttttggagataggatctcactctgttgctcagtctggagtgcagtggcatgaacatatgtagctcacttcagcctccaactccctgggctcaagtgattctcccacttcagcttcccaagcagctgtaactataagcataacttgtatgcaccaggaaacaaaaaatttatgtgactcgttttagtgcgatatttgctttattgttgaggtctagaatcaaacccacaatatctccgaggtatgcctgtaatatatagctgctgctgctgatagtgggaagacagtcctaagccccatgatcacaatacagtgtaaggaatgcttttatacgttctgtataggatgcagtaggaataaagaagaagggcttggggccgggcgtggtggctcacgtctgtaatcccagtactttgggaggccgaggtgggcggatcacttgcggccaggagttcgagaccagcctggccaacacggcgaaacctaatctctactaaaaatacaaaaaattagctgggtgtggtggtgcgcgcctgtagtcccagctacttgggaggctgaggcaggagaatcgcttgaacccaggaggtggaggttgcagtgagccgagattgcaccaccgcactccagcctggcgacagagcgagactccatctcaaaaaaaaaaaaaaaaaaaaaaaggaagggcctacacccctattttgttttaaacactgtggaagaacagcagcttttgcaatgatttctgggagaaaggagtgtaaggttgaactccggaagggagaccagcttgcatctgctgggcggtcacctcaggcattaaaacaggcacctccaaaaaaacccttacaaggaacaggaagtgtttcaggtgtttcagcaattttaggtgttctgaaagtttttcagtgtttctggaagtgaagctacccattgcaacacctgttcaggtgtcagatttctgcaaccagagccaaaattaagtgtcccccagatacccatcactggcacaccatccaggctccagtcaagcggcagggaagcaagagctagtggtcgctggggacagtgacttccaaaggtgtggcctccccccatcagggcacctggtgccctttcatagctctgcctccacctctgcctttaggatcccaaccagctgattcgtgccagtgccctccgtgtcctctctagcatccgtgtgcccatcatagtgcccatcatgatgctagctatcaaggaagccgcctcggacatgtcaccctatgtgcggaaaacagctgcccacgccatccctaaactctacaggtatgccccagccctgtcccacgctccccaggaggctggttcctaagttctcaacccacccctggcctttcctaagtcttgcctgctgcttctcagagggtttgaggagggtagtttgggggactgacagagatggaggagaacaataaggctggggtgcaggaggtgagcatggcttggacagatattgggaaggctggggctgagagtggcaaattcccctcaccgatttctccctcagtttggactctgaccagaaggatcagctgatagaagtcattgagaagcttctggctgacaagaccacggtgcgtgtataggggcgctccgggaggggtggtgaccggcagccggccttccacccttcgcgttcaccctctcgtctttgttctttccccagctggtggcgggcagtgtggtgatggcctttgaggaggtctgcccggagcgcatcgacctgattcacaaaaactaccggaaactctgtaacctgctgatcgacgtggaggagtggggccaggtggtcatcatcagcatgctcacccgctacgcccgcacgcagttcctgagccccacccagaacgtaagtgggcccagcccaggcagagcgggccgaagtgtgtcccggggaggcgcccacagacccgtcggtctccccgtccaggaatccctactagaggagaacgcggaaaaagccttctacggctcagaggaggacgaggccaagggcgcggggtctgaggagacggccgccgcggccgccccctcccgaaagccctatgtcatggaccccgaccaccggctgctgctgcgcaacaccaaacccctgctgcagagccgcagcgccgcggtggtgatggcggtggcgcagctctacttccacctggcgcccaaggcggaagtgggcgtcatcgccaaggcgctggtgcgcctgctgcgcagccacaggtgcgctccgcccccagccccgccccctccctcgcctcctgccccgccccacgggctgcccggctccgccccctcacgcccaccagccgcttccacctctgcccacccgctccacactgaccgtagtcctgccctccgcactggtcctctccccgcaacgacttgccccaccttttcccctcatccgctgacccttgccccaaccgaggggcccggggtgctctgacccgtcctctccgcagtgaggtgcagtacgttgtgctccagaacgtggccaccatgtccatcaagcgccgggtgagcctgcgacggcgggctgtcctcgctgtccgagggccgcttctgcgggcactggaggcgttgtcggggctgggaccggggccggggaaagggaagatggaggaataccctggctgtgcagaggatggggcaggggaggctccaaatacagatagggagcagggcctggatcctgaggggccgctgaggggatgtccagtggaaaaagagctagtcagatctgagatggacgagggaagacttgaggagtggagggcagtggtgaggaggcaaggatcctgggcgctgggtcaggataggaggggtgtctctgggcagcgaggcaggcctggggcttcggtggagctccctagctgcctctcttgtgccagggtatgtttgagccctacctgaagagcttctacatcaggtccaccgaccccacccagattaagatcctgaaggtgagtgagggacagaagtgcatgtgcttcccagccctccccaccccatgtacccactcaaataactcacagtggcccccctggtgcctgcctattcctggggctgagcccaggagcccatgactgccccagctggagctgtttgttcagggagctgggctaaggagggtcagggggagaagggaactgctctttgcctagtacctggtatacacctgctactcttcataaatgaagtaacctgatatcacctcataataatcccaggatgtgtacattatattccttttataaaaatatagactctggccaggcacagtggctcacgcctaatcccagcactttgggaggccgagacaggcagatcgcctgaggtcaggagttcaagaccagcctggccaacatagcaaaacctcgtctcaacgaaaaatacaaaaattagccaggcgtggtggcaggtgcctgtaatcccagctactcgagaggctgaggctagagaattgcctgaacctgggagacagaggttgcagtgagctgagattgtgccattgcactccagcctgggtgacaagagcgaaactccatctcaatctaagaaaaagaaaaaaagactctgggaggtaactgccccaggtcacataattctgctgactccaaggttcacacttttctctcccacccacagtgttatggcccccacacacctgccccctcaggctctcctgcaaacattcacggacaaggaaagtggcgggagcccatacctccatttgattcctgctctgctgcctcattattgagtgatttccttcagcaacagttaatcttcctaacccttgtgaacatccactatgttctaggggtacatgatgagcaaactaatcagggaccctgcctttgtggagcttacagatgtggggaggaggagacattaagcagttaatcacaaggcaaatgtaaaagtccacttacaaaatatggaagaaagtgtggagagctataagggcataaaatagggagacctcatctagtctggtgccagggaagttttcccggaggatatgagacttgagctgaagcctgagagatgaacatgaattatgcagggacagaaatgggaagaactgctccacgcagaggaaacagcatctgcgaagaccctgggttaggaagtggagtgggattggggcctggaagacaagggggacagtgatgggagatgggaggtagacagcaagcagatcattcagggacttacagaccatggtgaatacgatggtctccatcctgaaagcaataggaagctttaagttttcaatgcagtagggaggtgacatggtcatactgtaagcatactgtgtagggaatccacttaagaggcaaactggtcctcttgctttttagacaagtttcataacctgtcaattccctcatcagtgtgaggatgatgcagggctgtcatgaggattgttttctggtctatgaagtgtatttggaatgaaagcacagaaagtccactggccaacccacccattttctgcctctccaaccctccctgcagctggaagtgctgaccaacctggccaatgagaccaacattcctactgtcctacgggaattccaggtacaggccagctcccagccagaagggcctgggagaggggcccatcagatccttgtgccctggtgggtaaacctcctcttatgagcccaaggctggagaaactattatcttacattcccgttccaatgtgtttggctggctttgggccaaggaatcactggattgggggtggagttgtcaccccctttcccaagtcttagtcaccggcatgataagccataaaatgaaaggccacagccttcttgaaggtcaccctcaagcctgcagagtcactgagggatttctttgtcatatcccacagacctatattcgcagcatggacaaggactttgtggcagccacaatccaggccattggacgctgtgcaactaacatcggccgagtccgtgacacctgcctcaatggcctggtgcagctgctgtccaaccgtgatggtcagtgtttccctgagtgtctaaccgtgatgatcagagggtgtctgcctgcaggtctgactctgctggccactggatatccaccagtctgcctagacacaatgtgtatccattggtctgtctgtcttgatcagggcccaagtgttcctacacctctgagggctgctagagaactgaagggggttgagagaaagagccaagggcctggggcactgcaggtgtgtctgtccacctgagtgtggccatctgactgtcttggggtccacacactcatttttgttctgtagagcttgtggttgcagagtcagtggtcgtcattaagaaattgctacagatgcagccagcacaacatggagagatcatcaaacacttggcaaagcttacagacaacatccaggtgagggagaagccatattttcactccccacttcaaggtcctccccatgatttcaagactgtataattacatatgctagccttatcaaaagtaacttccaaaccttaggtcttcaggtggaaggagcagagacactggaccatgtgaccctgaccttgttacccctgatttgctttccctttggagaccctcaatgagcacgatggactttactactactcttgttttctctctaaagctctagccaaccatggttgagtgacaaatcttgtgtttttctatcgcactgctaagctgaaacatctaaacaaggcattcccaaagattctggagagtaacatggaaataaagtactgagggtacaatgaatccagaaaatcaatcttttacatcatgactgacttagggtcttgaaagctctatgctaatgaagccctagggaagaggggaaatgctgtctaggaaatgtctaccttttaacctctctctatctcaccacccccaactcccatttccagagaacccataatacaacaggccagcacagatgaggagtgctgtttccctggaagtccacaatcctacccacccactttcccgtatttacccatcttcactcctctcccacaaccacaggtgcccatggcccgagccagcatcctgtggctcatcggagagtactgtgagcatgtccccaggattgcacctgatgtcttaagaaaaatggccaagtcattcacagcagaggaggatattgtcaagctgcaggtcatcaacctggcagccaagctctacctgaccaactctaaacaggtaaagattaagagatgaccccccagatactctggtccccagaaactccctagacagtattcttttggccctccctaggcagggctgaactctagctcctattttggaaaagaagaatcagggaaggtggctggtctgcccacataaccaatgctaccccagtgcccacaaagaccttgtagtgctggtggtcactgttgaagagactctcctatgaagctgtgacctccagtctgctagtacaagagtcctgtctgccaccttggaactctggggctgtgaagaaccacagttgattgggataagggaagggcccaacagtggcaggtactgatgggagaacatgcatcccagatgtggtctgtgcttctttccaaagcttgacaatgcttggccagtctgtgccaaagataagggggtgagtctctgcttgggcttgggtggtgctggtggccactgtcattcccaaggtgaaaggttataagagatacacagccaaggatgaggctcaactaagttgtagtatcagggtgttcagagcctcctagctgtctggcatctcctgagatggttccaggagattctcctaaaatgaagcataatgtgctgagcttttcaaggtgtcagggacatcaaacaccatgacgatttccacactctcccactcagttaagcaggacagggattggcaaactactgcccataggctgaatttggcctattcctgtttttgtaataaagttttgttggaacacagccctgctcattcatttacaaattacctatggctgcttttgtgctacaacagcagggttaactagttgcaacagactgtattgcccacaaagcctagaatagttattctctggcccttttataaaaagactctgccaatccttgaagcaaaacctctggctaggtggctggggtctacagatttatagcagggatatcccctggagactgtagcatccctgccatgtccactgtgcgtgggagtctttggatggtggcacttatctttttcagtggcttctttgatccattgtggccagagtgagccccagaggctcaaggtgaggtaggcagggccaccaagtgctgtgactgtaatcaggagtcaaaggacagcagcaacatgtggaggcaactgagtctgtataattaaatatgctagccttatcaaaagtaacttccaaaccttaggtcttcaggtggaaggaggagagacactggaccatgtgaccctgagcttgttatcagtgttgtgggcaaagcagattggagagagagaagttagagggggagagagagaagttagagggagaaagagcaccatggggaagcgttcaatcgttgaaaaaatatttgtatacttcctttgttcaggtgggaggaaggagcaagtgggaggaatgtttgaaaagatgaagcagcctgggtggggagccacccaggtaggtgggagtcttgacatgctcagcaatgagccagagtcctaaaccccaggatggtgaggttggcatgttttcataagcctgggcctgtccacatgtcatttcccccaagttgtcactgtgagctacatgtgcatttgttcatttatttaacatatatgtaggtgggagtctgacatgctcagcactgagccagagtcctaaaccccaggatggtgaggttggcatgttttcataagcctgggcctgtccacatgtcatttcccccaagttgttactgtgagctacatgtgcatttgttcatttatttaacatgtaggcctactatttgcctggtactgtgctgcgtcctgaggatatgacaatgagtgagacacatttacaggtctccagatactcacagccaagtaggagaaacaggacaaaaataaacattttaaacacagcagtaacagctgtcatcagggttggcacagcgagctgtgggtatatacagctgaaccctcccctaggaatgacccctgtcagggaacccagagtaggctgttcaggcaaatggacactcacctccagggcgcccttcacctgcaagtgagtttttgcaggccccttagaatggttatttgattcaataaagatttttgtcctccctttctttctcctttcttcccagcctcttctgggagtggtaaagaagggggagtccttggggtactaggagggaggtggtttggatgcgcacatgaccatgcttgcaaaacagtagtgatgcttcccatcctgggaccatgagtggcaatctgcccagctaaaaggccacagtaatctcagtcattctctccaatttggacatgggcccacggcatgccagatcctggcccaggatgaggccaaggaaatgaccaagatgaggcctctgccctgctattgatcagcagataatcagatactagaccagaggccacaaaggcataacatgcaggtggcgggggatgggggggttggtaatcaaagtggctattacatccacctggatatagaccctggggaaactgcctagcaggttagtttgcttttatgtgtcaggtgagatgtgtggcaggagggtctgccaggggcacagtgggatctacaaccctcccatgtgaccgcctttacagtgaatagaagattctgacaaattttgcagaattgcttttaaaaacgtaaactttttttaatatgctaaaggtaatacatgcttatcatagaacatttggaaaactcagaaaattataagtttaaactattaataagtccaccatttagaagaccaccattaattatatatttccttattttttattcctatatatagtcattcagaagttgtacttttgtctattgtccaatattttaaacttttctgcttcttttcaatgctttcatatttaatacttttttttccccattcacatttcaattaaacttttcacttagaattttctccaggctgggttcagtggctcacacctgtaatcccagcactttgggagcccaaggtgggtgggtcatttgaggtcatgaattcaagaccagcctgaccaacatggcaaaaccctgtctctactaaaagtacaaaaaaattagctgggtgtggtggtgcgctgaaatctcagctacttgggaggctgtggcaggagaattgcttgaacccaggaggtggaggttacagtgagctgagatggtaccaccacactccagcctgggccacagagcaagatccatctcaaaaataaataaaaattaaaaagaatttcctccaaatttttttctactttcacatttttaaatcaattgtattagttttctgctacataataaattactataaatttggtggcttcaaacaacacacgtttattttctcagtgtctatgggtcgagaattcaggtatggcttagttggatcttatgcaaggctacaactgaggtgtcagccaaggctgagtttttatctggaggctgtactggggaaaggtccacttccaagtcacatggtgccacgatccacttccttgcagttgtaggattgtggccctggcttcttgctggctgtcagctgggggctgcccttgccttctagaggccgtccttagctcattgccataggggcctcccaacacggatgcttaatttctccaaagccacaagggagaaagtctctagagccagtctgctagcaagaccgtcttctttttattttttaatttttatgggtacatagtaggtgtatatatttatggggtatgtgagatattttgatacaggcatataatgcataacaatcacatcagggaatggggtatccatcctctcaagcatttatcttttgtgttacaaacaatcaaattacactctcttagttatttataaatgtataataaattattgttgactgtagtcaccctgttgtgctgtcaaatactagatcttacacattctatctaactataattttgtacccattaactatccccacttcccccacccactacccttctcagcctctggtaaccattattctactctccaactccatgagctcaattcttttaatttttagccctcacaaataagtgagaacatgtgaagtttgtttttctgtgcttggcttatttcacttaaaataatgacctctagttctatccatgttgttgcaaatgacaggatctcattcttttttattctttttttatagtactgcattgtgcatatgtaccgtattttctttatctatttgtctgttgatagacacttaagttgctttcaaatcttggctatggtgaacagtgctgcaataaacgtaggtgtgcagatataacttcaatatgttgatttccttacttttgggtatatacatagcattgggattgctggatcatatggtagcactatttttagtttttgtttgtttgtttgagatggagtcttgcactgtcacccaggctggagtgcaatggcatgatctcagctcactgcaacctccgcctcccaggttcaaacgattctcctgcctcagcctcctgagtagctgggattacaggcgcccgccaccaagtctggctaattttcatatttttagtagagatggggtttcaccatgttggccaggctggtcttgaactcctggccgcaagtgatctgcccgactcggcctcccaaagtgctgggattacaggcgtgagccactgcacctggcctatttgtagtgtttttttttgagatggtgtttcactcttttttcccaggctggagtgcaatggcgtgatcttgcctcactgcaacctctgcctcctgggtgcaagtgattcttcttctgcctcagcctcccaagtagctgagattacaggtgcctgccaccacgcctagctaattttttgtatttttagtagagacagggtttcaccatgttggccaggatggtcttgatctcttgacctcgcgatccacccacctcggcctcccaaagtgctgggattacaggtgtgagccaccgtgcccggcctatgtttagttttttaaggaacctccaaactgttctccagacatttccactaacagtgtacaagggttgccttttctccatgttcttgtcagcatttgttattgcctatcttttggatataagcctacttggggtgagatgatatatctttttttgttttgttttgttttttgagacggagtcttgctctgtcacccaggctggagtgtgcagtggtgcgatcttggctcactgcaacctctgcctctgtggttcaagtgattctcctgcctcagcctcctgagtagctgggactacaggcgtgcgtcaccacgccccgttaatttctgtacttttagtaaagatggggtttcgctgtgttggtcaggctggtctcaactcctgatctcaggtgatccgcctgcctcagcctcccaaagtactgggattacaggcatgagccacccgtgcctggcctttcattgtagttttgatttgcatttctctgatgctcaatgatgttgatcaccttttcatatacgtgtttgctatctgtatgtcttcttttgagaaatgtctattcagctcttttgcccatttttaaattggattattgaatttttttttcctattgagttatttgatctccttacgtattctggttattaatcccttgtcagatgggtagtttgcaaattttttcctcctattctgtggcttgtctctttgttgattcctttgctgtgcagaacctttgtaacttgatgtgatcccatttgtctacttttgctttggttgcccgtgcttgtggggtatcactcaagaaatctttgcccagtacaatgtcctggagaatttctctaatgttttcttttattagtttcatagtttgaagtgttagatttaagtttttaatccactatgatttgatttttgcatatggtgagagataggggtctggttttattgttctgcatgtggatatcccgttttcccagcgccatttattgaagagactctcctttccctaatgtatgttcttgatacctttgtcaaaaatgaattcacggccaggcgtggtggctcatgcctgtaatcccagcatcttgggaggccgaggctggtggatcacctgaagtcaggagttcaagagcagcctggccagcatggcgaaaccctgtctctactaaaaatacaaaaattagctgagcgtggtggcgggtgcctgtaatcccagctacttgggaggctgaggcaggagaattgcttgaacccgggaggcggaggttgcagtgagccaagatcgcgccactgcactccagcctaggggacaagagcgagacttcatcttcgtccccccccgccaaaaaaaaaaaagccactgatttttttttttttttttttttttggagacggagttttgctcttgttgcccaggctggagtgcaatgggtttttttttttttttttttttgagatggagttctcactctgttgcccaggctctggactgcagtgacgcgatctccactcaccacaacctctgcctcccgggttcaagcaattctcctgcctcagcctcccgagtagctgggattacaggcatgcaccaccatgcccagctaattttgtatttttagtagagacagggtttctccatgttggtcagactggtctcgaactcctgacctcaggtattctgcctgcctcggcctcccaaagtgcttgctaggattacaggtgtgagccactgtgcctggacaatgctactgattttttttttttttgaaacggagtcttgctctgtcaccaggctggagtgcagtggcgccatcttggctcactgcaaccttcacctcccgggttcaagcggttctcctgcctcagcctcctgagtagctcggactacaggtgtgcatcaccacatccagctaatttttgtatttttagtagagacaggatttcatcatgttggccacgatggtctcaatctcttgatctcacgatctgcctgcctcggcctcccaaagtgctgggattacaggcatcagccaccgcacctggccaatgctactgatttttatgtggattttgtatcctgcgactttactgaatttattagttctaatagttttttggtggaatccttaagattttttaaatataagatcatatcatctgcaaacaaggataatttgaattcttttccaatttggataccctttatttctttctcctgtctgattgctctagatagaacttccaatacagagtcttcttaataaaacataatcataggatcatatatagtcatataccacctttgccatatcctgttggttagaagcaagtctcaggttttgcccatacccaaggtgagggattgcacaaaggcatgaacaccaggaggcagctactggtggggaagaccttagaatctgtctgccacatccatctagagcttaaacttactcatgtgtaatgtgtgaattgaggatatatttcaattttttttaacagccagttttctaagcatgattagcaggcatctgcaaggtagcatgtatgttggcataggttatggaaaggaagtcagtgtttcctgcttaaaattcctctctgacaactggagcctgttggtgagggggagccttgttctgttcttggcacactggagtgtatctcagaggccttcttgaacagcctgtaattcctgcacatcctggctagatgaggtgggggtcttggtggtgcacacaggatgccacaatccacagggaatggccccttggggtggagaagggtaatgaattattataggcaaatcctgcagtgttgaggtggtgggccagccccttcctgtgttggttgttaacatgcagttaaggctgtggacagatggatccaaataccaaacagttctttctagaactaggcaaggacttgaaggagggagtctgtgatcagccagctgggaaatctgtggaggaagacattgtccaaaccaaaagagggatcagcagcctcttgataattgactatgttggtaagggcatccactagccctggccatttagatggtgtctggccaagagaggggcaggttggtgatgaaatctgttgtgatggcatcttattttcatatttttaagtctattctattagcggtgcatgggattgggattgcttatctgtgactataacagtatcgcaggtgctgctttgctggaagggactgagctgaagagggcctgtgggccagattggaggtaggaatgtggaatcatagtggctctctagagtggtgtggggcaattctgccaaagcagctgctcagactctgggtcagcatctgaggggctttgccccttatggacatctgcttgatgtccctgccagattagctgggttaaccatgtccaaggctacacgtaacagtatgtcaccataaacctcaggaagaacagagtcagttccaggctccctcctgccggcccctgatgcccttgggcattctgcttgttgaccacttggtggttttgatcttggtcacaagtgatggaaacatggagacctgggccagggcaggctccttatgtcagcaggtaggcagtgaagggaagcagatggggtgcagctccagcagatgcaggcctaggtgcagtactgatgggctccttggcctgggaaaagccccttaatgatcctgcttcttttctgtaaaatgggggcaataatgcctacttctcagaaggcttggggagattagatgagctagtgtggagcacctagcacagagttggtgccagaaggcacttgataagtgatggctgctaccgctgttgccatgttaaggcaggttagattaggccaagatcatggcagaaatggagatattttaggtctgcagttgtagcttccctgactgcagactgtgaaccctacatgaccttggcaaatgcatgggcagctgcagtttgccctgatgtcattagaagcttccagggaaggataaagacctctgagacccctgggctgctcagaatctactaaatgggtggatagggcatgagggtggcccctgccaaagggacccctgtttatctgccctgtctttttgttgtctaattccccctgggtggtggagcctggaaactgtgaggtccagcagagcattccatacttccacataccctgctgccctagagtaaagaggctggacaggcctggagtggtagggaccacaaatctagggaagaatggagtccagagccaggagtggggaaagtccaaaaggaaaacctcttttgttggcccaaggcagttgtcaaagttgggatcatcaggaggcatgtccagagagatgagagaaaattctgagcccagaacaagggcaggtggggagggacagctgggtggaagcgccggtcctaagcagggagaggagacgttctgcctgaaagtgtcggcttaaagaatctgtttctgagcctcctgtgtccccatccccccgtcagctgacccacctcttcctgttcctccagaccaagctgctgacccagtatgtgctgagtctggccaaatatgaccagaactatgatattcgcgaccgggcgcgcttcacccggcagctcatcgtcccttccgagcagggtggggccctcagccgccatgccaagaagctcttcctggcacccaaaccagctccagtcttggagtcatccttcaaaggtgggagctgaaatcaagggtaaccttcctaggggaatggaaaggaactggccagagtctctgccccagaccttcctgaggcccctagccaggcaccaggcttctgtggacagtcctgctccctggctcactccttttgtccctcctgtggcaccaggaattactctttcaccctcccataaccactgccagcatcatctcacctgagggtctgccttcctggccaggatggacttgtgcctcctctcctctcaggctcccttttccatctccctccctgagcagacactaggctttggaatacataccaagatcttaaataccaaggacccaggaaggcagaaagcaaaacaacacacaaaggagaggtgtatatttttataaaggtcctgagaaagcagttgcctgcattctgtgagcttagtcactacagtcagtccaaatcccaggccccagggcttcagccttgcctctgttcctgggcttggcccttaaggcctcttttcccaagacaacggccttgagatgggcctgggagggaagggtcctcccgctgcttctccgggccccaggagtggaagccaggaacctacacagaagagagcctccttcacaaagctcagttcttctgggtatcttttcgttctttttctcttccctggacctcacgaatggggagattctgagggtgggcacagctttgaaattctcccaggaagaaggcaacagtccctttctccccgacaccatcctcactcacaggcctgtgctgccctcctccagcagtgcctcaactctgatccagacttctacacactcatgctctgactgttcatccctccctgctgagtccagagcctgactagacgtgcatgctgagcagacaggtcggcagcatctgtgggcccagagtctcctcctgcccacctctgtaggctgcctttccctggccctcagtccctgctctggcctggccagacagccttttcttccagcatgtgggcctaaaggtgcagtcagggtggaagagccattagggcacacatccatctccttcccctacccacctgggaagtcccaaccagaatcaccacccagccccacctggaaaacagctcccagagctttccctcactgctgctacctgcctgacctctaaacctatccctagaccgggaccacttccagctgggctcactgtcccacctgcttaatgccaaggccacaggctaccaggagctcccagactggccggaggaagccccagacccatctgtgcgcaacgtggaggtcagcggggtggagggttgaagtgtgtgtgtgtgtgtgtgtgtgtgtgtgtgtgtgtgtgtgtgtgtgtgtgtgtgtgttggtgggggcagacagtagggagccctggcagtgccggcccagccctcctaacaccctcccccacacacacaggaagaagatctctcccttattgagactcacgtgggcctgttgggcgaatacactgaggtcccaccttcgtgtgacgtgtgctctctcccctgccctgtctgtgtccctcttcttcccctgtgtgttgtgctcctgggccttcccatactctgtttccaccttggtttggcagtgctcctctgtgagcagcattccctcccctccatggacagtgcccctttcttcctcctctgttattccctttgtgggacagaccaggtagggcctcacaaagaggtggaataaagggtaagggcttgtgcctgcctgccttctccccaaccatgatgaaatgaccctgcaccctacccccatctccaggtacctgaatggaccaagtgctcaaatcgggagaagagaaaggagaaggaaaaacccttctactcggactctgagggggagtcaggccccacggagtccgcagacagtggtgagcagatggcagagctggggtcctctgtgctctgcccatgcatctgtgtgactgactatatgaggggtatatgtatatggttgtgtgtctaggggtgtgcacctgcttgtgaattgtttgtgcacctgagggattcatgttccaggtgtgtgtgcttgtgcaggtttctatccatggagtccatctgtgtttctgtcagttccagctggcatgtagggctgggggcaggtcagagaggtttgagggttcagtactgaatgtgaaggtggaacccaggtgtctgctccagacccaaggaggcctgcatatgagggaggaggcctcatattgttcctccacagaccctgagtctgagagtgaatcggacagtaagagcagcagtgagagcggctctggggagtccagcagtgagtccgacaatgaagaccaggatgaggatgaggagaaagggagaggcagtgagaggtgagaagggagctagccagatggctggtggggttcagggggctttcctggaaagagggctagcattgagctttagccagtctcctaagagcccctgagcccctcgtgagctgggtggggctgtcagctcacatgacgcctactttcgctggctgcaggagatctctgaggcctcatgggctggtgtggagaagcaaccagagtcctagagcctgagctggcacaagctggcttcaagctctcacggggtccctgctataggacctcaggtgtgaaccctcctggctcaggctccccacaccactccagcttttcagcatttctcctgcttctgtgaagcaaggagggagtgtccaggccaggcctgagccaacctttcccactccttcagtgaacagagtgaggaggatggtaagaggaagacaaagaagaaggtgccagagagaaaaggagaagcgtcatcctctgatgagggcagcgattccagcagtagctcatcagagtccgagatgacatcggagtccgaggaggagcagttagaacctgcctcctggagcaggaaaacagtgagagccttggggcagagtcagggtgtgctcatgggccagggccctccccaacctctgggccaggcccagacatctatctccctaccatccagaacagaacatgacatcttctacccaacccagaacatgccaaggtgctccccttccccacacccacatcccatttttctctttcagcctcccagcagcaaaagtgctcctgcaaccaaggagatctccctgcttgatctagaggattgtgagtttgggtggtaaaagtcacaggggaaaggaggcctggggagcatgaattagaacagcccatagggactctggatcgggttcctcaggtcttgtgggagcaggggagcagacagaacatatcttcaggcctgagagggcagcagggctgacctccccaggtctggggttgaggtctaggaatgggtattttgcgagagcctccaggcagccatgtgccccgctgtccatggtgctgaaatgcgtgctccttgatccctaggctccctgctcaacccaagccacctccactttgcctcctcatagtcttatctactcccacagtcacccctcccagtgtccagcctgtgtctcccccagcaattgtgtctaccagtctggctgctgacctggagggcctgacactcacagactccaccctggtaccgtcggtgagtgggatggaggaggggaccgggctggggcagggacacatccctgtgctgcatcctatggtgtggatgtgtgtggggggtgggtgtgatggaggatgtgatagctttgagtcccagctgctggatggccctaggggacaatgctgggacaggctctctccatcttgctcagttctgtccttccctacccctccactctagcttctgagtccagtatcgggtgttgggcggcaggagctgctgcaccgggtagctggcgaggggctggctgtggactacaccttcagccgccaacctttctccggggatccccacatggtgtccgtgcacatccacttctccaacagctctgatacccccatcaagggcctgcatgtgggcactcccaaactgcctgctggcatcagcatccaagaatttcccgaaattggtgcgaagggctttggatggggtggaggaggaggctcctgggcagagtcagtctttctgtggttgctgataccctccttgtgccaggccaggggccaagctataggggcacagagatagcatctaacatgatcaacactctggtggacaagacagatgatgaaataagcaagttcacatcagggcgggaggtgcttgcagcagcagatttgggccttggttgtttcaggactaacttaaatgtggtgagggtgagtgggggaaagggtgcttagagttcaggaggaaaccgggaacagtctccagcagccaagaaagccaagattctgtagagggctggtcagctgtgacagtggagaggagagtagggctaggctgggttctagacctatcaggtgatggtggccctccctctccccttcactgccttataccacttcagagtccctggcacctggagaatctgccactgctgtaatgggcattaatttctgtgactcaacccaggcagccaacttccagctgtggtatgtgcccaactcgaggtgggggtgagaggatgggctggaaagggacagggtaacaatgaactggaaatggaggtggtgcttagtggggatacatcatgattgggtgggtctggaagccatctcaggccctcattcctgacctcactctttcactgcctccaagctgtgcctctacacagggtgggaagtgaggggagagatgacagccttaattcttctccgtttcctcccacccctcccagcacccagacccgacagttctacgtctccattcagccacctgttggggagctgatggcccctgtgttcatgagtgaaaatgagtttaagaaggaacagggtgagtgctccctgggagtgggcagagagggaagtatagaagctgactccagaatgtccagcttggatggtagggagaatggtggtgtccttcatctagaccaggggtcagcaaactttctgtaacgggccaaagataaatgttttaggctttgagaatcatgtggtctctgttgcagttacaacacgactgtggctgttgaaacatagaaacatccacagacagtatgtaaatgaacgagtatggctgtgttccaagaaatttccatttatatttatagatactgaagtttaaatttcatgtaattttcatgtgtcatgaaatattaatcttttgattgctcccccaacacttaaaaaatattaaaaacattgtgggccatataggtggtgggctggatttggtctggaggctgtaatttgcaaaacctctggcctagaagaaagaagagtggcttgggcaagggaggagggaagatcatggttagttttggataagctgattttgaaatgcatttgggaaattcaggaggagctatttagtatgcaactgaaaatatgggtctatgcccaggaaacactttgaagctggagtcatgaacatagaggtggtaatggaagctgtgaatatgaatgagatcactctgggaggtgggagaaaataggaaggccaaggacagaaccttgggggaaaacctgaattctgcagaagaaagaggaggggagggataagagaaggagcacagggagaggtgggaggagaaccaggagagacaacaaggcagaaggtgtctgcaaaccacagttacctaagaccttcagagtcagcatataaaaggctactgccaacctgagggagagagggtcattgctaaaggagggacagaggccaactgcagtgggttgagggagaccacggctcaagtacatgcagtcctctttggaggactttagccatgaatgaggagggagacagggcattggcacgatgaaggatctcacttctggaaaggattttttggagacggggacacttgaacatgaacagattgaaggaacaaaaacaagaaaatgttattagtcatgaatgaaggggatagaagaaacaggagagggatgtcagtttctaaaaggaggtgaagaataggggaagcagtggagggaggaaagaggctgaagagaagactgctggtgtgcaggagagcagacggaggagctcccatggggggcctggatcatgtgagtggagagaagtcagccttgcagaatgaggagttctgggggtgctgtgaaggtttggaggcttcaggagccctggctaggtctggagctgctactgcagaggtacaattaaaaatgtacctgtgaatgctgcatgtgactactggattctggctgagagatcacagcagccacctgtgatctttttgtgagggcttagcttccaggagctgagtgggagttgaatgtgggttggagggccccccaggaaagatcaaagggtgtgaggttcaggatgggcgaacctcttaagaactgactggccactctcaaggggctggtagcccagatgtctgatggaggaagcgccaaatcagtctttggtaacaacatggataaaggcctgggtgggaggggtagagaggctgacaaaggcttcctgagggagggcccagtctgagagggaagtaccttctccccaagactgatgatttaaattctgacctgccctttgcatgataccttcccagcctgggagaacttgttgctcagtaagcagacccaggtgctggcctctgtacccaccatggcctctgccctcatcacgacctctacccccaggaaagctgatgggcatgaatgagatcacagagaaactcatgctgccagacacctgtcggagtgaccacattgtggtgcagaaagtgactgccactgccaacctgggtcgtgttccttgtgggacatctgatgagtacaggtactaggccaccagtagaggggaaatgatgagcatgggggccctggtttgaaggaggagccccagctgctgatccccttccaaacacagtcacccttagcagctcttcctcaccccttctattcccacctcaggtttgcagggaggacactgactggtggaagcctcgttctgctgaccctggatgcccggccagctggagctgcccagctgactgtcaacagcgagaaaatggtgattggcaccatgctggtaaaggatgtgatacaggctctgacccagtgacttccaaatgctgtgacctgtttggctcccatctatacctccccatgacacctaggctgtcagtc

SEQ ID NO: 15427 - DNA, 49644 bp, Homo sapiens
gaactagtcacggaatacaactgtgaacatgagacccttcttgtcctcacgatgctctagaggggagcacagatgaagaagcagtcagggacagtcgagtgtaatgggggcagtgggagcagggagaggacctagtctctggcgccggagagaaggaagacaggagcgtgaggtatgttccaggcagaggaaagggctttcaggaaggttgagagccaggccacaatctgtgtgagccactggactgaccagaaaagagggtggggaggactcctgaaggattctaagcaggcgacataatcagatttatattttagaaggacgtcaggctgctgcattgtggagaagagattggaggtgggccagattgaacaagagacaagggaggtgggtcttgaagttcacaggcctggcatgattgtggcctagaccaggggagaggcagaagatttgaggctgtggaagaggtggaagcctcagacctgatgattaattggatattgggtgggggtttagagggacagggggagaagatgaggattttcacgcacgtccatgtgaagagaccaccaaacaggctttgaacaataaagctttttaatcacttgggtgcaggccagctgagtccgaaaaaagagtcagcgaagggaaatggggtgggaccgttttacaggatttgggtaggtagtggaaaattacagtcaaagggggttgttctctggcggtggggggacacaaggtgctcagtgggggagcttttgagccaggatgagccaggagaaggaatttcacaagataatgtcatcagttaaggcaggcacaggccattttcactcttcagttacttcaggccatctggatgtatacgtgcaggtcacaggggatatcatggcttagcttgggctcagaggcctgacattcctgtcttcttttattaataagaaaaataacataaaatagtgttgaagtgttggggcagcaaacattttggcggggggtggtatggagagatactgcttctccatagccttgaagggctgcttcgagcgggattggggtggcgtgggaacctagagtgggagagattaagctgaaggcagattctgtggtaagggatgatattgtggggttgttagaagaaacatttgttgtataggattattggtgatggcctggatacggttttgtatgaattgaaaaactaaatggaataagagaaggagaaaaacaggtattaaaggactaagaattgggaggacccaggacatccaattagagagtgcccaaggaggttcagcatagccctgccagcaaagattatttatttactttaagagggagttaagactggcagtttggggatagcaccaggagatatcagctgtaatggtttggagaaacagtgtaaaccggcagtgtaaacaagagcagggcatgtatgagtagttgagtatggtgaataggagtatgactagtcagaagatagtagggatgacaagttttctggggcacagtccaagttggtctggtgtctggaatgagactggggcctaataaaaaggagcatctatacaggagcttgaatgggctgtaccctgcagcattccgaggacaggcccaaattctgagaagggcaagtggtaaaagtattgtcagtcctttttaagttggtggctgagcttggtgaggtgtgtttttaaaagaccattagtccgttctaccttttctgaagattgaggatggtaaggggtatgaaggtttcactgaataccaggagcctgagaaactgcttgggtgatttgaccagtaaaggctggtctgttattggactatatagaggcgggaaggccaaactgaggaattatgtctgacagaagggaagaaatgaccgcagtggccttctcagaccctgtgggaaaggcctctacccatccagtgaaagtatctacccagaccaagacgtattttagtttcctgactcggggcatgtgagtaaagtcaatttgccagtcctgggcagaggcaaatccccaggcttgatgtgtagggaagggagggggcctgaacaatccctgaggagtagtagaatagcagatggaacactgagaagtgatttccttgaggatagatttccacaatggaaaggaaatgagaggttctaagaggcaggctagcggcttgtaacctacatggaagaggttatgaaatgacgaaagaatagaatgggcctgtgaggctagaaggagatattttccttggtctgagaaccatttgccttgtgtgggaagagattcataggtgtaagtttcattgggggagtaggtaggagtgactgatgagaaggagaaaaactggccatgagggacagaagttggaatgctagctgcttttttagctaccttatcagcataagtgttgccctgagcgatgggatctgatgccttttgatggcccttgcagtgaatgactccagcttcctttggaagtaaagcggccttgagaagagtttttattaaagaggaattaatgatggaggacccttgtgtaatgaggaaagctttttgcccatataacagcatggaggtacaggatatggaaggcatatttagagtcagtataaatattgacacatagtccttttgcaagactgagggctcgagttaaggcaatgagttaagctttctgagaggtagtggaggggggcagaaagtatatgcgtcaggtgtgaggaagaaaatagattttggaagttatgagaactgtagagagtgagttgagcatagtttgtgattttgagggcctctgaaagtattaaagcagcggcagccgctgcacgcagacatgagggctaggccaaaacagtaaggtcaagttgttcggacagaaaggctacagggcgtggtcccagctcttgtgtaagaattccaaccgcacagccctgcactttggctgtgtgtgatgaaaaagggttgggatgaattagggagacctagtgtgagagcagcttctacggctgtttttaaggaatggaaaggagtggcaaaaggatttaggatctgtggggtcagctaggtttgcttttgtgagtttatataatggtttagtcaggatggtaaaactaggtatccaaaggtggaagtacctaaccatcccttgaaaggaaaggagttgttgctttgtagaagggattggggttcgggagattagccggacatgatcagcagggagagcacgtgtgttttcatgagaactatgccaagataggtaatggatgaggaagaaatttgggcttgactgaagtaatgggggctgtccgtgaagccttgcggcagtacagcctaggtagtttgctgagcctgatgggtgtcagggacagtccaagtgaaagcgaagagaggctgagatgaagggtgcaaatgaatagtaaagaaagcatgtttgaaatccagaagagaatgatgggttgtggaggggttgtggagggaggtattgaggaggagagtatatgagtttggcaccacggggtggataggcaaaacaatttggctgacaaggcacagatcctgaactaattgtaagacttgtctggtttttgaacaggtaaaatgggggaattgtaaggagagtttataggctttaaaaggccatgctgtaacaggcgagtgataacaggctttaatccttttaaagcctgctgggggatgggatattgacattgagcacggtaagggtgattaggttttaatgggatggtaaggggtgcatgatcagtcgccaaggagggaatagaggtgtcctatacttgaggattaaggtggggagatacaaggggaggatgtgaaggaggctttgaactgggggaaaaggtggcaatgaggtgtggctgtagcctaggaatagtcagggaagcagataatttaaagtgtctcggcctaataagggaactgcgcaggtggggataactgaaaaggagtgcataaaagagtattgtccaagttggcctcagagttggggagttttgagaggtttagaagcctggccatcaatacccacaacagttatggaggcaaaggaaacaggcctttgaaaagaaggtaatgtggagttggtagcctccgtattgattaagaaggggacggacttaccctccactgtaagagttacccaaagcatctgtgatggtccaggaagcttccaaggcgattgggcagtgtcagtcttcagctgctaagccgagaagatttgggaaggagtcagtcaggcagccttgggccagagttccaggggctctgggagtggctgccaggtgagttggacagtccgatttccagtggggttccacacagatgggacaaggcttaggaagaatcctgggctgtgggcattccttggcccagtggccagatttctggcacttgaagcaagatcctgatggagaaggtcctgtaggaatgcttgactgctgcagcttaggcattttgaagttcttgtgtactggagatgtggctggggtttctctcacagtggaggcaaggaactacaactcagaaatacattgctacttggctgcctttactctattattgtacaccttgaaggcgaggttaattaagtcctgttatggggtttgagggccggaatttaatttttggagttttatttaatgttgggagtggattgggtaataaaatgtatattgagaataagactgccttttgaccttttagggtctagggctgtaaagcgtctcagggttgctgcccaacgagccatgaactgggctgggtttttatatttgatgaaaaagagcctaaatactaactgatttggcagaggtcggataaaggaaaaggagcgttaaccttgactatgcctttagctccagccacctctttaagaggaaattgttgggcaggttggggagggctagtcgcagaacaaaactgtaagccggactgggtgtggggagaggaggtgatagaaggattatagggtggaggagcagaagctgagaaagaattggagtctgattcagcctggtggggagtgacctgaggagcattctggggattaggtgagaggtcagatgggtcggtagaaaaggaagattggaagattgaaaagacgcagcgacgcttggggttgggactgaggggacaggcgggagggaaagaaggaggatttgggatgagtcgcattgggaacagagactagggagggaccgatgtgtaaaagaatgcctggacatcaggcacctcagactgtttgcccattttacaacaagaattatctagatcttgtaggatggaaaaatcgaaagtgccgttttctggctatttggaaccattgttgagtttgtattggggttaagcggcattgcaaagaaaataaggcatttaggttttaggtcaggtgtgagttgaagaggttttaagttcttgagaacacaggctaagagagaagaaggaggaatggagggtggaatgttgcccacagtgaaggaggcaagcccagagaaaagagagggtagagacacggagagaaggggtggggggtgctttgccccccaggaaagtggagagaaaagagagggtagagacacagagagaaggagtcgggggtgcttgtcccccaggaacgtggagagaaaagagagggtagaaacatggagagaaggggtggggggtacttgccccccaaaaagtggtgtttgccactaagggtgaaagatcaaggcaggcatcctcgcggtgatcagacaactctgaaacgtgggtgaataatcaagcaggcgtccccgcagtgattaaacaccaagggaagactgtcttcctgagtccgtgatcggcgccggagttttgggttcacagataaaatgcatttcctgtctctaccagaaaaggaaaggaaccgaaattaagagaagggagagattgaaagatggcaccaagattgaaaggagaaagaggttgagggatagtgagagaggttggagaagagagtaaaaagaggccgcttacctgatttaaaattggtgagatgttcctcaggctggttggtctgaggacccgaggtcattaggtggatctttatcatgaagcaaagagcaggaggacaggggattgatcttccaagggtggtcccccgatccgagtcatggcaccaaatttcacgcacgtccatgtgaagagaccacccaacaggctttgtgtgagcaataaagctttttaatcacctggttgcaggccggctgagtctgaaaaaagagtcaacgaaaggagataggggtggggccattttataggatttgggtaggtagtggacaattacagtcaaaggggggtgttccttggtgggcaggggcgggggacacaaggtgctcagtgggggagcttttgagccaggatgagccaggagaaggaatttcacaaggtaatgtcatcagttaaggcaggaacaggccattttcacttcttttgtgattcttcaattacttcaggccatctggatatatacgtgcaggtcacaggggatatgatggtttagcttgggctcagaggcctgacaaggatgttactcaggttactagttcctgcaactggatggatgatggtgttattcagtgtaattggaaataaagatgttacaagcaaatttgtggaaaattaatgttgagcccagctttggacatattgagattgtaaactctgagggacatattaccctattaggtagctggatattacgatttgggttccaggagagagattagggaattattaacatatgtatgttaattaaagccacagaagtgaagataactcagggaggaggtataaaatgagttcagacactgcacaagtctgaaccctgaagacaccaacattagaagtgaccagagaacagtggaaagtgtttcaaggtacccaagaggtgaactaaaggctgaaagaaaacaatgtaatttcaagaaggagggagtggtcagtagtttcaatgcccattaaggtcaaatcaaacaaggaaaaaaatcatgaccattggttgacaaagaagagctcaattcctttctactctattccccacctcctgccctgggagataaattctggcaaagtaaggagaacaggagctagattatttctttcccagcattctgttgtggatgatttaaaacatacagaaaaatgaaatgaataatacaatgaacacatgtatatcatccatctagattcaactgtcattgacatcgtaccttatttgctttatctaaccatctattcgtatactttttttggttgaaccatgttaagttgcagagatcatgacccttcaaccccacattctaagtcgacatctaaagccagattaaaatgaataaaggagcacacaggtggtaagtagataaaacagtgaatggaaattttgctttcaagaaatttgactgtaaaagagaaagctgctggaggagaacctcactcagttcaaggaagtttgtctattttgttattttgggtttttttttttgtttcttaaaatgtatgactccatatttttgtttattattaatattaggcgggagagcctagagcaagtttaactgctgatgggaaggagcgattggtgggagagaggctgaagggaagaaaggaagtacagaacactgagtgatgggaggggaggcttactgagctgggtgggaggactagcctgggagcagggaggaccaactctgcccagagggaagagggcaggaggagaggagagtataaatgcagatggagactgggtacagtggctcatgcctgtaatcccagcactttgggaggctgaggcgggcaggtcacttgaaatcaagagttcaagactaacctggccaacatgtcaaaaccccgtctctactaaaaatacaaaaattagccagttgtggtaacgcatgtctataatcccagctactcaggaggctgaggcaggagaatcacatgaacccgggaggtggagattacagtgagccgagatggcaccactgcactccagcctgggcaacggagtgagactccatctctaaataaataaataagtaaataaatgcagatggatgggagtctggggcagggggctgcaggggatttcatctaaagactttccctttttcgggaaccaggtggtgaagccataagggcaaggctgggaatggggacttgagggtcaaaggggtttcaaatacaatgaagaaagccaaccaggccaggcgcggtggctcacgcctgtaatcctagcactttgggaggctgaggcaggcatatcacctaaggttgggagtttgagaccagcctgaccaacatggagaaaccccgtctctactaaaaatacaaaaattagccaggtgtggtggtgtatgcctgtaatcccagctacttgggaggctgaggcaggagaattgcttgaacccaggagacggaggttgcagtgagccgagatcacgccattacactccagcctgggcaataagagtgaaactccatctgaaaaaaaaaaaaaaaaaagccacccaccactggcaggccagtggcattggagaccagtgggacaagagggccaaggatgtgagagcagttggagggatagacacaggggttgcgggggagggtgctaggaggaagtagagataagagaaggttgatgggaaggaataaatcaagtattggctctggaaaggcaggtgaggattaagatgcctagggtcagtgagaagagggtatatgagatttctcaggaggctgcagtctaattgtggcagtgggattggagctgaagagggcatctctcacctctctatcaactccactgaccatctagtcccttgcccagagactaggggtaggcttggtctcctgtccctgcccttctttccctctagaggccttgtctctgagcagtgaagaggaaaccggagcatccctccctgccagtgtccggttaccaagttttgggggcgggccatctggtgactgtgacaggagccccagcgccctggccagctcagtccattcctggagaagaacctgatgcagcgattcctgcagctcccgggggccgtggtgaggcctggggtcagaggggcctgcggagctgatcaagaggctgctagccctgtgctggctcccgaaggtgggcccccactccggtaccaggccttggagcctgaggagcttcggtggctgcaggcccaggaggaagacacgaccccagaagcatctctggaaggaccttgcccagaggccagccagagccagagccagccactacggtatagaggaacccacaggaaccccctacccacacagccaggaaggccagggatgggcagttgcactctcagcccagacctcttccggtcccacctcctctgatggaggcttaggctggcatttagggtccaggctgggcggagaaggtggtcaggggcaccgtatgggggctgagggtatgagtgaggagagatgaggggcttaactccctggaggctctgaggggaggaggatagtaaaatatttgagggttgaggtcccaccttgacctctttctccccacaggcccccactggagtgggctctggacgaggtttggggacaggatacagcacagacagggtttggccagccactgcctgccagtggactggaacttaggtggtaagaggtgacagcgaggtgtatatcaagggaggtgagcatgactgacccccagtgccatgccaggccccctggctggctccagccacccccagaagagtcccttaggctaggtcagactaggggtcaggtcagagtgagtgcagcagcgtaaggggatctgactatgggagataatgtttcatggccttagggtgttgtgccttagtccctgcctctgcctcttgggaacagaagttggtgggagtgaggacgagaggcccagggcggtctcacctcaggtggtggctgcggtctgtgtcagtgcatattctgtgtcagtgcatattcgacagtcaatcttacctgtgctggctgctttaggcccagtggtcctgccccctttcattccccttctcctgcaggggcctggaatgtactcactaggctgggtggggaggatgccctggggtgtgtgcatttgacaggcgcatgtggcatttgtgggtgtggtgaggaagggaatacccagagttaaaggagattgggcaaacttggccctccttccacggaagcccagggaaaagccatcccagggtgactcctcagaagatcagaggacccttggggctggatatatttgatcttagaagcctacatttatcatcaaaaatctcaactaggagtccactgaccattttggtgaatgagactggagaggccaagtttggtccaagttatctgtgtattagatgtgatgcggcatgtgtgtgtgtgtgtagggggacgtgtgtggggtgtgtgtgtctctatgagggtgtgggggagcggggagaggtcttgtgatatatgtctgtaggggacatgtatgggatatgtgtgtctataagagggtgtgggagagtggggagaggtctcctggtggtatatgtctggggggtttgtaggtgtgtaggtgagttgtgtgggtggtttatgtgtgtagagtttttctgtgggaggtgtctgtatgtgggggagtgtgtttctctgggcgttgtgtaggcaggattttgtgggtgtgcgtgggtttatgtatggattctactagtgtctgcgggacctgtaggtatgtttgtatgagctgtccgtgaggtgtaggtatgtcgggggacatgggagtgtctgaggtatatgtgggtggtatcaatgtgtagttgtctgtggggtgtgcgtatgaaggatcctgacgtggagtgttgtgcattcatatctcagggaagctggtgcccagctctgtcatttttcctaggccctcggtgctgcccacgcctacccagctcaatggtctgtacctatgaccatgcccctggtgtcctgagctcagcctcctacccactaagaaactcaacagtctggtctgtgtttggcagggtaagagggtgattgtcttctggccctggcctgaccctggaagagtagaaggtgtcctctgatttggggggcatccccccaggtgagggagtttcagataacatgatggggctggatattttcttctgtcctcacatgacagatagcgagggcctcagataatgctggaaggcatcatctttctattttgctttccatcaaaaatctctttgggaaagacagtttctaacattcttgggatagtgacttcttagtgcccctcttcttgtctgacgtcaggtactcacgcatttctgcagccctgtgactaagttgcgtgttctgtctggttcttctcttcctctcagcattcatcacttgtttctcagcattagcagcagtcatttgccactttatgattgttatcatgctctttcctctcctaacagtgctatccccaatttctgattttctgtcatttctaaatgttgcatgtctgtgactaactttgcacacattgattttttttttattttttatttttgagatggagtctcgttctgttgcccaggctggagtgcagtggcgcgatcttggctcactgcaagctccacctcctgggttcacgccattctcctgcctcagcctactgagtagctaggactacagacgcccgccaccacacccggctaattttttttaaattttttagtagagacggggtttcaccatgttagccaggatggtctcgatctcctggccttgtgatccgcctgccttggcctcccaaagtgctgggattacaggcgtgagccaccgtgcccggcctgatttttaatttttatcactgtgatatttctcaagctgggttcttgtgcctgggtcaaagctgtgggttatcagagtgtcatctgggaaattagtgtgtgtgagtccccacacacagctgctcaccacattttggaattgtcttggcaacatatgagtgcatcagtttcacacaattctatcagctatatatagacacatttttttcatgggtttattaacaattctctgatcacttcgtgatcaccagttctgcatcctctgagtatggttagccacattgttcactgcacaagggcatctggccaaggaataccagcccatgctccacacacagaatggggagcaacagctcagggctgtgtctatctgtaggggcatgcagattgaaaatgggcttgtagcagccctgacagtgaatgctgcaaagagaccttatacatgtatatcagttccttttttaaatttttttgagatggagtctcactctgtcacccaggctggagtgcagtggcgcgatctcggctcactgcaatctccgcctcctgggttcaagcgattctcgttcctcagcctcctgagtagctgggattacaggtgtgtgccaccatgcccggctaatttttgtaattttagtagggatggggtttcaccatgttggccaggctaatctcgaactcctgaccttaagtgatctgcccaccttggcctccaaaagtgctggaattacaagcgtgagccaccacacctggcctctatttcgaatattaaactttaatttaccatatcccaaatatttttccttttgttgctattatgggctgaattgtgtccctccaaaatgcatatgttgaagttctagcccccagtacctcagaatgttacctttgaggtgattaagttaaaatgaggttattaaggggggccctaatccaatatgactgatttctttataagaagaggaaatttggatataggcacgcagaaggaagaccatgtgaagacagagaagatggttgtaagagacagaaaaacccaaagtgtgtttctcctactctcatacacaccgctcaccagagagtgcttcacctctggccacaaaaatgggtggagatttctccccaccaacaacctgttctccagcagacactaactgggtgttctctaattcaagtcaatctagtgttagattttttaggttaagggctcagtgccacaagactgctctctgcttcagatgccaattccaagtggtaagttgtcagctatacttctgaccaactggctataaatcaggggttcccatgccaccctccttgggttcaactctgtgagtggctcacagaactcagggaaactttagttatatttacccatttattataaagggtagagacaaacaccagatgaagagatgcatagggagaggtatggaaggaggggtgcagagctcccatgccctctccaggcaccacaccctccaggcaccttcacatgttccacagtctggaagctctcgaaaccctatcctcttgggtttttatgaaggcttcatgattgatcgcatctttggccatgtgatcaactcaaccatcagccccactccccattccccagaggtcaaatagtgggattgaaagtttcaaccctcagctgggcacagcagctcacgcctataatcccagcacttttggaggccaaggcgggtggatcacttgaggtcaggagttcgagaccagcctgaccaacatgatgaaacccatctctattaaaaatacaaaaatttgccaggtgtggtggtgggcaactgtagtcccagctatttggaaggctgaggcaggagaattgcttcaacccagaaggtggaggctgcagtgagccgagattgcctcactgcaccactccagcctgggcgacagagcaagactcagtgtcaaaaaaaaaaaaaaaaaaagaaagaaagaaaaaaagttccaaccatctgataacaaaagatgcttctatcacccaggaaattccaagggatttccatgtcagttgttcctctcactcaggaagttataaaggtcttaggatctctgcgtgaggaactgggtggaagaccaaatattagaacagaagttctcctagcatccctattgtcaagagttttaggagctctgtctcagaaatggggtatagagaccaaatatatatttctttacaatatcacaagaatcatctacaagccaaagaaagaggctatagaagaaaccaaccctgctgacactttaatctcagccttccagcctccagaactgtgagcaaataaatttatgttgtttaagccaccatctgtagtacttcttgtttttttttttttttagagacaggttcttgctctgttgcctaggctggagtgcagtagcacaatcatagctcactgcagcctccaacatcttggtgcaagcgatcctcccacttcagcctcctgagtagctgtgactacaggcatgtgccaccatgcctggctaattttttttatttttgtagaaacaggatctgactatgttgtccaggctggtcccaactcctgagctcaagcaatccttctgcctcagtctcccaaagtgctgggattacaagtgtgagccaccatgcctggcctgtggttctttgttatggtggttctaggaagctagtatagttgccttatttttctcataaatttagtttttagataccaaagtttaaaaattaaacctaggcctggcacagtggctcacacttgtaatcccagcactttgggaggccgaaggaggcaaatcacttgagtccaggagtttgagaccagcctggtcaacatggcgaaaccccaactctactaaaaatacaaaaaatttgccaggcatggtggtgcacacctgtaatctcagctatttaggaggctgaggcatgagaatcacttgaacccaggaggttgaggctgcagtgagccgagattgcgccactgcactccagcctgggcaacagagcgagacttcgtctcaaacagaaaaacgaaaaaaaggcctgggcgcagtggctcacacctgtaatcccagcactttgggaggctgaggtgggcggatcaactgaggtcgggagtttgagaccagcctgaccaacatggagaaacctcatctctactaaaaatacaaaaattagctgggcatggtggcgcatgcctgtaatcccagctattctggaggctgaggcaggagaattgcttgaacccaggaggtggaggttgcagtgagctgagatggcaccattgcactccagcctgggcaacaagaacgaaactctgtctcaaaaaacaaaaacgtaccaattaaacctagccatattgttgctgctaataattttatgaccttaataaaatcttcccttccttcttttgtatttaaaaataattaactgttaagcaaatgcgggatttattttggggtgaaatatgtatacaagttaaattatttgctgctggccaggtgtggtggctcacacctgtaatctcagcgctttgggaggatgaggcgggaagatcacttgaggtcaggagtttgagaccagcctgaccaacatggtgaaaccctgtctctactaaaaatacaaaaattacccgagcgtggtggtgcatgcctgtaatcccagctacttgggaggctgaggcaggagaatcacttgaacccaggaggcagaggtttcagtgacccgagatcgtgccattgcactccagcctgggcaatgagagcaaaattccatctaaaaaaaaaaaaagtgctgcaaagcagttgtcccaatagcatttatttaagtggggcgggggcgggggggtgggggcggggggagattcttattggttcgtaatttatcaagttagaccttttatgaaattccccccatgacctttgaccttctgtttttaacctggtaccaaacagcttttatcatcgtctcgtggtgtttatgttttgaagtccaatagggtgagttgtctatgattgtttccttcttttcccaaaaatattctttggagttcttacctactgattttttttttccagatgaattttgctgtcacttaagtttgacaaaatgttccctttgaaatttcaaatttttgaaatgaagtatgagatctaaaaaaaaaaagaaacctgtgtattggctcagcattacccttattcctctcagccaagtgcaagggatcacttactcaaatctttattcatcccactagagtttaatgacttccttgaatggctgttcaatgttcagtgacaggtctggcttttgttgtgaggccatctatggagtctctgggacccttccagtccctggaatcagtttggtctgagaggtcaggacttggaaacatactggaggcagggcaagggcaccctgctcttgttttggcatctacctcttttccgctggtccttcttatccatccaactagtccttttccctgagccaggtccatactttcccaccccaaacccttcctcttgtttcctggctctctgtttctggctacattcatttcctacactcctgtatcaaaagtaccacaattgcttctcgttcccacagtgcagtgcggctgagcgcctcagagcccgcggggacgctgcggggggattgcggggagggggcgttgggaggtgccgatgttgggctgggcggatgagcgcatctgcgtggtgagccttccaacgtgcgcgagaaggacgtggaagaccttttctacaagtacggccggatccgcaagatcaagcttaagaatgggcactgccttgtgcccttcgccttggtgcgctttgaggacccccgagatgcagaggatgctatttatggaagaaatagttatgattatggccagtgtcggcttcgtgtggagttctccaggacttacgaagtcggggtgggtggccccgtggtgggaggaatgggccttctgcaagaagatctgatttccgagttcttgtttcaggacttcctcaggcagctggcaggacctgaaggatcacatgcgagaagttggggatgtctgttatgccgatgtgcagaaggacggtgtggggatggttgagtatctcagaaaagaagacatggaatatgccctgcataaattggatgacactaaattccactctcatgatagtgaaacttcctacatctgagtttatcctgagagaagcaccagctatggctactcacagtctcggtttgggtcaaggggccgtgactctccatactaaagccggggttccccacaccacttctctcctttcaggccctactgagacaggtgatgggaattttttctttattttttaggttaactgagctgctttgtgctcagaatctgcattccagattgaggatttagcgtcttaggaaattattttaattttttttttttaaagaagaaaaaaaaactacatactttctaccagggccatattagcagtgaaacattttaaactgcagaaattgtggttttggttcagaaacaagttgtatatttttcactcctgaatatgggtaaaaaatcagttccgtctttgtgggttgctctgctatggagatcaacagttactgtgactgagttggcccattctgcttaaaaatatgttttaaacgtttaagaaaaatgctcatcatcactggccatcagagaaatgcaaatcaaaaccacaatgaggtaccatctcacaccagttagaatggcaatcattaaaagtcaggaaacaacaggtgctggagaggatgtggagaaatagaaacatttttacactgttggtgggagtgtaaactagttcacccattgtggaagacagtgtggcgattcctcaaggatctagaactagaaataccatttgacccagtgatcccgttattgggtatatacccaaaggattgtaaatcattctactataaagacacatgcacacgtatgtttattgcagcactgttcacaatagcaaagacttggaaccaacccaaatgtccatcagtgatagactggattaagaacatgtggcatggctgggtgcggtggctcatgcctgtaatcccagcgtggctcatgcctgtaatcccagcactttgggaggccaagacgggtagatcacgaggtcaggagatcgagaccatcctggctaacacggtgaaaccccgtctctactaaaaatacaaacaattagctgggcgtggtggtggcgggtacctgtagtcccagctactcggtaggctgaggcaggagaatggcatgaacccaggaggtggagcttgcagtgagccgagattgcgccactgcactccagcctgggcgacagagcgagactccatctcacaaaaaaaaaaaaaaaaaaaaaaaaaaagaagaagaaaatgtggcacatatacaccatggaatactatgcaaccataaaaaaggatgagttcgtgtcctttgtagggacatggatgaagctggaaaccatcattctgagcaaactactgcaaggacagaaaaccaaacactgcaggttctcactcataggtgggaattgaacaatgagaacacttgaacacggggtggggaacatcacacactggggcctgttgtggcgttgggggaggagggagggatagcattaggaggaatacctaatgtaaatgacgaattaatgggtgcagcacaccaacatggcacatgtatacatatgtaacaaagctgcacgttgtgcacatgtaccctagaacttaaaagtataattaaaaaaaaaaagtttagtaattgaaaaaaaaaagtacaacaattgggttggttggaacagcagaaatgaattgtctcacagctctggaggccaaaagtctgaactcaaggtgtcggcaggaccatgctccctctgaaacccatagggaaatccttctttgccccttctagcttctggttgtttgctggcagtctctggcattccctggcttgtagacgcatctttccaatcgtctgccttcacatggtagtctccctgtgtctgtctctttaagtggctgtcttttgttttttgtgtttttttaatttcaatttaatctattttttgtagacacattgtttcaccatgttgccaggctggtctcgaactccagggctcaagtgatcctcccgtctcagcttcccaaagtgctgggattacaggcgtgagccgccacacccagcccacatggctgtcttcttatgggaaaccagacatgggattagagacccactctattagagtaggattgcatttaactaattacatctgcaacaactctatttccaaataaggttacattctgaggtactaggggttaagacttaaatatatcctttttaggaaggacacagttcaacccacaatattagctggccacatgtttcccctgatctgtactttacttgttccccctggctctggtccctcctcgggtcaggtcctgcctgagcctcccctggccatgtcccttctttgtgcctggaccctcctgattaataccccatccccacccttgtgccctcagctgacttcttgtacctcccaccaggcatgatgacctgaaggagatgctggacaccaacaaggattctctcaagctggaggccatgaagaggattgtggcggtaagaggggaaggaggaggcctccctccgggcggggcctgggtggccaagagcagctctccttagctccttgtagaccttccctctagttagtgctgtgcctctcgctttgtccctcttcccctaccttgaccccaccacccagatgattgcccgaggaaagaatgcttcagacctgtttcccgcggtggtgaagaacgtggcctgtaagaacatagaggtgagcactacctggtgagggattgcttgtccccacctcccccaggaccacactcaagcttggggtgaggaaggaaatgatttagcccctgggggcccgacctgctgagaaatgtctctgagccaggagaagacactgtctccatgtccctgaactggatgtggatcaaggtaaaggacccggatacactcaggggtgctctcccccactgggagagtttgtccccatggaccgcagctggctggggagatgacatcccaggggtaggggggtgggcacaggtgcctgctgagaagcgttctgctgagaaacgtgctctccccaaggtgaagaagcttgtctatgtgtacctggtacgctacgctgaggagcagcaagacctggccctgctgtccatctccaccttccaacgtggcctaaaggtcaggggtctcagtttgcctcccagggcctgggcctcgttggcgctgtatcggaggagtaggcctggggagaggccatgagcatgggagcgggctctgcagaccccttcctacctgcctaaaattgggagggtcacagtcagaagaggccagccagaccctcagagagtggaagctgggctcagaaggggcgtaagagatgaagtgggtacccagggcccctgtctctcttcccaggagcctgtggtaatggctgcttctagtatgaaccacttgagcccccggagagtggagagtctctagcaatggagaacccctcaaccctcacccccctttgtgtaaaggtgtgaattgtggtccacagccaggtagatttcaacctttagcagtggcctgaatcccccacaccattctcaccttttgtttcattttgcccaaggcctctagttggatttacatatgttaggtgcatgtataagtctcccccctaagggcttttctggttagtctaagacatcttgagggtaaagacagccatttcaaggccattctctccatattggatttttcagctctgattacaaccattaactcctctatttttgcatacctttatttatttatttatttatgagacaggttctcactgtgttgcccaggctggagtgcagtggtgcaatcatggctcactggagcctcgacttccctgagctcaggtgattctcccacctctgtctcctgagtagctgcgactactcagcctgcatcaccatgctcggctaatttttttgtagtttttgtagagatggggtttcaccctgttgcctatgctggtcttggactcctgggctcaagtggcctcagcttcccaaagtgctgggattacagggatgagctaatactcctagcctggatacttttagttcaaatttctgtgagagagattgtgaaaggtccagctcatcttttcatatccagaagttctgtaggttgctgggtagacaggattgctgctcaaatccagggcccaccccttgtccaatctgctatggccagcaagaggggttgacagtcggcttctttggggtgagagtagaaagcatggtcacttgaatatacaattcattcatttagtaaatacttgggtgtctctatgccacacattgtgctagatttctttttataagtcaaaaccatggaatccgtcttagattggcaagtaatcttttggtttgagtaagggttaagtataaaaactaatctgaaattgttgtacagattttcacctatagtctctaccaactgaccctgtcccccttttagaaaaccagagctcatttagttcaactcaatgtgataatttctttctgcaaagtgccaaatagtattttaggttttgtaggccttatagtctcaactatgcaactactcaattttgcccttatggtgcaaatgcagccattgacaagtgggcgtggccgtgttccaataaatctatataaaaaacaggcaatagacagattttatccaagggctgtagcatgccagcctttgctctagaacatgtctaacaggtcatcttttctgatagggacctcactccttcataaggcaacttgctccatctcaagacaactaccactatttggggtgttttttaaaccattctcttttgttgaaacctccacaactataatttttaaaaattgatttcaggctgggtgtggtggctcatgcctgtaatcccagcactttgggaggccgaagcaggcaaatcacaaggtcaggagttcaagaccagcctggccaacatggtgaaactccatctctactaaaaatacaaaaaattagcttggcatggtggcgggtgcccataatcccagctactcaggaggctgacgcaggagaatggcttgaacccgggaggcagaggttgcaatgagccgagaacgtgccactgcagtccagcccaggcgacagtgtgagatccatctcaaaaaaaaaaaaaattgatttcaggctgtactgcattatgactgcacctgtgaatagccactgtactccagcctgggcaacatagggagaccctgtatctaaaaaataaaataaaatttactacaggttcacaaaaggcataaagaataatataatgaatatccataagaaatgacacatttctcaaatagccaaagcctcctatatatcttctcttgtttatcattcataggtatgtatttattcctgtgctagtaatttgcatattgttaagcaatataaaatgttttgtaaatggtgtcatcgtactacatatgtattcctttaaaacttgttttcttttttgttgtcactggcttttggtctctcctgcatgttggaaccaatcatttcaatccagccttctcccttctttcaatcctagcccaggctagggccgtgttcactttcttaggagatccctcatggaatcaaacctctgactggcaagcagataatccaggtctccctacatcctgtctttgtacagttggtcccttgaaccccctatgaaaccctactctatttcattttatcagtttagcacagggtccaaaccagggtgattctgaatcttaattatgtccctcctgattttgtgtcttctttcaagatactgataagctatttggaccagggcaaaagactgaggcatagcatgtttccaggttgacactgatctgttaataaaccttctccaagtatatttcaccacgttgtagacccacctgactgtacagacagctggcatttttctatcttgttaggaaggatcttattcaatagcaataaataaataaataaataacacctttcatgtgcaaagggttgtgggtgacacagagataaaacagatgtgaattctgctcttaaaaatgcttggctattaggtgaaacaaaaggcctacctaaaaaatagcaatgcaggaaatgctatgagacttccacaaacatatcactgaaatcaagatactaatatccaccggcctagttaccccatcaaaaaggaaaacacattttttttgataactttctgtgaatctataatcatttcccaaataaaatgctcacacacaaaaaaggaaaacaggtttaagcagatgatgtgactatttgtctctaagaaaacagagactccttccttttcaataaatgtttctaacccatctgtttaaaagtcaattccagaattttgtcaggaattagcatcaattttacctgcaattgtgaggatcttgtcttgtctttttccatttcagaaagtcagggtaatatctacccttctttagtgttctattcccgtcattctctaagagtaatagtacaggcacacctcattgtattgcactttgcagatattgccagatattgcactttttacaaattgagggtttgtggcaaccctacatcaatcaagtctatcagtgccatttttccaacagtatgtgctcacattgtgcctctgtcacattctggtaattctcacaatattccaaactttttaatgattattatatgttatggtgatcagtgatctttgatgttactattgtaattgttttggggtgccacaaaccatgctcagacatgaaagtgaaattaatcaataaatgttgtgtgtgttctgactgttcccccatctccttcaccttgggcctcttcattccctgagacacaacaatattgaaattagatcaattaataaccctacaatggcctctaagtgttcaagtgaaaggaggaaccacacatctctcactttaaatcaaaagctagaaatggttaggcttagtgaggaaggtatgttaaaagctgtgataggctgaaagctaggccacttgctccaaacatttagccaagttgtgaatgcaaagtaaaagttcttgaaggaaattaaaagtgctactccaggctgggcgtggtggctcacacctgtaatcccagcactttgggaggccgaggcaggaggatcacttgagaccaggggttcaagaccgtctctataaaaaatttttttaagttagcctgatgtggtggtacgcacctgtagtcttagctacttgggaggctgaggtgggaggatcacttgaacccagaagtttgaggtgcttctccagtaaacacatgaatgataaagaaagcaagacaggattattgctgatataggaaaatttaagtggtctggatagacgatcaaaccagctaccacattcccttaagccaaagcctaattcataggcaggtcttaaatctctccaattctatgatggctgagagaggtgaggaagctacagaagaaaagacggaagctagtggaggttggttcatgaagtttaagtacagaagccatctccataacaaaaaaatgcaaggtgaagcaaaagtgctgatggagaagctgcagcaagttgtccagaagatctagctaagatcattgatagatgtgactatgttcaacaagagatgctcaatgtaaatgaaacagcctcttactggaagaagatgccatctagcactttcctacctagagagaagtcaatgcctggctttaaaaaacaggctggctcttgttaggggccaatgcagctagtgactttaagttgaggccagtgctcaatgaccattctgaaaatcctggggtccttaagaattatggcagatctcctctgcctgtgctctataaatggaacaacagtgccatgacagcacatctgtttgcagttatggtttactgaattttttaagcccactgttgatacctaccgcttaaagattcctttcataatattactgctcattgacaatgcatttgttcactcaagagctctgatggagaggtacaaggagattaatgatttcatgcctgctaacacaaaatcagttctgcagcctatggatcaatgagtaattttgacttttaagtcttattatttaagaaatacatctcgtaaggctagagctgccatagatagtgattcctctcatggatctggacaaagtaaattgaaaaccttctggaaaggtttatagaaaccttctggaaaggtttaccattatagatgccattaggaacattcatgattcatgggaggaggtcaaaatattaacattaacaggagtttggaagaagttgattctaaactccatggatgactttgaggggttcactacttcagtggaggaagtaactacatatgtggtggaattctacctagaagtagaagtagaattaaaagtggagcctgaagatgtgactgaattgctgcaatctcatgataaaacttgaatggatgaggacttgcttcttatgagtgaacaaagaaagtcctttcttaaaatggaatctgccgggtgcagtggctcacgcctgtaatcccagcattttgggtggccgaggtgggtggatcacgaggtcaggagatcgagaccatcctggctaacacagtgaaaccccgtctctactaaaaacagaaaaattagccaggcatggtggcgggcacctgtagtcccagctactcgggaggctgaggcaggagaatggcgtgaacctgggaggtggagcttgcagtgacccgagatctcgccactgcattccagcctgggcgacagagcgagactccgttacaaaaaaaaaaaaaaaaaaaaaaaaaaaaactcctggtgcagatgctgtgaacattgttgaaatgacaacaaaggatttagaatattacataaacttagttgataaagcagaggcagagtttaagaggactgacttcaattttttttttttttgtagagactggggtctccctatgttgcccaggctggtcttgaactcctaggctcaagcaatcctcctacctcagcctcccaaagtgttgggattacaggcacaagccatcacgcccagcctacattgtttttttaaagacataatgctattgcatgcttagtagactacagtatattgtaaacataactttttttttttttttggagataggatctcactctgttgctcagtctggagtgcagtggcatgaacatatgtagctcacttcagcctccaactccctgggctcaagtgattctcccacttcagcttcccaagcagctgtaactataagcataacttgtatgcaccaggaaacaaaaaatttatgtgactcgttttagtgcgatatttgctttattgttgaggtctagaatcaaacccacaatatctccgaggtatgcctgtaatatatagctgctgctgctgatagtgggaagacagtcctaagccccatgatcacaatacagtgtaaggaatgcttttatacgttctgtataggatgcagtaggaataaagaagaagggcttggggccgggcgtggtggctcacgtctgtaatcccagtactttgggaggccgaggtgggcggatcacttgcggccaggagttcgagaccagcctggccaacacggcgaaacctaatctctactaaaaatacaaaaaattagctgggtgtggtggtgcgcgcctgtagtcccagctacttgggaggctgaggcaggagaatcgcttgaacccaggaggtggaggttgcagtgagccgagattgcaccaccgcactccagcctggcgacagagcgagactccatctcaaaaaaaaaaaaaaaaaaaaaaaggaagggcctacacccctattttgttttaaacactgtggaagaacagcagcttttgcaatgatttctgggagaaaggagtgtaaggttgaactccggaagggagaccagcttgcatctgctgggcggtcacctcaggcattaaaacaggcacctccaaaaaaacccttacaaggaacaggaagtgtttcaggtgtttcagcaattttaggtgttctgaaagtttttcagtgtttctggaagtgaagctacccattgcaacacctgttcaggtgtcagatttctgcaaccagagccaaaattaagtgtcccccagatacccatcactggcacaccatccaggctccagtcaagcggcagggaagcaagagctagtggtcgctggggacagtgacttccaaaggtgtggcctccccccatcagggcacctggtgccctttcatagctctgcctccacctctgcctttaggatcccaaccagctgattcgtgccagtgccctccgtgtcctctctagcatccgtgtgcccatcatagtgcccatcatgatgctagctatcaaggaagccgcctcggacatgtcaccctatgtgcggaaaacagctgcccacgccatccctaaactctacaggtatgccccagccctgtcccacgctccccaggaggctggttcctaagttctcaacccacccctggcctttcctaagtcttgcctgctgcttctcagagggtttgaggagggtagtttgggggactgacagagatggaggagaacaataaggctggggtgcaggaggtgagcatggcttggacagatattgggaaggctggggctgagagtggcaaattcccctcaccgatttctccctcagtttggactctgaccagaaggatcagctgatagaagtcattgagaagcttctggctgacaagaccacggtgcgtgtataggggcgctccgggaggggtggtgaccggcagccggccttccacccttcgcgttcaccctctcgtctttgttctttccccagctggtggcgggcagtgtggtgatggcctttgaggaggtctgcccggagcgcatcgacctgattcacaaaaactaccggaaactctgtaacctgctgatcgacgtggaggagtggggccaggtggtcatcatcagcatgctcacccgctacgcccgcacgcagttcctgagccccacccagaacgtaagtgggcccagcccaggcagagcgggccgaagtgtgtcccggggaggcgcccacagacccgtcggtctccccgtccaggaatccctactagaggagaacgcggaaaaagccttctacggctcagaggaggacgaggccaagggcgcggggtctgaggagacggccgccgcggccgccccctcccgaaagccctatgtcatggaccccgaccaccggctgctgctgcgcaacaccaaacccctgctgcagagccgcagcgccgcggtggtgatggcggtggcgcagctctacttccacctggcgcccaaggcggaagtgggcgtcatcgccaaggcgctggtgcgcctgctgcgcagccacaggtgcgctccgcccccagccccgccccctccctcgcctcctgccccgccccacgggctgcccggctccgccccctcacgcccaccagccgcttccacctctgcccacccgctccacactgaccgtagtcctgccctccgcactggtcctctccccgcaacgacttgccccaccttttcccctcatccgctgacccttgccccaaccgaggggcccggggtgctctgacccgtcctctccgcagtgaggtgcagtacgttgtgctccagaacgtggccaccatgtccatcaagcgccgggtgagcctgcgacggcgggctgtcctcgctgtccgagggccgcttctgcgggcactggaggcgttgtcggggctgggaccggggccggggaaagggaagatggaggaataccctggctgtgcagaggatggggcaggggaggctccaaatacagatagggagcagggcctggatcctgaggggccgctgaggggatgtccagtggaaaaagagctagtcagatctgagatggacgagggaagacttgaggagtggagggcagtggtgaggaggcaaggatcctgggcgctgggtcaggataggaggggtgtctctgggcagcgaggcaggcctggggcttcggtggagctccctagctgcctctcttgtgccagggtatgtttgagccctacctgaagagcttctacatcaggtccaccgaccccacccagattaagatcctgaaggtgagtgagggacagaagtgcatgtgcttcccagccctccccaccccatgtacccactcaaataactcacagtggcccccctggtgcctgcctattcctggggctgagcccaggagcccatgactgccccagctggagctgtttgttcagggagctgggctaaggagggtcagggggagaagggaactgctctttgcctagtacctggtatacacctgctactcttcataaatgaagtaacctgatatcacctcataataatcccaggatgtgtacattatattccttttataaaaatatagactctggccaggcacagtggctcacgcctaatcccagcactttgggaggccgagacaggcagatcgcctgaggtcaggagttcaagaccagcctggccaacatagcaaaacctcgtctcaacgaaaaatacaaaaattagccaggcgtggtggcaggtgcctgtaatcccagctactcgagaggctgaggctagagaattgcctgaacctgggagacagaggttgcagtgagctgagattgtgccattgcactccagcctgggtgacaagagcgaaactccatctcaatctaagaaaaagaaaaaaagactctgggaggtaactgccccaggtcacataattctgctgactccaaggttcacacttttctctcccacccacagtgttatggcccccacacacctgccccctcaggctctcctgcaaacattcacggacaaggaaagtggcgggagcccatacctccatttgattcctgctctgctgcctcattattgagtgatttccttcagcaacagttaatcttcctaacccttgtgaacatccactatgttctaggggtacatgatgagcaaactaatcagggaccctgcctttgtggagcttacagatgtggggaggaggagacattaagcagttaatcacaaggcaaatgtaaaagtccacttacaaaatatggaagaaagtgtggagagctataagggcataaaatagggagacctcatctagtctggtgccagggaagttttcccggaggatatgagacttgagctgaagcctgagagatgaacatgaattatgcagggacagaaatgggaagaactgctccacgcagaggaaacagcatctgcgaagaccctgggttaggaagtggagtgggattggggcctggaagacaagggggacagtgatgggagatgggaggtagacagcaagcagatcattcagggacttacagaccatggtgaatacgatggtctccatcctgaaagcaataggaagctttaagttttcaatgcagtagggaggtgacatggtcatactgtaagcatactgtgtagggaatccacttaagaggcaaactggtcctcttgctttttagacaagtttcataacctgtcaattccctcatcagtgtgaggatgatgcagggctgtcatgaggattgttttctggtctatgaagtgtatttggaatgaaagcacagaaagtccactggccaacccacccattttctgcctctccaaccctccctgcagctggaagtgctgaccaacctggccaatgagaccaacattcctactgtcctacgggaattccaggtacaggccagctcccagccagaagggcctgggagaggggcccatcagatccttgtgccctggtgggtaaacctcctcttatgagcccaaggctggagaaactattatcttacattcccgttccaatgtgtttggctggctttgggccaaggaatcactggattgggggtggagttgtcaccccctttcccaagtcttagtcaccggcatgataagccataaaatgaaaggccacagccttcttgaaggtcaccctcaagcctgcagagtcactgagggatttctttgtcatatcccacagacctatattcgcagcatggacaaggactttgtggcagccacaatccaggccattggacgctgtgcaactaacatcggccgagtccgtgacacctgcctcaatggcctggtgcagctgctgtccaaccgtgatggtcagtgtttccctgagtgtctaaccgtgatgatcagagggtgtctgcctgcaggtctgactctgctggccactggatatccaccagtctgcctagacacaatgtgtatccattggtctgtctgtcttgatcagggcccaagtgttcctacacctctgagggctgctagagaactgaagggggttgagagaaagagccaagggcctggggcactgcaggtgtgtctgtccacctgagtgtggccatctgactgtcttggggtccacacactcatttttgttctgtagagcttgtggttgcagagtcagtggtcgtcattaagaaattgctacagatgcagccagcacaacatggagagatcatcaaacacttggcaaagcttacagacaacatccaggtgagggagaagccatattttcactccccacttcaaggtcctccccatgatttcaagactgtataattacatatgctagccttatcaaaagtaacttccaaaccttaggtcttcaggtggaaggagcagagacactggaccatgtgaccctgaccttgttacccctgatttgctttccctttggagaccctcaatgagcacgatggactttactactactcttgttttctctctaaagctctagccaaccatggttgagtgacaaatcttgtgtttttctatcgcactgctaagctgaaacatctaaacaaggcattcccaaagattctggagagtaacatggaaataaagtactgagggtacaatgaatccagaaaatcaatcttttacatcatgactgacttagggtcttgaaagctctatgctaatgaagccctagggaagaggggaaatgctgtctaggaaatgtctaccttttaacctctctctatctcaccacccccaactcccatttccagagaacccataatacaacaggccagcacagatgaggagtgctgtttccctggaagtccacaatcctacccacccactttcccgtatttacccatcttcactcctctcccacaaccacaggtgcccatggcccgagccagcatcctgtggctcatcggagagtactgtgagcatgtccccaggattgcacctgatgtcttaagaaaaatggccaagtcattcacagcagaggaggatattgtcaagctgcaggtcatcaacctggcagccaagctctacctgaccaactctaaacaggtaaagattaagagatgaccccccagatactctggtccccagaaactccctagacagtattcttttggccctccctaggcagggctgaactctagctcctattttggaaaagaagaatcagggaaggtggctggtctgcccacataaccaatgctaccccagtgcccacaaagaccttgtagtgctggtggtcactgttgaagagactctcctatgaagctgtgacctccagtctgctagtacaagagtcctgtctgccaccttggaactctggggctgtgaagaaccacagttgattgggataagggaagggcccaacagtggcaggtactgatgggagaacatgcatcccagatgtggtctgtgcttctttccaaagcttgacaatgcttggccagtctgtgccaaagataagggggtgagtctctgcttgggcttgggtggtgctggtggccactgtcattcccaaggtgaaaggttataagagatacacagccaaggatgaggctcaactaagttgtagtatcagggtgttcagagcctcctagctgtctggcatctcctgagatggttccaggagattctcctaaaatgaagcataatgtgctgagcttttcaaggtgtcagggacatcaaacaccatgacgatttccacactctcccactcagttaagcaggacagggattggcaaactactgcccataggctgaatttggcctattcctgtttttgtaataaagttttgttggaacacagccctgctcattcatttacaaattacctatggctgcttttgtgctacaacagcagggttaactagttgcaacagactgtattgcccacaaagcctagaatagttattctctggcccttttataaaaagactctgccaatccttgaagcaaaacctctggctaggtggctggggtctacagatttatagcagggatatcccctggagactgtagcatccctgccatgtccactgtgcgtgggagtctttggatggtggcacttatctttttcagtggcttctttgatccattgtggccagagtgagccccagaggctcaaggtgaggtaggcagggccaccaagtgctgtgactgtaatcaggagtcaaaggacagcagcaacatgtggaggcaactgagtctgtataattaaatatgctagccttatcaaaagtaacttccaaaccttaggtcttcaggtggaaggaggagagacactggaccatgtgaccctgagcttgttatcagtgttgtgggcaaagcagattggagagagagaagttagagggggagagagagaagttagagggagaaagagcaccatggggaagcgttcaatcgttgaaaaaatatttgtatacttcctttgttcaggtgggaggaaggagcaagtgggaggaatgtttgaaaagatgaagcagcctgggtggggagccacccaggtaggtgggagtcttgacatgctcagcaatgagccagagtcctaaaccccaggatggtgaggttggcatgttttcataagcctgggcctgtccacatgtcatttcccccaagttgtcactgtgagctacatgtgcatttgttcatttatttaacatatatgtaggtgggagtctgacatgctcagcactgagccagagtcctaaaccccaggatggtgaggttggcatgttttcataagcctgggcctgtccacatgtcatttcccccaagttgttactgtgagctacatgtgcatttgttcatttatttaacatgtaggcctactatttgcctggtactgtgctgcgtcctgaggatatgacaatgagtgagacacatttacaggtctccagatactcacagccaagtaggagaaacaggacaaaaataaacattttaaacacagcagtaacagctgtcatcagggttggcacagcgagctgtgggtatatacagctgaaccctcccctaggaatgacccctgtcagggaacccagagtaggctgttcaggcaaatggacactcacctccagggcgcccttcacctgcaagtgagtttttgcaggccccttagaatggttatttgattcaataaagatttttgtcctccctttctttctcctttcttcccagcctcttctgggagtggtaaagaagggggagtccttggggtactaggagggaggtggtttggatgcgcacatgaccatgcttgcaaaacagtagtgatgcttcccatcctgggaccatgagtggcaatctgcccagctaaaaggccacagtaatctcagtcattctctccaatttggacatgggcccacggcatgccagatcctggcccaggatgaggccaaggaaatgaccaagatgaggcctctgccctgctattgatcagcagataatcagatactagaccagaggccacaaaggcataacatgcaggtggcgggggatgggggggttggtaatcaaagtggctattacatccacctggatatagaccctggggaaactgcctagcaggttagtttgcttttatgtgtcaggtgagatgtgtggcaggagggtctgccaggggcacagtgggatctacaaccctcccatgtgaccgcctttacagtgaatagaagattctgacaaattttgcagaattgcttttaaaaacgtaaactttttttaatatgctaaaggtaatacatgcttatcatagaacatttggaaaactcagaaaattataagtttaaactattaataagtccaccatttagaagaccaccattaattatatatttccttattttttattcctatatatagtcattcagaagttgtacttttgtctattgtccaatattttaaacttttctgcttcttttcaatgctttcatatttaatacttttttttccccattcacatttcaattaaacttttcacttagaattttctccaggctgggttcagtggctcacacctgtaatcccagcactttgggagcccaaggtgggtgggtcatttgaggtcatgaattcaagaccagcctgaccaacatggcaaaaccctgtctctactaaaagtacaaaaaaattagctgggtgtggtggtgcgctgaaatctcagctacttgggaggctgtggcaggagaattgcttgaacccaggaggtggaggttacagtgagctgagatggtaccaccacactccagcctgggccacagagcaagatccatctcaaaaataaataaaaattaaaaagaatttcctccaaatttttttctactttcacatttttaaatcaattgtattagttttctgctacataataaattactataaatttggtggcttcaaacaacacacgtttattttctcagtgtctatgggtcgagaattcaggtatggcttagttggatcttatgcaaggctacaactgaggtgtcagccaaggctgagtttttatctggaggctgtactggggaaaggtccacttccaagtcacatggtgccacgatccacttccttgcagttgtaggattgtggccctggcttcttgctggctgtcagctgggggctgcccttgccttctagaggccgtccttagctcattgccataggggcctcccaacacggatgcttaatttctccaaagccacaagggagaaagtctctagagccagtctgctagcaagaccgtcttctttttattttttaatttttatgggtacatagtaggtgtatatatttatggggtatgtgagatattttgatacaggcatataatgcataacaatcacatcagggaatggggtatccatcctctcaagcatttatcttttgtgttacaaacaatcaaattacactctcttagttatttataaatgtataataaattattgttgactgtagtcaccctgttgtgctgtcaaatactagatcttacacattctatctaactataattttgtacccattaactatccccacttcccccacccactacccttctcagcctctggtaaccattattctactctccaactccatgagctcaattcttttaatttttagccctcacaaataagtgagaacatgtgaagtttgtttttctgtgcttggcttatttcacttaaaataatgacctctagttctatccatgttgttgcaaatgacaggatctcattcttttttattctttttttatagtactgcattgtgcatatgtaccgtattttctttatctatttgtctgttgatagacacttaagttgctttcaaatcttggctatggtgaacagtgctgcaataaacgtaggtgtgcagatataacttcaatatgttgatttccttacttttgggtatatacatagcattgggattgctggatcatatggtagcactatttttagtttttgtttgtttgtttgagatggagtcttgcactgtcacccaggctggagtgcaatggcatgatctcagctcactgcaacctccgcctcccaggttcaaacgattctcctgcctcagcctcctgagtagctgggattacaggcgcccgccaccaagtctggctaattttcatatttttagtagagatggggtttcaccatgttggccaggctggtcttgaactcctggccgcaagtgatctgcccgactcggcctcccaaagtgctgggattacaggcgtgagccactgcacctggcctatttgtagtgtttttttttgagatggtgtttcactcttttttcccaggctggagtgcaatggcgtgatcttgcctcactgcaacctctgcctcctgggtgcaagtgattcttcttctgcctcagcctcccaagtagctgagattacaggtgcctgccaccacgcctagctaattttttgtatttttagtagagacagggtttcaccatgttggccaggatggtcttgatctcttgacctcgcgatccacccacctcggcctcccaaagtgctgggattacaggtgtgagccaccgtgcccggcctatgtttagttttttaaggaacctccaaactgttctccagacatttccactaacagtgtacaagggttgccttttctccatgttcttgtcagcatttgttattgcctatcttttggatataagcctacttggggtgagatgatatatctttttttgttttgttttgttttttgagacggagtcttgctctgtcacccaggctggagtgtgcagtggtgcgatcttggctcactgcaacctctgcctctgtggttcaagtgattctcctgcctcagcctcctgagtagctgggactacaggcgtgcgtcaccacgccccgttaatttctgtacttttagtaaagatggggtttcgctgtgttggtcaggctggtctcaactcctgatctcaggtgatccgcctgcctcagcctcccaaagtactgggattacaggcatgagccacccgtgcctggcctttcattgtagttttgatttgcatttctctgatgctcaatgatgttgatcaccttttcatatacgtgtttgctatctgtatgtcttcttttgagaaatgtctattcagctcttttgcccatttttaaattggattattgaatttttttttcctattgagttatttgatctccttacgtattctggttattaatcccttgtcagatgggtagtttgcaaattttttcctcctattctgtggcttgtctctttgttgattcctttgctgtgcagaacctttgtaacttgatgtgatcccatttgtctacttttgctttggttgcccgtgcttgtggggtatcactcaagaaatctttgcccagtacaatgtcctggagaatttctctaatgttttcttttattagtttcatagtttgaagtgttagatttaagtttttaatccactatgatttgatttttgcatatggtgagagataggggtctggttttattgttctgcatgtggatatcccgttttcccagcgccatttattgaagagactctcctttccctaatgtatgttcttgatacctttgtcaaaaatgaattcacggccaggcgtggtggctcatgcctgtaatcccagcatcttgggaggccgaggctggtggatcacctgaagtcaggagttcaagagcagcctggccagcatggcgaaaccctgtctctactaaaaatacaaaaattagctgagcgtggtggcgggtgcctgtaatcccagctacttgggaggctgaggcaggagaattgcttgaacccgggaggcggaggttgcagtgagccaagatcgcgccactgcactccagcctaggggacaagagcgagacttcatcttcgtccccccccgccaaaaaaaaaaaagccactgatttttttttttttttttttttttggagacggagttttgctcttgttgcccaggctggagtgcaatgggtttttttttttttttttttttgagatggagttctcactctgttgcccaggctctggactgcagtgacgcgatctccactcaccacaacctctgcctcccgggttcaagcaattctcctgcctcagcctcccgagtagctgggattacaggcatgcaccaccatgcccagctaattttgtatttttagtagagacagggtttctccatgttggtcagactggtctcgaactcctgacctcaggtattctgcctgcctcggcctcccaaagtgcttgctaggattacaggtgtgagccactgtgcctggacaatgctactgattttttttttttttgaaacggagtcttgctctgtcaccaggctggagtgcagtggcgccatcttggctcactgcaaccttcacctcccgggttcaagcggttctcctgcctcagcctcctgagtagctcggactacaggtgtgcatcaccacatccagctaatttttgtatttttagtagagacaggatttcatcatgttggccacgatggtctcaatctcttgatctcacgatctgcctgcctcggcctcccaaagtgctgggattacaggcatcagccaccgcacctggccaatgctactgatttttatgtggattttgtatcctgcgactttactgaatttattagttctaatagttttttggtggaatccttaagattttttaaatataagatcatatcatctgcaaacaaggataatttgaattcttttccaatttggataccctttatttctttctcctgtctgattgctctagatagaacttccaatacagagtcttcttaataaaacataatcataggatcatatatagtcatataccacctttgccatatcctgttggttagaagcaagtctcaggttttgcccatacccaaggtgagggattgcacaaaggcatgaacaccaggaggcagctactggtggggaagaccttagaatctgtctgccacatccatctagagcttaaacttactcatgtgtaatgtgtgaattgaggatatatttcaattttttttaacagccagttttctaagcatgattagcaggcatctgcaaggtagcatgtatgttggcataggttatggaaaggaagtcagtgtttcctgcttaaaattcctctctgacaactggagcctgttggtgagggggagccttgttctgttcttggcacactggagtgtatctcagaggccttcttgaacagcctgtaattcctgcacatcctggctagatgaggtgggggtcttggtggtgcacacaggatgccacaatccacagggaatggccccttggggtggagaagggtaatgaattattataggcaaatcctgcagtgttgaggtggtgggccagccccttcctgtgttggttgttaacatgcagttaaggctgtggacagatggatccaaataccaaacagttctttctagaactaggcaaggacttgaaggagggagtctgtgatcagccagctgggaaatctgtggaggaagacattgtccaaaccaaaagagggatcagcagcctcttgataattgactatgttggtaagggcatccactagccctggccatttagatggtgtctggccaagagaggggcaggttggtgatgaaatctgttgtgatggcatcttattttcatatttttaagtctattctattagcggtgcatgggattgggattgcttatctgtgactataacagtatcgcaggtgctgctttgctggaagggactgagctgaagagggcctgtgggccagattggaggtaggaatgtggaatcatagtggctctctagagtggtgtggggcaattctgccaaagcagctgctcagactctgggtcagcatctgaggggctttgccccttatggacatctgcttgatgtccctgccagattagctgggttaaccatgtccaaggctacacgtaacagtatgtcaccataaacctcaggaagaacagagtcagttccaggctccctcctgccggcccctgatgcccttgggcattctgcttgttgaccacttggtggttttgatcttggtcacaagtgatggaaacatggagacctgggccagggcaggctccttatgtcagcaggtaggcagtgaagggaagcagatggggtgcagctccagcagatgcaggcctaggtgcagtactgatgggctccttggcctgggaaaagccccttaatgatcctgcttcttttctgtaaaatgggggcaataatgcctacttctcagaaggcttggggagattagatgagctagtgtggagcacctagcacagagttggtgccagaaggcacttgataagtgatggctgctaccgctgttgccatgttaaggcaggttagattaggccaagatcatggcagaaatggagatattttaggtctgcagttgtagcttccctgactgcagactgtgaaccctacatgaccttggcaaatgcatgggcagctgcagtttgccctgatgtcattagaagcttccagggaaggataaagacctctgagacccctgggctgctcagaatctactaaatgggtggatagggcatgagggtggcccctgccaaagggacccctgtttatctgccctgtctttttgttgtctaattccccctgggtggtggagcctggaaactgtgaggtccagcagagcattccatacttccacataccctgctgccctagagtaaagaggctggacaggcctggagtggtagggaccacaaatctagggaagaatggagtccagagccaggagtggggaaagtccaaaaggaaaacctcttttgttggcccaaggcagttgtcaaagttgggatcatcaggaggcatgtccagagagatgagagaaaattctgagcccagaacaagggcaggtggggagggacagctgggtggaagcgccggtcctaagcagggagaggagacgttctgcctgaaagtgtcggcttaaagaatctgtttctgagcctcctgtgtccccatccccccgtcagctgacccacctcttcctgttcctccagaccaagctgctgacccagtatgtgctgagtctggccaaatatgaccagaactatgatattcgcgaccgggcgcgcttcacccggcagctcatcgtcccttccgagcagggtggggccctcagccgccatgccaagaagctcttcctggcacccaaaccagctccagtcttggagtcatccttcaaaggtgggagctgaaatcaagggtaaccttcctaggggaatggaaaggaactggccagagtctctgccccagaccttcctgaggcccctagccaggcaccaggcttctgtggacagtcctgctccctggctcactccttttgtccctcctgtggcaccaggaattactctttcaccctcccataaccactgccagcatcatctcacctgagggtctgccttcctggccaggatggacttgtgcctcctctcctctcaggctcccttttccatctccctccctgagcagacactaggctttggaatacataccaagatcttaaataccaaggacccaggaaggcagaaagcaaaacaacacacaaaggagaggtgtatatttttataaaggtcctgagaaagcagttgcctgcattctgtgagcttagtcactacagtcagtccaaatcccaggccccagggcttcagccttgcctctgttcctgggcttggcccttaaggcctcttttcccaagacaacggccttgagatgggcctgggagggaagggtcctcccgctgcttctccgggccccaggagtggaagccaggaacctacacagaagagagcctccttcacaaagctcagttcttctgggtatcttttcgttctttttctcttccctggacctcacgaatggggagattctgagggtgggcacagctttgaaattctcccaggaagaaggcaacagtccctttctccccgacaccatcctcactcacaggcctgtgctgccctcctccagcagtgcctcaactctgatccagacttctacacactcatgctctgactgttcatccctccctgctgagtccagagcctgactagacgtgcatgctgagcagacaggtcggcagcatctgtgggcccagagtctcctcctgcccacctctgtaggctgcctttccctggccctcagtccctgctctggcctggccagacagccttttcttccagcatgtgggcctaaaggtgcagtcagggtggaagagccattagggcacacatccatctccttcccctacccacctgggaagtcccaaccagaatcaccacccagccccacctggaaaacagctcccagagctttccctcactgctgctacctgcctgacctctaaacctatccctagaccgggaccacttccagctgggctcactgtcccacctgcttaatgccaaggccacaggctaccaggagctcccagactggccggaggaagccccagacccatctgtgcgcaacgtggaggtcagcggggtggagggttgaagtgtgtgtgtgtgtgtgtgtgtgtgtgtgtgtgtgtgtgtgtgtgtgtgtgtgtgtgttggtgggggcagacagtagggagccctggcagtgccggcccagccctcctaacaccctcccccacacacacaggaagaagatctctcccttattgagactcacgtgggcctgttgggcgaatacactgaggtcccaccttcgtgtgacgtgtgctctctcccctgccctgtctgtgtccctcttcttcccctgtgtgttgtgctcctgggccttcccatactctgtttccaccttggtttggcagtgctcctctgtgagcagcattccctcccctccatggacagtgcccctttcttcctcctctgttattccctttgtgggacagaccaggtagggcctcacaaagaggtggaataaagggtaagggcttgtgcctgcctgccttctccccaaccatgatgaaatgaccctgcaccctacccccatctccaggtacctgaatggaccaagtgctcaaatcgggagaagagaaaggagaaggaaaaacccttctactcggactctgagggggagtcaggccccacggagtccgcagacagtggtgagcagatggcagagctggggtcctctgtgctctgcccatgcatctgtgtgactgactatatgaggggtatatgtatatggttgtgtgtctaggggtgtgcacctgcttgtgaattgtttgtgcacctgagggattcatgttccaggtgtgtgtgcttgtgcaggtttctatccatggagtccatctgtgtttctgtcagttccagctggcatgtagggctgggggcaggtcagagaggtttgagggttcagtactgaatgtgaaggtggaacccaggtgtctgctccagacccaaggaggcctgcatatgagggaggaggcctcatattgttcctccacagaccctgagtctgagagtgaatcggacagtaagagcagcagtgagagcggctctggggagtccagcagtgagtccgacaatgaagaccaggatgaggatgaggagaaagggagaggcagtgagaggtgagaagggagctagccagatggctggtggggttcagggggctttcctggaaagagggctagcattgagctttagccagtctcctaagagcccctgagcccctcgtgagctgggtggggctgtcagctcacatgacgcctactttcgctggctgcaggagatctctgaggcctcatgggctggtgtggagaagcaaccagagtcctagagcctgagctggcacaagctggcttcaagctctcacggggtccctgctataggacctcaggtgtgaaccctcctggctcaggctccccacaccactccagcttttcagcatttctcctgcttctgtgaagcaaggagggagtgtccaggccaggcctgagccaacctttcccactccttcagtgaacagagtgaggaggatggtaagaggaagacaaagaagaaggtgccagagagaaaaggagaagcgtcatcctctgatgagggcagcgattccagcagtagctcatcagagtccgagatgacatcggagtccgaggaggagcagttagaacctgcctcctggagcaggaaaacagtgagagccttggggcagagtcagggtgtgctcatgggccagggccctccccaacctctgggccaggcccagacatctatctccctaccatccagaacagaacatgacatcttctacccaacccagaacatgccaaggtgctccccttccccacacccacatcccatttttctctttcagcctcccagcagcaaaagtgctcctgcaaccaaggagatctccctgcttgatctagaggattgtgagtttgggtggtaaaagtcacaggggaaaggaggcctggggagcatgaattagaacagcccatagggactctggatcgggttcctcaggtcttgtgggagcaggggagcagacagaacatatcttcaggcctgagagggcagcagggctgacctccccaggtctggggttgaggtctaggaatgggtattttgcgagagcctccaggcagccatgtgccccgctgtccatggtgctgaaatgcgtgctccttgatccctaggctccctgctcaacccaagccacctccactttgcctcctcatagtcttatctactcccacagtcacccctcccagtgtccagcctgtgtctcccccagcaattgtgtctaccagtctggctgctgacctggagggcctgacactcacagactccaccctggtaccgtcggtgagtgggatggaggaggggaccgggctggggcagggacacatccctgtgctgcatcctatggtgtggatgtgtgtggggggtgggtgtgatggaggatgtgatagctttgagtcccagctgctggatggccctaggggacaatgctgggacaggctctctccatcttgctcagttctgtccttccctacccctccactctagcttctgagtccagtatcgggtgttgggcggcaggagctgctgcaccgggtagctggcgaggggctggctgtggactacaccttcagccgccaacctttctccggggatccccacatggtgtccgtgcacatccacttctccaacagctctgatacccccatcaagggcctgcatgtgggcactcccaaactgcctgctggcatcagcatccaagaatttcccgaaattggtgcgaagggctttggatggggtggaggaggaggctcctgggcagagtcagtctttctgtggttgctgataccctccttgtgccaggccaggggccaagctataggggcacagagatagcatctaacatgatcaacactctggtggacaagacagatgatgaaataagcaagttcacatcagggcgggaggtgcttgcagcagcagatttgggccttggttgtttcaggactaacttaaatgtggtgagggtgagtgggggaaagggtgcttagagttcaggaggaaaccgggaacagtctccagcagccaagaaagccaagattctgtagagggctggtcagctgtgacagtggagaggagagtagggctaggctgggttctagacctatcaggtgatggtggccctccctctccccttcactgccttataccacttcagagtccctggcacctggagaatctgccactgctgtaatgggcattaatttctgtgactcaacccaggcagccaacttccagctgtggtatgtgcccaactcgaggtgggggtgagaggatgggctggaaagggacagggtaacaatgaactggaaatggaggtggtgcttagtggggatacatcatgattgggtgggtctggaagccatctcaggccctcattcctgacctcactctttcactgcctccaagctgtgcctctacacagggtgggaagtgaggggagagatgacagccttaattcttctccgtttcctcccacccctcccagcacccagacccgacagttctacgtctccattcagccacctgttggggagctgatggcccctgtgttcatgagtgaaaatgagtttaagaaggaacagggtgagtgctccctgggagtgggcagagagggaagtatagaagctgactccagaatgtccagcttggatggtagggagaatggtggtgtccttcatctagaccaggggtcagcaaactttctgtaacgggccaaagataaatgttttaggctttgagaatcatgtggtctctgttgcagttacaacacgactgtggctgttgaaacatagaaacatccacagacagtatgtaaatgaacgagtatggctgtgttccaagaaatttccatttatatttatagatactgaagtttaaatttcatgtaattttcatgtgtcatgaaatattaatcttttgattgctcccccaacacttaaaaaatattaaaaacattgtgggccatataggtggtgggctggatttggtctggaggctgtaatttgcaaaacctctggcctagaagaaagaagagtggcttgggcaagggaggagggaagatcatggttagttttggataagctgattttgaaatgcatttgggaaattcaggaggagctatttagtatgcaactgaaaatatgggtctatgcccaggaaacactttgaagctggagtcatgaacatagaggtggtaatggaagctgtgaatatgaatgagatcactctgggaggtgggagaaaataggaaggccaaggacagaaccttgggggaaaacctgaattctgcagaagaaagaggaggggagggataagagaaggagcacagggagaggtgggaggagaaccaggagagacaacaaggcagaaggtgtctgcaaaccacagttacctaagaccttcagagtcagcatataaaaggctactgccaacctgagggagagagggtcattgctaaaggagggacagaggccaactgcagtgggttgagggagaccacggctcaagtacatgcagtcctctttggaggactttagccatgaatgaggagggagacagggcattggcacgatgaaggatctcacttctggaaaggattttttggagacggggacacttgaacatgaacagattgaaggaacaaaaacaagaaaatgttattagtcatgaatgaaggggatagaagaaacaggagagggatgtcagtttctaaaaggaggtgaagaataggggaagcagtggagggaggaaagaggctgaagagaagactgctggtgtgcaggagagcagacggaggagctcccatggggggcctggatcatgtgagtggagagaagtcagccttgcagaatgaggagttctgggggtgctgtgaaggtttggaggcttcaggagccctggctaggtctggagctgctactgcagaggtacaattaaaaatgtacctgtgaatgctgcatgtgactactggattctggctgagagatcacagcagccacctgtgatctttttgtgagggcttagcttccaggagctgagtgggagttgaatgtgggttggagggccccccaggaaagatcaaagggtgtgaggttcaggatgggcgaacctcttaagaactgactggccactctcaaggggctggtagcccagatgtctgatggaggaagcgccaaatcagtctttggtaacaacatggataaaggcctgggtgggaggggtagagaggctgacaaaggcttcctgagggagggcccagtctgagagggaagtaccttctccccaagactgatgatttaaattctgacctgccctttgcatgataccttcccagcctgggagaacttgttgctcagtaagcagacccaggtgctggcctctgtacccaccatggcctctgccctcatcacgacctctacccccaggaaagctgatgggcatgaatgagatcacagagaaactcatgctgccagacacctgtcggagtgaccacattgtggtgcagaaagtgactgccactgccaacctgggtcgtgttccttgtgggacatctgatgagtacaggtactaggccaccagtagaggggaaatgatgagcatgggggccctggtttgaaggaggagccccagctgctgatccccttccaaacacagtcacccttagcagctcttcctcaccccttctattcccacctcaggtttgcagggaggacactgactggtggaagcctcgttctgctgaccctggatgcccggccagctggagctgcccagctgactgtcaacagcgagaaaatggtgattggcaccatgctggtaaaggatgtgatacaggctctgacccagtgacttccaaatgctgtgacctgtttggctcccatctatacctccccatgacacctaggctgtcagtctctctcatctttctctctctctctcatcatcctcctcatgccagatagcattcagggtgtcctctctccctctggaggaccaagccctcccctaatgccctccccatggattccttagtgatctgtgcagagagagatggcagccactcccttcagtcctcccagatttctgtagctatttatgtagcaggctca

SEQ ID NO: 15428 - DNA, 34102 bp, Homo sapiens
actgcagcctctgctgaacccctgccgcgccgccgccttcgccagcccggaccggaccggcccgccttcccttcctccgctccagccggcctccggccccgcaacctcctcctcggcgaagtctccctggccgccccatgtcggccgcccccgcctacagcgaagacaagggcggctccgctggccccggggagcccgagtacggccacgaccccgcgagcggcggcatcttctcctccgactacaagcggtgagggagcccgccaggaagctcgcgggagggttggggccggggaccgggcgaggcgcgcgggcaccatggacagcgcccggccccagcgccggccccgccccggccgcgccgaccggaagcccgcccggccccctcctgcggcctggagccccggcccagcgcgggcagcgctggcaccccggctccaggggccggcctaggacgcggaggggggcagataggggctggcgggggatgggccagctcagtttcgagaggagaaaccctccggttccaggtgtttctccggtttgcggcgttgcgttaggggttcccttcctttttcgtgctaggcgggttggcttcccaaaaatgtgggggaggggtctgagtcagcgaacttgagcttgagcctggggcctcttcaggaaggcgggccctggatgtacttgcacagcctcccagcttggccctgctgcaaattcatttcccctccctctggtccccatctccatctgaccctcacatccctgctcctggcattgcccctgtagttcagctccaccttcacaccctcccccacctttgattcgttcgtttgtttcttcatttgtttattcgtaaattctgcaacaagcatttatgaaaagccaactgtgtcgagtcctgaactagtcacggaatacaactgtgaacatgagacccttcttgtcctcacgatgctctagaggggagcacagatgaagaagcagtcagggacagtcgagtgtaatgggggcagtgggagcagggagaggacctagtctctggcgccggagagaaggaagacaggagcgtgaggtatgttccaggcagaggaaagggctttcaggaaggttgagagccaggccacaatctgtgtgagccactggactgaccagaaaagagggtggggaggactcctgaaggattctaagcaggcgacataatcagatttatattttagaaggacgtcaggctgctgcattgtggagaagagattggaggtgggccagattgaacaagagacaagggaggtgggtcttgaagttcacaggcctggcatgattgtggcctagaccaggggagaggcagaagatttgaggctgtggaagaggtggaagcctcagacctgatgattaattggatattgggtgggggtttagagggacagggggagaagatgaggattttcacgcacgtccatgtgaagagaccaccaaacaggctttgaacaataaagctttttaatcacttgggtgcaggccagctgagtccgaaaaaagagtcagcgaagggaaatggggtgggaccgttttacaggatttgggtaggtagtggaaaattacagtcaaagggggttgttctctggcggtggggggacacaaggtgctcagtgggggagcttttgagccaggatgagccaggagaaggaatttcacaagataatgtcatcagttaaggcaggcacaggccattttcactcttcagttacttcaggccatctggatgtatacgtgcaggtcacaggggatatcatggcttagcttgggctcagaggcctgacattcctgtcttcttttattaataagaaaaataacataaaatagtgttgaagtgttggggcagcaaacattttggcggggggtggtatggagagatactgcttctccatagccttgaagggctgcttcgagcgggattggggtggcgtgggaacctagagtgggagagattaagctgaaggcagattctgtggtaagggatgatattgtggggttgttagaagaaacatttgttgtataggattattggtgatggcctggatacggttttgtatgaattgaaaaactaaatggaataagagaaggagaaaaacaggtattaaaggactaagaattgggaggacccaggacatccaattagagagtgcccaaggaggttcagcatagccctgccagcaaagattatttatttactttaagagggagttaagactggcagtttggggatagcaccaggagatatcagctgtaatggtttggagaaacagtgtaaaccggcagtgtaaacaagagcagggcatgtatgagtagttgagtatggtgaataggagtatgactagtcagaagatagtagggatgacaagttttctggggcacagtccaagttggtctggtgtctggaatgagactggggcctaataaaaaggagcatctatacaggagcttgaatgggctgtaccctgcagcattccgaggacaggcccaaattctgagaagggcaagtggtaaaagtattgtcagtcctttttaagttggtggctgagcttggtgaggtgtgtttttaaaagaccattagtccgttctaccttttctgaagattgaggatggtaaggggtatgaaggtttcactgaataccaggagcctgagaaactgcttgggtgatttgaccagtaaaggctggtctgttattggactatatagaggcgggaaggccaaactgaggaattatgtctgacagaagggaagaaatgaccgcagtggccttctcagaccctgtgggaaaggcctctacccatccagtgaaagtatctacccagaccaagacgtattttagtttcctgactcggggcatgtgagtaaagtcaatttgccagtcctgggcagaggcaaatccccaggcttgatgtgtagggaagggagggggcctgaacaatccctgaggagtagtagaatagcagatggaacactgagaagtgatttccttgaggatagatttccacaatggaaaggaaatgagaggttctaagaggcaggctagcggcttgtaacctacatggaagaggttatgaaatgacgaaagaatagaatgggcctgtgaggctagaaggagatattttccttggtctgagaaccatttgccttgtgtgggaagagattcataggtgtaagtttcattgggggagtaggtaggagtgactgatgagaaggagaaaaactggccatgagggacagaagttggaatgctagctgcttttttagctaccttatcagcataagtgttgccctgagcgatgggatctgatgccttttgatggcccttgcagtgaatgactccagcttcctttggaagtaaagcggccttgagaagagtttttattaaagaggaattaatgatggaggacccttgtgtaatgaggaaagctttttgcccatataacagcatggaggtacaggatatggaaggcatatttagagtcagtataaatattgacacatagtccttttgcaagactgagggctcgagttaaggcaatgagttaagctttctgagaggtagtggaggggggcagaaagtatatgcgtcaggtgtgaggaagaaaatagattttggaagttatgagaactgtagagagtgagttgagcatagtttgtgattttgagggcctctgaaagtattaaagcagcggcagccgctgcacgcagacatgagggctaggccaaaacagtaaggtcaagttgttcggacagaaaggctacagggcgtggtcccagctcttgtgtaagaattccaaccgcacagccctgcactttggctgtgtgtgatgaaaaagggttgggatgaattagggagacctagtgtgagagcagcttctacggctgtttttaaggaatggaaaggagtggcaaaaggatttaggatctgtggggtcagctaggtttgcttttgtgagtttatataatggtttagtcaggatggtaaaactaggtatccaaaggtggaagtacctaaccatcccttgaaaggaaaggagttgttgctttgtagaagggattggggttcgggagattagccggacatgatcagcagggagagcacgtgtgttttcatgagaactatgccaagataggtaatggatgaggaagaaatttgggcttgactgaagtaatgggggctgtccgtgaagccttgcggcagtacagcctaggtagtttgctgagcctgatgggtgtcagggacagtccaagtgaaagcgaagagaggctgagatgaagggtgcaaatgaatagtaaagaaagcatgtttgaaatccagaagagaatgatgggttgtggaggggttgtggagggaggtattgaggaggagagtatatgagtttggcaccacggggtggataggcaaaacaatttggctgacaaggcacagatcctgaactaattgtaagacttgtctggtttttgaacaggtaaaatgggggaattgtaaggagagtttataggctttaaaaggccatgctgtaacaggcgagtgataacaggctttaatccttttaaagcctgctgggggatgggatattgacattgagcacggtaagggtgattaggttttaatgggatggtaaggggtgcatgatcagtcgccaaggagggaatagaggtgtcctatacttgaggattaaggtggggagatacaaggggaggatgtgaaggaggctttgaactgggggaaaaggtggcaatgaggtgtggctgtagcctaggaatagtcagggaagcagataatttaaagtgtctcggcctaataagggaactgcgcaggtggggataactgaaaaggagtgcataaaagagtattgtccaagttggcctcagagttggggagttttgagaggtttagaagcctggccatcaatacccacaacagttatggaggcaaaggaaacaggcctttgaaaagaaggtaatgtggagttggtagcctccgtattgattaagaaggggacggacttaccctccactgtaagagttacccaaagcatctgtgatggtccaggaagcttccaaggcgattgggcagtgtcagtcttcagctgctaagccgagaagatttgggaaggagtcagtcaggcagccttgggccagagttccaggggctctgggagtggctgccaggtgagttggacagtccgatttccagtggggttccacacagatgggacaaggcttaggaagaatcctgggctgtgggcattccttggcccagtggccagatttctggcacttgaagcaagatcctgatggagaaggtcctgtaggaatgcttgactgctgcagcttaggcattttgaagttcttgtgtactggagatgtggctggggtttctctcacagtggaggcaaggaactacaactcagaaatacattgctacttggctgcctttactctattattgtacaccttgaaggcgaggttaattaagtcctgttatggggtttgagggccggaatttaatttttggagttttatttaatgttgggagtggattgggtaataaaatgtatattgagaataagactgccttttgaccttttagggtctagggctgtaaagcgtctcagggttgctgcccaacgagccatgaactgggctgggtttttatatttgatgaaaaagagcctaaatactaactgatttggcagaggtcggataaaggaaaaggagcgttaaccttgactatgcctttagctccagccacctctttaagaggaaattgttgggcaggttggggagggctagtcgcagaacaaaactgtaagccggactgggtgtggggagaggaggtgatagaaggattatagggtggaggagcagaagctgagaaagaattggagtctgattcagcctggtggggagtgacctgaggagcattctggggattaggtgagaggtcagatgggtcggtagaaaaggaagattggaagattgaaaagacgcagcgacgcttggggttgggactgaggggacaggcgggagggaaagaaggaggatttgggatgagtcgcattgggaacagagactagggagggaccgatgtgtaaaagaatgcctggacatcaggcacctcagactgtttgcccattttacaacaagaattatctagatcttgtaggatggaaaaatcgaaagtgccgttttctggctatttggaaccattgttgagtttgtattggggttaagcggcattgcaaagaaaataaggcatttaggttttaggtcaggtgtgagttgaagaggttttaagttcttgagaacacaggctaagagagaagaaggaggaatggagggtggaatgttgcccacagtgaaggaggcaagcccagagaaaagagagggtagagacacggagagaaggggtggggggtgctttgccccccaggaaagtggagagaaaagagagggtagagacacagagagaaggagtcgggggtgcttgtcccccaggaacgtggagagaaaagagagggtagaaacatggagagaaggggtggggggtacttgccccccaaaaagtggtgtttgccactaagggtgaaagatcaaggcaggcatcctcgcggtgatcagacaactctgaaacgtgggtgaataatcaagcaggcgtccccgcagtgattaaacaccaagggaagactgtcttcctgagtccgtgatcggcgccggagttttgggttcacagataaaatgcatttcctgtctctaccagaaaaggaaaggaaccgaaattaagagaagggagagattgaaagatggcaccaagattgaaaggagaaagaggttgagggatagtgagagaggttggagaagagagtaaaaagaggccgcttacctgatttaaaattggtgagatgttcctcaggctggttggtctgaggacccgaggtcattaggtggatctttatcatgaagcaaagagcaggaggacaggggattgatcttccaagggtggtcccccgatccgagtcatggcaccaaatttcacgcacgtccatgtgaagagaccacccaacaggctttgtgtgagcaataaagctttttaatcacctggttgcaggccggctgagtctgaaaaaagagtcaacgaaaggagataggggtggggccattttataggatttgggtaggtagtggacaattacagtcaaaggggggtgttccttggtgggcaggggcgggggacacaaggtgctcagtgggggagcttttgagccaggatgagccaggagaaggaatttcacaaggtaatgtcatcagttaaggcaggaacaggccattttcacttcttttgtgattcttcaattacttcaggccatctggatatatacgtgcaggtcacaggggatatgatggtttagcttgggctcagaggcctgacaaggatgttactcaggttactagttcctgcaactggatggatgatggtgttattcagtgtaattggaaataaagatgttacaagcaaatttgtggaaaattaatgttgagcccagctttggacatattgagattgtaaactctgagggacatattaccctattaggtagctggatattacgatttgggttccaggagagagattagggaattattaacatatgtatgttaattaaagccacagaagtgaagataactcagggaggaggtataaaatgagttcagacactgcacaagtctgaaccctgaagacaccaacattagaagtgaccagagaacagtggaaagtgtttcaaggtacccaagaggtgaactaaaggctgaaagaaaacaatgtaatttcaagaaggagggagtggtcagtagtttcaatgcccattaaggtcaaatcaaacaaggaaaaaaatcatgaccattggttgacaaagaagagctcaattcctttctactctattccccacctcctgccctgggagataaattctggcaaagtaaggagaacaggagctagattatttctttcccagcattctgttgtggatgatttaaaacatacagaaaaatgaaatgaataatacaatgaacacatgtatatcatccatctagattcaactgtcattgacatcgtaccttatttgctttatctaaccatctattcgtatactttttttggttgaaccatgttaagttgcagagatcatgacccttcaaccccacattctaagtcgacatctaaagccagattaaaatgaataaaggagcacacaggtggtaagtagataaaacagtgaatggaaattttgctttcaagaaatttgactgtaaaagagaaagctgctggaggagaacctcactcagttcaaggaagtttgtctattttgttattttgggtttttttttttgtttcttaaaatgtatgactccatatttttgtttattattaatattaggcgggagagcctagagcaagtttaactgctgatgggaaggagcgattggtgggagagaggctgaagggaagaaaggaagtacagaacactgagtgatgggaggggaggcttactgagctgggtgggaggactagcctgggagcagggaggaccaactctgcccagagggaagagggcaggaggagaggagagtataaatgcagatggagactgggtacagtggctcatgcctgtaatcccagcactttgggaggctgaggcgggcaggtcacttgaaatcaagagttcaagactaacctggccaacatgtcaaaaccccgtctctactaaaaatacaaaaattagccagttgtggtaacgcatgtctataatcccagctactcaggaggctgaggcaggagaatcacatgaacccgggaggtggagattacagtgagccgagatggcaccactgcactccagcctgggcaacggagtgagactccatctctaaataaataaataagtaaataaatgcagatggatgggagtctggggcagggggctgcaggggatttcatctaaagactttccctttttcgggaaccaggtggtgaagccataagggcaaggctgggaatggggacttgagggtcaaaggggtttcaaatacaatgaagaaagccaaccaggccaggcgcggtggctcacgcctgtaatcctagcactttgggaggctgaggcaggcatatcacctaaggttgggagtttgagaccagcctgaccaacatggagaaaccccgtctctactaaaaatacaaaaattagccaggtgtggtggtgtatgcctgtaatcccagctacttgggaggctgaggcaggagaattgcttgaacccaggagacggaggttgcagtgagccgagatcacgccattacactccagcctgggcaataagagtgaaactccatctgaaaaaaaaaaaaaaaaaagccacccaccactggcaggccagtggcattggagaccagtgggacaagagggccaaggatgtgagagcagttggagggatagacacaggggttgcgggggagggtgctaggaggaagtagagataagagaaggttgatgggaaggaataaatcaagtattggctctggaaaggcaggtgaggattaagatgcctagggtcagtgagaagagggtatatgagatttctcaggaggctgcagtctaattgtggcagtgggattggagctgaagagggcatctctcacctctctatcaactccactgaccatctagtcccttgcccagagactaggggtaggcttggtctcctgtccctgcccttctttccctctagaggccttgtctctgagcagtgaagaggaaaccggagcatccctccctgccagtgtccggttaccaagttttgggggcgggccatctggtgactgtgacaggagccccagcgccctggccagctcagtccattcctggagaagaacctgatgcagcgattcctgcagctcccgggggccgtggtgaggcctggggtcagaggggcctgcggagctgatcaagaggctgctagccctgtgctggctcccgaaggtgggcccccactccggtaccaggccttggagcctgaggagcttcggtggctgcaggcccaggaggaagacacgaccccagaagcatctctggaaggaccttgcccagaggccagccagagccagagccagccactacggtatagaggaacccacaggaaccccctacccacacagccaggaaggccagggatgggcagttgcactctcagcccagacctcttccggtcccacctcctctgatggaggcttaggctggcatttagggtccaggctgggcggagaaggtggtcaggggcaccgtatgggggctgagggtatgagtgaggagagatgaggggcttaactccctggaggctctgaggggaggaggatagtaaaatatttgagggttgaggtcccaccttgacctctttctccccacaggcccccactggagtgggctctggacgaggtttggggacaggatacagcacagacagggtttggccagccactgcctgccagtggactggaacttaggtggtaagaggtgacagcgaggtgtatatcaagggaggtgagcatgactgacccccagtgccatgccaggccccctggctggctccagccacccccagaagagtcccttaggctaggtcagactaggggtcaggtcagagtgagtgcagcagcgtaaggggatctgactatgggagataatgtttcatggccttagggtgttgtgccttagtccctgcctctgcctcttgggaacagaagttggtgggagtgaggacgagaggcccagggcggtctcacctcaggtggtggctgcggtctgtgtcagtgcatattctgtgtcagtgcatattcgacagtcaatcttacctgtgctggctgctttaggcccagtggtcctgccccctttcattccccttctcctgcaggggcctggaatgtactcactaggctgggtggggaggatgccctggggtgtgtgcatttgacaggcgcatgtggcatttgtgggtgtggtgaggaagggaatacccagagttaaaggagattgggcaaacttggccctccttccacggaagcccagggaaaagccatcccagggtgactcctcagaagatcagaggacccttggggctggatatatttgatcttagaagcctacatttatcatcaaaaatctcaactaggagtccactgaccattttggtgaatgagactggagaggccaagtttggtccaagttatctgtgtattagatgtgatgcggcatgtgtgtgtgtgtgtagggggacgtgtgtggggtgtgtgtgtctctatgagggtgtgggggagcggggagaggtcttgtgatatatgtctgtaggggacatgtatgggatatgtgtgtctataagagggtgtgggagagtggggagaggtctcctggtggtatatgtctggggggtttgtaggtgtgtaggtgagttgtgtgggtggtttatgtgtgtagagtttttctgtgggaggtgtctgtatgtgggggagtgtgtttctctgggcgttgtgtaggcaggattttgtgggtgtgcgtgggtttatgtatggattctactagtgtctgcgggacctgtaggtatgtttgtatgagctgtccgtgaggtgtaggtatgtcgggggacatgggagtgtctgaggtatatgtgggtggtatcaatgtgtagttgtctgtggggtgtgcgtatgaaggatcctgacgtggagtgttgtgcattcatatctcagggaagctggtgcccagctctgtcatttttcctaggccctcggtgctgcccacgcctacccagctcaatggtctgtacctatgaccatgcccctggtgtcctgagctcagcctcctacccactaagaaactcaacagtctggtctgtgtttggcagggtaagagggtgattgtcttctggccctggcctgaccctggaagagtagaaggtgtcctctgatttggggggcatccccccaggtgagggagtttcagataacatgatggggctggatattttcttctgtcctcacatgacagatagcgagggcctcagataatgctggaaggcatcatctttctattttgctttccatcaaaaatctctttgggaaagacagtttctaacattcttgggatagtgacttcttagtgcccctcttcttgtctgacgtcaggtactcacgcatttctgcagccctgtgactaagttgcgtgttctgtctggttcttctcttcctctcagcattcatcacttgtttctcagcattagcagcagtcatttgccactttatgattgttatcatgctctttcctctcctaacagtgctatccccaatttctgattttctgtcatttctaaatgttgcatgtctgtgactaactttgcacacattgattttttttttattttttatttttgagatggagtctcgttctgttgcccaggctggagtgcagtggcgcgatcttggctcactgcaagctccacctcctgggttcacgccattctcctgcctcagcctactgagtagctaggactacagacgcccgccaccacacccggctaattttttttaaattttttagtagagacggggtttcaccatgttagccaggatggtctcgatctcctggccttgtgatccgcctgccttggcctcccaaagtgctgggattacaggcgtgagccaccgtgcccggcctgatttttaatttttatcactgtgatatttctcaagctgggttcttgtgcctgggtcaaagctgtgggttatcagagtgtcatctgggaaattagtgtgtgtgagtccccacacacagctgctcaccacattttggaattgtcttggcaacatatgagtgcatcagtttcacacaattctatcagctatatatagacacatttttttcatgggtttattaacaattctctgatcacttcgtgatcaccagttctgcatcctctgagtatggttagccacattgttcactgcacaagggcatctggccaaggaataccagcccatgctccacacacagaatggggagcaacagctcagggctgtgtctatctgtaggggcatgcagattgaaaatgggcttgtagcagccctgacagtgaatgctgcaaagagaccttatacatgtatatcagttccttttttaaatttttttgagatggagtctcactctgtcacccaggctggagtgcagtggcgcgatctcggctcactgcaatctccgcctcctgggttcaagcgattctcgttcctcagcctcctgagtagctgggattacaggtgtgtgccaccatgcccggctaatttttgtaattttagtagggatggggtttcaccatgttggccaggctaatctcgaactcctgaccttaagtgatctgcccaccttggcctccaaaagtgctggaattacaagcgtgagccaccacacctggcctctatttcgaatattaaactttaatttaccatatcccaaatatttttccttttgttgctattatgggctgaattgtgtccctccaaaatgcatatgttgaagttctagcccccagtacctcagaatgttacctttgaggtgattaagttaaaatgaggttattaaggggggccctaatccaatatgactgatttctttataagaagaggaaatttggatataggcacgcagaaggaagaccatgtgaagacagagaagatggttgtaagagacagaaaaacccaaagtgtgtttctcctactctcatacacaccgctcaccagagagtgcttcacctctggccacaaaaatgggtggagatttctccccaccaacaacctgttctccagcagacactaactgggtgttctctaattcaagtcaatctagtgttagattttttaggttaagggctcagtgccacaagactgctctctgcttcagatgccaattccaagtggtaagttgtcagctatacttctgaccaactggctataaatcaggggttcccatgccaccctccttgggttcaactctgtgagtggctcacagaactcagggaaactttagttatatttacccatttattataaagggtagagacaaacaccagatgaagagatgcatagggagaggtatggaaggaggggtgcagagctcccatgccctctccaggcaccacaccctccaggcaccttcacatgttccacagtctggaagctctcgaaaccctatcctcttgggtttttatgaaggcttcatgattgatcgcatctttggccatgtgatcaactcaaccatcagccccactccccattccccagaggtcaaatagtgggattgaaagtttcaaccctcagctgggcacagcagctcacgcctataatcccagcacttttggaggccaaggcgggtggatcacttgaggtcaggagttcgagaccagcctgaccaacatgatgaaacccatctctattaaaaatacaaaaatttgccaggtgtggtggtgggcaactgtagtcccagctatttggaaggctgaggcaggagaattgcttcaacccagaaggtggaggctgcagtgagccgagattgcctcactgcaccactccagcctgggcgacagagcaagactcagtgtcaaaaaaaaaaaaaaaaaaagaaagaaagaaaaaaagttccaaccatctgataacaaaagatgcttctatcacccaggaaattccaagggatttccatgtcagttgttcctctcactcaggaagttataaaggtcttaggatctctgcgtgaggaactgggtggaagaccaaatattagaacagaagttctcctagcatccctattgtcaagagttttaggagctctgtctcagaaatggggtatagagaccaaatatatatttctttacaatatcacaagaatcatctacaagccaaagaaagaggctatagaagaaaccaaccctgctgacactttaatctcagccttccagcctccagaactgtgagcaaataaatttatgttgtttaagccaccatctgtagtacttcttgtttttttttttttttagagacaggttcttgctctgttgcctaggctggagtgcagtagcacaatcatagctcactgcagcctccaacatcttggtgcaagcgatcctcccacttcagcctcctgagtagctgtgactacaggcatgtgccaccatgcctggctaattttttttatttttgtagaaacaggatctgactatgttgtccaggctggtcccaactcctgagctcaagcaatccttctgcctcagtctcccaaagtgctgggattacaagtgtgagccaccatgcctggcctgtggttctttgttatggtggttctaggaagctagtatagttgccttatttttctcataaatttagtttttagataccaaagtttaaaaattaaacctaggcctggcacagtggctcacacttgtaatcccagcactttgggaggccgaaggaggcaaatcacttgagtccaggagtttgagaccagcctggtcaacatggcgaaaccccaactctactaaaaatacaaaaaatttgccaggcatggtggtgcacacctgtaatctcagctatttaggaggctgaggcatgagaatcacttgaacccaggaggttgaggctgcagtgagccgagattgcgccactgcactccagcctgggcaacagagcgagacttcgtctcaaacagaaaaacgaaaaaaaggcctgggcgcagtggctcacacctgtaatcccagcactttgggaggctgaggtgggcggatcaactgaggtcgggagtttgagaccagcctgaccaacatggagaaacctcatctctactaaaaatacaaaaattagctgggcatggtggcgcatgcctgtaatcccagctattctggaggctgaggcaggagaattgcttgaacccaggaggtggaggttgcagtgagctgagatggcaccattgcactccagcctgggcaacaagaacgaaactctgtctcaaaaaacaaaaacgtaccaattaaacctagccatattgttgctgctaataattttatgaccttaataaaatcttcccttccttcttttgtatttaaaaataattaactgttaagcaaatgcgggatttattttggggtgaaatatgtatacaagttaaattatttgctgctggccaggtgtggtggctcacacctgtaatctcagcgctttgggaggatgaggcgggaagatcacttgaggtcaggagtttgagaccagcctgaccaacatggtgaaaccctgtctctactaaaaatacaaaaattacccgagcgtggtggtgcatgcctgtaatcccagctacttgggaggctgaggcaggagaatcacttgaacccaggaggcagaggtttcagtgacccgagatcgtgccattgcactccagcctgggcaatgagagcaaaattccatctaaaaaaaaaaaaagtgctgcaaagcagttgtcccaatagcatttatttaagtggggcgggggcgggggggtgggggcggggggagattcttattggttcgtaatttatcaagttagaccttttatgaaattccccccatgacctttgaccttctgtttttaacctggtaccaaacagcttttatcatcgtctcgtggtgtttatgttttgaagtccaatagggtgagttgtctatgattgtttccttcttttcccaaaaatattctttggagttcttacctactgattttttttttccagatgaattttgctgtcacttaagtttgacaaaatgttccctttgaaatttcaaatttttgaaatgaagtatgagatctaaaaaaaaaaagaaacctgtgtattggctcagcattacccttattcctctcagccaagtgcaagggatcacttactcaaatctttattcatcccactagagtttaatgacttccttgaatggctgttcaatgttcagtgacaggtctggcttttgttgtgaggccatctatggagtctctgggacccttccagtccctggaatcagtttggtctgagaggtcaggacttggaaacatactggaggcagggcaagggcaccctgctcttgttttggcatctacctcttttccgctggtccttcttatccatccaactagtccttttccctgagccaggtccatactttcccaccccaaacccttcctcttgtttcctggctctctgtttctggctacattcatttcctacactcctgtatcaaaagtaccacaattgcttctcgttcccacagtgcagtgcggctgagcgcctcagagcccgcggggacgctgcggggggattgcggggagggggcgttgggaggtgccgatgttgggctgggcggatgagcgcatctgcgtggtgagccttccaacgtgcgcgagaaggacgtggaagaccttttctacaagtacggccggatccgcaagatcaagcttaagaatgggcactgccttgtgcccttcgccttggtgcgctttgaggacccccgagatgcagaggatgctatttatggaagaaatagttatgattatggccagtgtcggcttcgtgtggagttctccaggacttacgaagtcggggtgggtggccccgtggtgggaggaatgggccttctgcaagaagatctgatttccgagttcttgtttcaggacttcctcaggcagctggcaggacctgaaggatcacatgcgagaagttggggatgtctgttatgccgatgtgcagaaggacggtgtggggatggttgagtatctcagaaaagaagacatggaatatgccctgcataaattggatgacactaaattccactctcatgatagtgaaacttcctacatctgagtttatcctgagagaagcaccagctatggctactcacagtctcggtttgggtcaaggggccgtgactctccatactaaagccggggttccccacaccacttctctcctttcaggccctactgagacaggtgatgggaattttttctttattttttaggttaactgagctgctttgtgctcagaatctgcattccagattgaggatttagcgtcttaggaaattattttaattttttttttttaaagaagaaaaaaaaactacatactttctaccagggccatattagcagtgaaacattttaaactgcagaaattgtggttttggttcagaaacaagttgtatatttttcactcctgaatatgggtaaaaaatcagttccgtctttgtgggttgctctgctatggagatcaacagttactgtgactgagttggcccattctgcttaaaaatatgttttaaacgtttaagaaaaatgctcatcatcactggccatcagagaaatgcaaatcaaaaccacaatgaggtaccatctcacaccagttagaatggcaatcattaaaagtcaggaaacaacaggtgctggagaggatgtggagaaatagaaacatttttacactgttggtgggagtgtaaactagttcacccattgtggaagacagtgtggcgattcctcaaggatctagaactagaaataccatttgacccagtgatcccgttattgggtatatacccaaaggattgtaaatcattctactataaagacacatgcacacgtatgtttattgcagcactgttcacaatagcaaagacttggaaccaacccaaatgtccatcagtgatagactggattaagaacatgtggcatggctgggtgcggtggctcatgcctgtaatcccagcgtggctcatgcctgtaatcccagcactttgggaggccaagacgggtagatcacgaggtcaggagatcgagaccatcctggctaacacggtgaaaccccgtctctactaaaaatacaaacaattagctgggcgtggtggtggcgggtacctgtagtcccagctactcggtaggctgaggcaggagaatggcatgaacccaggaggtggagcttgcagtgagccgagattgcgccactgcactccagcctgggcgacagagcgagactccatctcacaaaaaaaaaaaaaaaaaaaaaaaaaaagaagaagaaaatgtggcacatatacaccatggaatactatgcaaccataaaaaaggatgagttcgtgtcctttgtagggacatggatgaagctggaaaccatcattctgagcaaactactgcaaggacagaaaaccaaacactgcaggttctcactcataggtgggaattgaacaatgagaacacttgaacacggggtggggaacatcacacactggggcctgttgtggcgttgggggaggagggagggatagcattaggaggaatacctaatgtaaatgacgaattaatgggtgcagcacaccaacatggcacatgtatacatatgtaacaaagctgcacgttgtgcacatgtaccctagaacttaaaagtataattaaaaaaaaaaagtttagtaattgaaaaaaaaaagtacaacaattgggttggttggaacagcagaaatgaattgtctcacagctctggaggccaaaagtctgaactcaaggtgtcggcaggaccatgctccctctgaaacccatagggaaatccttctttgccccttctagcttctggttgtttgctggcagtctctggcattccctggcttgtagacgcatctttccaatcgtctgccttcacatggtagtctccctgtgtctgtctctttaagtggctgtcttttgttttttgtgtttttttaatttcaatttaatctattttttgtagacacattgtttcaccatgttgccaggctggtctcgaactccagggctcaagtgatcctcccgtctcagcttcccaaagtgctgggattacaggcgtgagccgccacacccagcccacatggctgtcttcttatgggaaaccagacatgggattagagacccactctattagagtaggattgcatttaactaattacatctgcaacaactctatttccaaataaggttacattctgaggtactaggggttaagacttaaatatatcctttttaggaaggacacagttcaacccacaatattagctggccacatgtttcccctgatctgtactttacttgttccccctggctctggtccctcctcgggtcaggtcctgcctgagcctcccctggccatgtcccttctttgtgcctggaccctcctgattaataccccatccccacccttgtgccctcagctgacttcttgtacctcccaccaggcatgatgacctgaaggagatgctggacaccaacaaggattctctcaagctggaggccatgaagaggattgtggcggtaagaggggaaggaggaggcctccctccgggcggggcctgggtggccaagagcagctctccttagctccttgtagaccttccctctagttagtgctgtgcctctcgctttgtccctcttcccctaccttgaccccaccacccagatgattgcccgaggaaagaatgcttcagacctgtttcccgcggtggtgaagaacgtggcctgtaagaacatagaggtgagcactacctggtgagggattgcttgtccccacctcccccaggaccacactcaagcttggggtgaggaaggaaatgatttagcccctgggggcccgacctgctgagaaatgtctctgagccaggagaagacactgtctccatgtccctgaactggatgtggatcaaggtaaaggacccggatacactcaggggtgctctcccccactgggagagtttgtccccatggaccgcagctggctggggagatgacatcccaggggtaggggggtgggcacaggtgcctgctgagaagcgttctgctgagaaacgtgctctccccaaggtgaagaagcttgtctatgtgtacctggtacgctacgctgaggagcagcaagacctggccctgctgtccatctccaccttccaacgtggcctaaaggtcaggggtctcagtttgcctcccagggcctgggcctcgttggcgctgtatcggaggagtaggcctggggagaggccatgagcatgggagcgggctctgcagaccccttcctacctgcctaaaattgggagggtcacagtcagaagaggccagccagaccctcagagagtggaagctgggctcagaaggggcgtaagagatgaagtgggtacccagggcccctgtctctcttcccaggagcctgtggtaatggctgcttctagtatgaaccacttgagcccccggagagtggagagtctctagcaatggagaacccctcaaccctcacccccctttgtgtaaaggtgtgaattgtggtccacagccaggtagatttcaacctttagcagtggcctgaatcccccacaccattctcaccttttgtttcattttgcccaaggcctctagttggatttacatatgttaggtgcatgtataagtctcccccctaagggcttttctggttagtctaagacatcttgagggtaaagacagccatttcaaggccattctctccatattggatttttcagctctgattacaaccattaactcctctatttttgcatacctttatttatttatttatttatgagacaggttctcactgtgttgcccaggctggagtgcagtggtgcaatcatggctcactggagcctcgacttccctgagctcaggtgattctcccacctctgtctcctgagtagctgcgactactcagcctgcatcaccatgctcggctaatttttttgtagtttttgtagagatggggtttcaccctgttgcctatgctggtcttggactcctgggctcaagtggcctcagcttcccaaagtgctgggattacagggatgagctaatactcctagcctggatacttttagttcaaatttctgtgagagagattgtgaaaggtccagctcatcttttcatatccagaagttctgtaggttgctgggtagacaggattgctgctcaaatccagggcccaccccttgtccaatctgctatggccagcaagaggggttgacagtcggcttctttggggtgagagtagaaagcatggtcacttgaatatacaattcattcatttagtaaatacttgggtgtctctatgccacacattgtgctagatttctttttataagtcaaaaccatggaatccgtcttagattggcaagtaatcttttggtttgagtaagggttaagtataaaaactaatctgaaattgttgtacagattttcacctatagtctctaccaactgaccctgtcccccttttagaaaaccagagctcatttagttcaactcaatgtgataatttctttctgcaaagtgccaaatagtattttaggttttgtaggccttatagtctcaactatgcaactactcaattttgcccttatggtgcaaatgcagccattgacaagtgggcgtggccgtgttccaataaatctatataaaaaacaggcaatagacagattttatccaagggctgtagcatgccagcctttgctctagaacatgtctaacaggtcatcttttctgatagggacctcactccttcataaggcaacttgctccatctcaagacaactaccactatttggggtgttttttaaaccattctcttttgttgaaacctccacaactataatttttaaaaattgatttcaggctgggtgtggtggctcatgcctgtaatcccagcactttgggaggccgaagcaggcaaatcacaaggtcaggagttcaagaccagcctggccaacatggtgaaactccatctctactaaaaatacaaaaaattagcttggcatggtggcgggtgcccataatcccagctactcaggaggctgacgcaggagaatggcttgaacccgggaggcagaggttgcaatgagccgagaacgtgccactgcagtccagcccaggcgacagtgtgagatccatctcaaaaaaaaaaaaaattgatttcaggctgtactgcattatgactgcacctgtgaatagccactgtactccagcctgggcaacatagggagaccctgtatctaaaaaataaaataaaatttactacaggttcacaaaaggcataaagaataatataatgaatatccataagaaatgacacatttctcaaatagccaaagcctcctatatatcttctcttgtttatcattcataggtatgtatttattcctgtgctagtaatttgcatattgttaagcaatataaaatgttttgtaaatggtgtcatcgtactacatatgtattcctttaaaacttgttttcttttttgttgtcactggcttttggtctctcctgcatgttggaaccaatcatttcaatccagccttctcccttctttcaatcctagcccaggctagggccgtgttcactttcttaggagatccctcatggaatcaaacctctgactggcaagcagataatccaggtctccctacatcctgtctttgtacagttggtcccttgaaccccctatgaaaccctactctatttcattttatcagtttagcacagggtccaaaccagggtgattctgaatcttaattatgtccctcctgattttgtgtcttctttcaagatactgataagctatttggaccagggcaaaagactgaggcatagcatgtttccaggttgacactgatctgttaataaaccttctccaagtatatttcaccacgttgtagacccacctgactgtacagacagctggcatttttctatcttgttaggaaggatcttattcaatagcaataaataaataaataaataacacctttcatgtgcaaagggttgtgggtgacacagagataaaacagatgtgaattctgctcttaaaaatgcttggctattaggtgaaacaaaaggcctacctaaaaaatagcaatgcaggaaatgctatgagacttccacaaacatatcactgaaatcaagatactaatatccaccggcctagttaccccatcaaaaaggaaaacacattttttttgataactttctgtgaatctataatcatttcccaaataaaatgctcacacacaaaaaaggaaaacaggtttaagcagatgatgtgactatttgtctctaagaaaacagagactccttccttttcaataaatgtttctaacccatctgtttaaaagtcaattccagaattttgtcaggaattagcatcaattttacctgcaattgtgaggatcttgtcttgtctttttccatttcagaaagtcagggtaatatctacccttctttagtgttctattcccgtcattctctaagagtaatagtacaggcacacctcattgtattgcactttgcagatattgccagatattgcactttttacaaattgagggtttgtggcaaccctacatcaatcaagtctatcagtgccatttttccaacagtatgtgctcacattgtgcctctgtcacattctggtaattctcacaatattccaaactttttaatgattattatatgttatggtgatcagtgatctttgatgttactattgtaattgttttggggtgccacaaaccatgctcagacatgaaagtgaaattaatcaataaatgttgtgtgtgttctgactgttcccccatctccttcaccttgggcctcttcattccctgagacacaacaatattgaaattagatcaattaataaccctacaatggcctctaagtgttcaagtgaaaggaggaaccacacatctctcactttaaatcaaaagctagaaatggttaggcttagtgaggaaggtatgttaaaagctgtgataggctgaaagctaggccacttgctccaaacatttagccaagttgtgaatgcaaagtaaaagttcttgaaggaaattaaaagtgctactccaggctgggcgtggtggctcacacctgtaatcccagcactttgggaggccgaggcaggaggatcacttgagaccaggggttcaagaccgtctctataaaaaatttttttaagttagcctgatgtggtggtacgcacctgtagtcttagctacttgggaggctgaggtgggaggatcacttgaacccagaagtttgaggtgcttctccagtaaacacatgaatgataaagaaagcaagacaggattattgctgatataggaaaatttaagtggtctggatagacgatcaaaccagctaccacattcccttaagccaaagcctaattcataggcaggtcttaaatctctccaattctatgatggctgagagaggtgaggaagctacagaagaaaagacggaagctagtggaggttggttcatgaagtttaagtacagaagccatctccataacaaaaaaatgcaaggtgaagcaaaagtgctgatggagaagctgcagcaagttgtccagaagatctagctaagatcattgatagatgtgactatgttcaacaagagatgctcaatgtaaatgaaacagcctcttactggaagaagatgccatctagcactttcctacctagagagaagtcaatgcctggctttaaaaaacaggctggctcttgttaggggccaatgcagctagtgactttaagttgaggccagtgctcaatgaccattctgaaaatcctggggtccttaagaattatggcagatctcctctgcctgtgctctataaatggaacaacagtgccatgacagcacatctgtttgcagttatggtttactgaattttttaagcccactgttgatacctaccgcttaaagattcctttcataatattactgctcattgacaatgcatttgttcactcaagagctctgatggagaggtacaaggagattaatgatttcatgcctgctaacacaaaatcagttctgcagcctatggatcaatgagtaattttgacttttaagtcttattatttaagaaatacatctcgtaaggctagagctgccatagatagtgattcctctcatggatctggacaaagtaaattgaaaaccttctggaaaggtttatagaaaccttctggaaaggtttaccattatagatgccattaggaacattcatgattcatgggaggaggtcaaaatattaacattaacaggagtttggaagaagttgattctaaactccatggatgactttgaggggttcactacttcagtggaggaagtaactacatatgtggtggaattctacctagaagtagaagtagaattaaaagtggagcctgaagatgtgactgaattgctgcaatctcatgataaaacttgaatggatgaggacttgcttcttatgagtgaacaaagaaagtcctttcttaaaatggaatctgccgggtgcagtggctcacgcctgtaatcccagcattttgggtggccgaggtgggtggatcacgaggtcaggagatcgagaccatcctggctaacacagtgaaaccccgtctctactaaaaacagaaaaattagccaggcatggtggcgggcacctgtagtcccagctactcgggaggctgaggcaggagaatggcgtgaacctgggaggtggagcttgcagtgacccgagatctcgccactgcattccagcctgggcgacagagcgagactccgttacaaaaaaaaaaaaaaaaaaaaaaaaaaaaactcctggtgcagatgctgtgaacattgttgaaatgacaacaaaggatttagaatattacataaacttagttgataaagcagaggcagagtttaagaggactgacttcaattttttttttttttgtagagactggggtctccctatgttgcccaggctggtcttgaactcctaggctcaagcaatcctcctacctcagcctcccaaagtgttgggattacaggcacaagccatcacgcccagcctacattgtttttttaaagacataatgctattgcatgcttagtagactacagtatattgtaaacataactttttttttttttttggagataggatctcactctgttgctcagtctggagtgcagtggcatgaacatatgtagctcacttcagcctccaactccctgggctcaagtgattctcccacttcagcttcccaagcagctgtaactataagcataacttgtatgcaccaggaaacaaaaaatttatgtgactcgttttagtgcgatatttgctttattgttgaggtctagaatcaaacccacaatatctccgaggtatgcctgtaatatatagctgctgctgctgatagtgggaagacagtcctaagccccatgatcacaatacagtgtaaggaatgcttttatacgttctgtataggatgcagtaggaataaagaagaagggcttggggccgggcgtggtggctcacgtctgtaatcccagtactttgggaggccgaggtgggcggatcacttgcggccaggagttcgagaccagcctggccaacacggcgaaacctaatctctactaaaaatacaaaaaattagctgggtgtggtggtgcgcgcctgtagtcccagctacttgggaggctgaggcaggagaatcgcttgaacccaggaggtggaggttgcagtgagccgagattgcaccaccgcactccagcctggcgacagagcgagactccatctcaaaaaaaaaaaaaaaaaaaaaaaggaagggcctacacccctattttgttttaaacactgtggaagaacagcagcttttgcaatgatttctgggagaaaggagtgtaaggttgaactccggaagggagaccagcttgcatctgctgggcggtcacctcaggcattaaaacaggcacctccaaaaaaacccttacaaggaacaggaagtgtttcaggtgtttcagcaattttaggtgttctgaaagtttttcagtgtttctggaagtgaagctacccattgcaacacctgttcaggtgtcagatttctgcaaccagagccaaaattaagtgtcccccagatacccatcactggcacaccatccaggctccagtcaagcggcagggaagcaagagctagtggtcgctggggacagtgacttccaaaggtgtggcctccccccatcagggcacctggtgccctttcatagctctgcctccacctctgcctttaggatcccaaccagctgattcgtgccagtgccctccgtgtcctctctagcatccgtgtgcccatcatagtgcccatcatgatgctagctatcaaggaagccgcctcggacatgtcaccctatgtgcggaaaacagctgcccacgccatccctaaactctacaggtatgccccagccctgtcccacgctccccaggaggctggttcctaagttctcaacccacccctggcctttcctaagtcttgcctgctgcttctcagagggtttgaggagggtagtttgggggactgacagagatggaggagaacaataaggctggggtgcaggaggtgagcatggcttggacagatattgggaaggctggggctgagagtggcaaattcccctcaccgatttctccctcagtttggactctgaccagaaggatcagctgatagaagtcattgagaagcttctggctgacaagaccacggtgcgtgtataggggcgctccgggaggggtggtgaccggcagccggccttccacccttcgcgttcaccctctcgtctttgttctttccccagctggtggcgggcagtgtggtgatggcctttgaggaggtctgcccggagcgcatcgacctgattcacaaaaactaccggaaactctgtaacctgctgatcgacgtggaggagtggggccaggtggtcatcatcagcatgctcacccgctacgcccgcacgcagttcctgagccccacccagaacgtaagtgggcccagcccaggcagagcgggccgaagtgtgtcccggggaggcgcccacagacccgtcggtctccccgtccaggaatccctactagaggagaacgcggaaaaagccttctacggctcagaggaggacgaggccaagggcgcggggtctgaggagacggccgccgcggccgccccctcccgaaagccctatgtcatggaccccgaccaccggctgctgctgcgcaacaccaaacccctgctgcagagccgcagcgccgcggtggtgatggcggtggcgcagctctacttccacctggcgcccaaggcggaagtgggcgtcatcgccaaggcgctggtgcgcctgctgcgcagccacaggtgcgctccgcccccagccccgccccctccctcgcctcctgccccgccccacgggctgcccggctccgccccctcacgcccaccagccgcttccacctctgcccacccgctccacactgaccgtagtcctgccctccgcactggtcctctccccgcaacgacttgccccaccttttcccctcatccgctgacccttgccccaaccgaggggcccggggtgctctgacccgtcctctccgcagtgaggtgcagtacgttgtgctccagaacgtggccaccatgtccatcaagcgccgggtgagcctgcgacggcgggctgtcctcgctgtccgagggccgcttctgcgggcactggaggcgttgtcggggctgggaccggggccggggaaagggaagatggaggaataccctggctgtgcagaggatggggcaggggaggctccaaatacagatagggagcagggcctggatcctgaggggccgctgaggggatgtccagtggaaaaagagctagtcagatctgagatggacgagggaagacttgaggagtggagggcagtggtgaggaggcaaggatcctgggcgctgggtcaggataggaggggtgtctctgggcagcgaggcaggcctggggcttcggtggagctccctagctgcctctcttgtgccagggtatgtttgagccctacctgaagagcttctacatcaggtccaccgaccccacccagattaagatcctgaaggtgagtgagggacagaagtgcatgtgcttcccagccctccccaccccatgtacccactcaaataactcacagtggcccccctggtgcctgcctattcctggggctgagcccaggagcccatgactgccccagctggagctgtttgttcagggagctgggctaaggagggtcagggggagaagggaactgctctttgcctagtacctggtatacacctgctactcttcataaatgaagtaacctgatatcacctcataataatcccaggatgtgtacattatattccttttataaaaatatagactctggccaggcacagtggctcacgcctaatcccagcactttgggaggccgagacaggcagatcgcctgaggtcaggagttcaagaccagcctggccaacatagcaaaacctcgtctcaacgaaaaatacaaaaattagccaggcgtggtggcaggtgcctgtaatcccagctactcgagaggctgaggctagagaattgcctgaacctgggagacagaggttgcagtgagctgagattgtgccattgcactccagcctgggtgacaagagcgaaactccatctcaatctaagaaaaagaaaaaaagactctgggaggtaactgccccaggtcacataattctgctgactccaaggttcacacttttctctcccacccacagtgttatggcccccacacacctgccccctcaggctctcctgcaaacattcacggacaaggaaagtggcgggagcccatacctccatttgattcctgctctgctgcctcattattgagtgatttccttcagcaacagttaatcttcctaacccttgtgaacatccactatgttctaggggtacatgatgagcaaactaatcagggaccctgcctttgtggagcttacagatgtggggaggaggagacattaagcagttaatcacaaggcaaatgtaaaagtccacttacaaaatatggaagaaagtgtggagagctataagggcataaaatagggagacctcatctagtctggtgccagggaagttttcccggaggatatgagacttgagctgaagcctgagagatgaacatgaattatgcagggacagaaatgggaagaactgctccacgcagaggaaacagcatctgcgaagaccctgggttaggaagtggagtgggattggggcctggaagacaagggggacagtgatgggagatgggaggtagacagcaagcagatcattcagggacttacagaccatggtgaatacgatggtctccatcctgaaagcaataggaagctttaagttttcaatgcagtagggaggtgacatggtcatactgtaagcatactgtgtagggaatccacttaagaggcaaactggtcctcttgctttttagacaagtttcataacctgtcaattccctcatcagtgtgaggatgatgcagggctgtcatgaggattgttttctggtctatgaagtgtatttggaatgaaagcacagaaagtccactggccaacccacccattttctgcctctccaaccctccctgcagctggaagtgctgaccaacctggccaatgagaccaacattcctactgtcctacgggaattccaggtacaggccagctcccagccagaagggcctgggagaggggcccatcagatccttgtgccctggtgggtaaacctcctcttatgagcccaaggctggagaaactattatcttacattcccgttccaatgtgtttggctggctttgggccaaggaatcactggattgggggtggagttgtcaccccctttcccaagtcttagtcaccggcatgataagccataaaatgaaaggccacagccttcttgaaggtcaccctcaagcctgcagagtcactgagggatttctttgtcatatcccacagacctatattcgcagcatggacaaggactttgtggcagccacaatccaggccattggacgctgtgcaactaacatcggccgagtccgtgacacctgcctcaatggcctggtgcagctgctgtccaaccgtgatggtcagtgtttccctgagtgtctaaccgtgatgatcagagggtgtctgcctgcaggtctgactctgctggccactggatatccaccagtctgcctagacacaatgtgtatccattggtctgtctgtcttgatcagggcccaagtgttcctacacctctgagggctgctagagaactgaagggggttgagagaaagagccaagggcctggggcactgcaggtgtgtctgtccacctgagtgtggccatctgactgtcttggggtccacacactcatttttgttctgtagagcttgtggttgcagagtcagtggtcgtcattaagaaattgctacagatgcagccagcacaacatggagagatcatcaaacacttggcaaagcttacagacaacatccaggtgagggagaagccatattttcactccccacttcaaggtcctccccatgatttcaagactgtataattacatatgctagccttatcaaaagtaacttccaaaccttaggtcttcaggtggaaggagcagagacactggaccatgtgaccctgaccttgttacccctgatttgctttccctttggagaccctcaatgagcacgatggactttactactactcttgttttctctctaaagctctagccaaccatggttgagtgacaaatcttgtgtttttctatcgcactgctaagctgaaacatctaaacaaggcattcccaaagattctggagagtaacatggaaataaagtactgagggtacaatgaatccagaaaatcaatcttttacatcatgactgacttagggtcttgaaagctctatgctaatgaagccctagggaagaggggaaatgctgtctaggaaatgtctaccttttaacctctctctatctcaccacccccaactcccatttccagagaacccataatacaacaggccagcacagatgaggagtgctgtttccctggaagtccacaatcctacccacccactttcccgtatttacccatcttcactcctctcccacaaccacaggtgcccatggcccgagccagcatcctgtggctcatcggagagtactgtgagcatgtccccaggattgcacctgatgtcttaagaaaaatggccaagtcattcacagcagaggaggatattgtcaagctgcaggtcatcaacctggcagccaagctctacctgaccaactctaaacaggtaaagattaagagatgaccccccagatactctggtccccagaaactccctagacagtattcttttggccctccctaggcagggctgaactctagctcctattttggaaaagaagaatcagggaaggtggctggtctgcccacataaccaatgctaccccagtgcccacaaagaccttgtagtgctggtggtcactgttgaagagactctcctatgaagctgtgacctccagtctgctagtacaagagtcctgtctgccaccttggaactctggggctgtgaagaaccacagttgattgggataagggaagggcccaacagtggcaggtactgatgggagaacatgcatcccagatgtggtctgtgcttctttccaaagcttgacaatgcttggccagtctgtgccaaagataagggggtgagtctctgcttgggcttgggtggtgctggtggccactgtcattcccaaggtgaaaggttataagagatacacagccaaggatgaggctcaactaagttgtagtatcagggtgttcagagcctcctagctgtctggcatctcctgagatggttccaggagattctcctaaaatgaagcataatgtgctgagcttttcaaggtgtcagggacatcaaacaccatgacgatttccacactctcccactcagttaagcaggacagggattggcaaactactgcccataggctgaatttggcc

SEQ ID NO: 15429 - DNA, 32972 bp, Homo sapiens
gcggccctgattgagaaatccgcgcgcagcctccgccgctgcacactgcagcctctgctgaacccctgccgcgccgccgccttcgccagcccggaccggaccggcccgccttcccttcctccgctccagccggcctccggccccgcaacctcctcctcggcgaagtctccctggccgccccatgtcggccgcccccgcctacagcgaagacaagggcggctccgctggccccggggagcccgagtacggccacgaccccgcgagcggcggcatcttctcctccgactacaagcggtgagggagcccgccaggaagctcgcgggagggttggggccggggaccgggcgaggcgcgcgggcaccatggacagcgcccggccccagcgccggccccgccccggccgcgccgaccggaagcccgcccggccccctcctgcggcctggagccccggcccagcgcgggcagcgctggcaccccggctccaggggccggcctaggacgcggaggggggcagataggggctggcgggggatgggccagctcagtttcgagaggagaaaccctccggttccaggtgtttctccggtttgcggcgttgcgttaggggttcccttcctttttcgtgctaggcgggttggcttcccaaaaatgtgggggaggggtctgagtcagcgaacttgagcttgagcctggggcctcttcaggaaggcgggccctggatgtacttgcacagcctcccagcttggccctgctgcaaattcatttcccctccctctggtccccatctccatctgaccctcacatccctgctcctggcattgcccctgtagttcagctccaccttcacaccctcccccacctttgattcgttcgtttgtttcttcatttgtttattcgtaaattctgcaacaagcatttatgaaaagccaactgtgtcgagtcctgaactagtcacggaatacaactgtgaacatgagacccttcttgtcctcacgatgctctagaggggagcacagatgaagaagcagtcagggacagtcgagtgtaatgggggcagtgggagcagggagaggacctagtctctggcgccggagagaaggaagacaggagcgtgaggtatgttccaggcagaggaaagggctttcaggaaggttgagagccaggccacaatctgtgtgagccactggactgaccagaaaagagggtggggaggactcctgaaggattctaagcaggcgacataatcagatttatattttagaaggacgtcaggctgctgcattgtggagaagagattggaggtgggccagattgaacaagagacaagggaggtgggtcttgaagttcacaggcctggcatgattgtggcctagaccaggggagaggcagaagatttgaggctgtggaagaggtggaagcctcagacctgatgattaattggatattgggtgggggtttagagggacagggggagaagatgaggattttcacgcacgtccatgtgaagagaccaccaaacaggctttgaacaataaagctttttaatcacttgggtgcaggccagctgagtccgaaaaaagagtcagcgaagggaaatggggtgggaccgttttacaggatttgggtaggtagtggaaaattacagtcaaagggggttgttctctggcggtggggggacacaaggtgctcagtgggggagcttttgagccaggatgagccaggagaaggaatttcacaagataatgtcatcagttaaggcaggcacaggccattttcactcttcagttacttcaggccatctggatgtatacgtgcaggtcacaggggatatcatggcttagcttgggctcagaggcctgacattcctgtcttcttttattaataagaaaaataacataaaatagtgttgaagtgttggggcagcaaacattttggcggggggtggtatggagagatactgcttctccatagccttgaagggctgcttcgagcgggattggggtggcgtgggaacctagagtgggagagattaagctgaaggcagattctgtggtaagggatgatattgtggggttgttagaagaaacatttgttgtataggattattggtgatggcctggatacggttttgtatgaattgaaaaactaaatggaataagagaaggagaaaaacaggtattaaaggactaagaattgggaggacccaggacatccaattagagagtgcccaaggaggttcagcatagccctgccagcaaagattatttatttactttaagagggagttaagactggcagtttggggatagcaccaggagatatcagctgtaatggtttggagaaacagtgtaaaccggcagtgtaaacaagagcagggcatgtatgagtagttgagtatggtgaataggagtatgactagtcagaagatagtagggatgacaagttttctggggcacagtccaagttggtctggtgtctggaatgagactggggcctaataaaaaggagcatctatacaggagcttgaatgggctgtaccctgcagcattccgaggacaggcccaaattctgagaagggcaagtggtaaaagtattgtcagtcctttttaagttggtggctgagcttggtgaggtgtgtttttaaaagaccattagtccgttctaccttttctgaagattgaggatggtaaggggtatgaaggtttcactgaataccaggagcctgagaaactgcttgggtgatttgaccagtaaaggctggtctgttattggactatatagaggcgggaaggccaaactgaggaattatgtctgacagaagggaagaaatgaccgcagtggccttctcagaccctgtgggaaaggcctctacccatccagtgaaagtatctacccagaccaagacgtattttagtttcctgactcggggcatgtgagtaaagtcaatttgccagtcctgggcagaggcaaatccccaggcttgatgtgtagggaagggagggggcctgaacaatccctgaggagtagtagaatagcagatggaacactgagaagtgatttccttgaggatagatttccacaatggaaaggaaatgagaggttctaagaggcaggctagcggcttgtaacctacatggaagaggttatgaaatgacgaaagaatagaatgggcctgtgaggctagaaggagatattttccttggtctgagaaccatttgccttgtgtgggaagagattcataggtgtaagtttcattgggggagtaggtaggagtgactgatgagaaggagaaaaactggccatgagggacagaagttggaatgctagctgcttttttagctaccttatcagcataagtgttgccctgagcgatgggatctgatgccttttgatggcccttgcagtgaatgactccagcttcctttggaagtaaagcggccttgagaagagtttttattaaagaggaattaatgatggaggacccttgtgtaatgaggaaagctttttgcccatataacagcatggaggtacaggatatggaaggcatatttagagtcagtataaatattgacacatagtccttttgcaagactgagggctcgagttaaggcaatgagttaagctttctgagaggtagtggaggggggcagaaagtatatgcgtcaggtgtgaggaagaaaatagattttggaagttatgagaactgtagagagtgagttgagcatagtttgtgattttgagggcctctgaaagtattaaagcagcggcagccgctgcacgcagacatgagggctaggccaaaacagtaaggtcaagttgttcggacagaaaggctacagggcgtggtcccagctcttgtgtaagaattccaaccgcacagccctgcactttggctgtgtgtgatgaaaaagggttgggatgaattagggagacctagtgtgagagcagcttctacggctgtttttaaggaatggaaaggagtggcaaaaggatttaggatctgtggggtcagctaggtttgcttttgtgagtttatataatggtttagtcaggatggtaaaactaggtatccaaaggtggaagtacctaaccatcccttgaaaggaaaggagttgttgctttgtagaagggattggggttcgggagattagccggacatgatcagcagggagagcacgtgtgttttcatgagaactatgccaagataggtaatggatgaggaagaaatttgggcttgactgaagtaatgggggctgtccgtgaagccttgcggcagtacagcctaggtagtttgctgagcctgatgggtgtcagggacagtccaagtgaaagcgaagagaggctgagatgaagggtgcaaatgaatagtaaagaaagcatgtttgaaatccagaagagaatgatgggttgtggaggggttgtggagggaggtattgaggaggagagtatatgagtttggcaccacggggtggataggcaaaacaatttggctgacaaggcacagatcctgaactaattgtaagacttgtctggtttttgaacaggtaaaatgggggaattgtaaggagagtttataggctttaaaaggccatgctgtaacaggcgagtgataacaggctttaatccttttaaagcctgctgggggatgggatattgacattgagcacggtaagggtgattaggttttaatgggatggtaaggggtgcatgatcagtcgccaaggagggaatagaggtgtcctatacttgaggattaaggtggggagatacaaggggaggatgtgaaggaggctttgaactgggggaaaaggtggcaatgaggtgtggctgtagcctaggaatagtcagggaagcagataatttaaagtgtctcggcctaataagggaactgcgcaggtggggataactgaaaaggagtgcataaaagagtattgtccaagttggcctcagagttggggagttttgagaggtttagaagcctggccatcaatacccacaacagttatggaggcaaaggaaacaggcctttgaaaagaaggtaatgtggagttggtagcctccgtattgattaagaaggggacggacttaccctccactgtaagagttacccaaagcatctgtgatggtccaggaagcttccaaggcgattgggcagtgtcagtcttcagctgctaagccgagaagatttgggaaggagtcagtcaggcagccttgggccagagttccaggggctctgggagtggctgccaggtgagttggacagtccgatttccagtggggttccacacagatgggacaaggcttaggaagaatcctgggctgtgggcattccttggcccagtggccagatttctggcacttgaagcaagatcctgatggagaaggtcctgtaggaatgcttgactgctgcagcttaggcattttgaagttcttgtgtactggagatgtggctggggtttctctcacagtggaggcaaggaactacaactcagaaatacattgctacttggctgcctttactctattattgtacaccttgaaggcgaggttaattaagtcctgttatggggtttgagggccggaatttaatttttggagttttatttaatgttgggagtggattgggtaataaaatgtatattgagaataagactgccttttgaccttttagggtctagggctgtaaagcgtctcagggttgctgcccaacgagccatgaactgggctgggtttttatatttgatgaaaaagagcctaaatactaactgatttggcagaggtcggataaaggaaaaggagcgttaaccttgactatgcctttagctccagccacctctttaagaggaaattgttgggcaggttggggagggctagtcgcagaacaaaactgtaagccggactgggtgtggggagaggaggtgatagaaggattatagggtggaggagcagaagctgagaaagaattggagtctgattcagcctggtggggagtgacctgaggagcattctggggattaggtgagaggtcagatgggtcggtagaaaaggaagattggaagattgaaaagacgcagcgacgcttggggttgggactgaggggacaggcgggagggaaagaaggaggatttgggatgagtcgcattgggaacagagactagggagggaccgatgtgtaaaagaatgcctggacatcaggcacctcagactgtttgcccattttacaacaagaattatctagatcttgtaggatggaaaaatcgaaagtgccgttttctggctatttggaaccattgttgagtttgtattggggttaagcggcattgcaaagaaaataaggcatttaggttttaggtcaggtgtgagttgaagaggttttaagttcttgagaacacaggctaagagagaagaaggaggaatggagggtggaatgttgcccacagtgaaggaggcaagcccagagaaaagagagggtagagacacggagagaaggggtggggggtgctttgccccccaggaaagtggagagaaaagagagggtagagacacagagagaaggagtcgggggtgcttgtcccccaggaacgtggagagaaaagagagggtagaaacatggagagaaggggtggggggtacttgccccccaaaaagtggtgtttgccactaagggtgaaagatcaaggcaggcatcctcgcggtgatcagacaactctgaaacgtgggtgaataatcaagcaggcgtccccgcagtgattaaacaccaagggaagactgtcttcctgagtccgtgatcggcgccggagttttgggttcacagataaaatgcatttcctgtctctaccagaaaaggaaaggaaccgaaattaagagaagggagagattgaaagatggcaccaagattgaaaggagaaagaggttgagggatagtgagagaggttggagaagagagtaaaaagaggccgcttacctgatttaaaattggtgagatgttcctcaggctggttggtctgaggacccgaggtcattaggtggatctttatcatgaagcaaagagcaggaggacaggggattgatcttccaagggtggtcccccgatccgagtcatggcaccaaatttcacgcacgtccatgtgaagagaccacccaacaggctttgtgtgagcaataaagctttttaatcacctggttgcaggccggctgagtctgaaaaaagagtcaacgaaaggagataggggtggggccattttataggatttgggtaggtagtggacaattacagtcaaaggggggtgttccttggtgggcaggggcgggggacacaaggtgctcagtgggggagcttttgagccaggatgagccaggagaaggaatttcacaaggtaatgtcatcagttaaggcaggaacaggccattttcacttcttttgtgattcttcaattacttcaggccatctggatatatacgtgcaggtcacaggggatatgatggtttagcttgggctcagaggcctgacaaggatgttactcaggttactagttcctgcaactggatggatgatggtgttattcagtgtaattggaaataaagatgttacaagcaaatttgtggaaaattaatgttgagcccagctttggacatattgagattgtaaactctgagggacatattaccctattaggtagctggatattacgatttgggttccaggagagagattagggaattattaacatatgtatgttaattaaagccacagaagtgaagataactcagggaggaggtataaaatgagttcagacactgcacaagtctgaaccctgaagacaccaacattagaagtgaccagagaacagtggaaagtgtttcaaggtacccaagaggtgaactaaaggctgaaagaaaacaatgtaatttcaagaaggagggagtggtcagtagtttcaatgcccattaaggtcaaatcaaacaaggaaaaaaatcatgaccattggttgacaaagaagagctcaattcctttctactctattccccacctcctgccctgggagataaattctggcaaagtaaggagaacaggagctagattatttctttcccagcattctgttgtggatgatttaaaacatacagaaaaatgaaatgaataatacaatgaacacatgtatatcatccatctagattcaactgtcattgacatcgtaccttatttgctttatctaaccatctattcgtatactttttttggttgaaccatgttaagttgcagagatcatgacccttcaaccccacattctaagtcgacatctaaagccagattaaaatgaataaaggagcacacaggtggtaagtagataaaacagtgaatggaaattttgctttcaagaaatttgactgtaaaagagaaagctgctggaggagaacctcactcagttcaaggaagtttgtctattttgttattttgggtttttttttttgtttcttaaaatgtatgactccatatttttgtttattattaatattaggcgggagagcctagagcaagtttaactgctgatgggaaggagcgattggtgggagagaggctgaagggaagaaaggaagtacagaacactgagtgatgggaggggaggcttactgagctgggtgggaggactagcctgggagcagggaggaccaactctgcccagagggaagagggcaggaggagaggagagtataaatgcagatggagactgggtacagtggctcatgcctgtaatcccagcactttgggaggctgaggcgggcaggtcacttgaaatcaagagttcaagactaacctggccaacatgtcaaaaccccgtctctactaaaaatacaaaaattagccagttgtggtaacgcatgtctataatcccagctactcaggaggctgaggcaggagaatcacatgaacccgggaggtggagattacagtgagccgagatggcaccactgcactccagcctgggcaacggagtgagactccatctctaaataaataaataagtaaataaatgcagatggatgggagtctggggcagggggctgcaggggatttcatctaaagactttccctttttcgggaaccaggtggtgaagccataagggcaaggctgggaatggggacttgagggtcaaaggggtttcaaatacaatgaagaaagccaaccaggccaggcgcggtggctcacgcctgtaatcctagcactttgggaggctgaggcaggcatatcacctaaggttgggagtttgagaccagcctgaccaacatggagaaaccccgtctctactaaaaatacaaaaattagccaggtgtggtggtgtatgcctgtaatcccagctacttgggaggctgaggcaggagaattgcttgaacccaggagacggaggttgcagtgagccgagatcacgccattacactccagcctgggcaataagagtgaaactccatctgaaaaaaaaaaaaaaaaaagccacccaccactggcaggccagtggcattggagaccagtgggacaagagggccaaggatgtgagagcagttggagggatagacacaggggttgcgggggagggtgctaggaggaagtagagataagagaaggttgatgggaaggaataaatcaagtattggctctggaaaggcaggtgaggattaagatgcctagggtcagtgagaagagggtatatgagatttctcaggaggctgcagtctaattgtggcagtgggattggagctgaagagggcatctctcacctctctatcaactccactgaccatctagtcccttgcccagagactaggggtaggcttggtctcctgtccctgcccttctttccctctagaggccttgtctctgagcagtgaagaggaaaccggagcatccctccctgccagtgtccggttaccaagttttgggggcgggccatctggtgactgtgacaggagccccagcgccctggccagctcagtccattcctggagaagaacctgatgcagcgattcctgcagctcccgggggccgtggtgaggcctggggtcagaggggcctgcggagctgatcaagaggctgctagccctgtgctggctcccgaaggtgggcccccactccggtaccaggccttggagcctgaggagcttcggtggctgcaggcccaggaggaagacacgaccccagaagcatctctggaaggaccttgcccagaggccagccagagccagagccagccactacggtatagaggaacccacaggaaccccctacccacacagccaggaaggccagggatgggcagttgcactctcagcccagacctcttccggtcccacctcctctgatggaggcttaggctggcatttagggtccaggctgggcggagaaggtggtcaggggcaccgtatgggggctgagggtatgagtgaggagagatgaggggcttaactccctggaggctctgaggggaggaggatagtaaaatatttgagggttgaggtcccaccttgacctctttctccccacaggcccccactggagtgggctctggacgaggtttggggacaggatacagcacagacagggtttggccagccactgcctgccagtggactggaacttaggtggtaagaggtgacagcgaggtgtatatcaagggaggtgagcatgactgacccccagtgccatgccaggccccctggctggctccagccacccccagaagagtcccttaggctaggtcagactaggggtcaggtcagagtgagtgcagcagcgtaaggggatctgactatgggagataatgtttcatggccttagggtgttgtgccttagtccctgcctctgcctcttgggaacagaagttggtgggagtgaggacgagaggcccagggcggtctcacctcaggtggtggctgcggtctgtgtcagtgcatattctgtgtcagtgcatattcgacagtcaatcttacctgtgctggctgctttaggcccagtggtcctgccccctttcattccccttctcctgcaggggcctggaatgtactcactaggctgggtggggaggatgccctggggtgtgtgcatttgacaggcgcatgtggcatttgtgggtgtggtgaggaagggaatacccagagttaaaggagattgggcaaacttggccctccttccacggaagcccagggaaaagccatcccagggtgactcctcagaagatcagaggacccttggggctggatatatttgatcttagaagcctacatttatcatcaaaaatctcaactaggagtccactgaccattttggtgaatgagactggagaggccaagtttggtccaagttatctgtgtattagatgtgatgcggcatgtgtgtgtgtgtgtagggggacgtgtgtggggtgtgtgtgtctctatgagggtgtgggggagcggggagaggtcttgtgatatatgtctgtaggggacatgtatgggatatgtgtgtctataagagggtgtgggagagtggggagaggtctcctggtggtatatgtctggggggtttgtaggtgtgtaggtgagttgtgtgggtggtttatgtgtgtagagtttttctgtgggaggtgtctgtatgtgggggagtgtgtttctctgggcgttgtgtaggcaggattttgtgggtgtgcgtgggtttatgtatggattctactagtgtctgcgggacctgtaggtatgtttgtatgagctgtccgtgaggtgtaggtatgtcgggggacatgggagtgtctgaggtatatgtgggtggtatcaatgtgtagttgtctgtggggtgtgcgtatgaaggatcctgacgtggagtgttgtgcattcatatctcagggaagctggtgcccagctctgtcatttttcctaggccctcggtgctgcccacgcctacccagctcaatggtctgtacctatgaccatgcccctggtgtcctgagctcagcctcctacccactaagaaactcaacagtctggtctgtgtttggcagggtaagagggtgattgtcttctggccctggcctgaccctggaagagtagaaggtgtcctctgatttggggggcatccccccaggtgagggagtttcagataacatgatggggctggatattttcttctgtcctcacatgacagatagcgagggcctcagataatgctggaaggcatcatctttctattttgctttccatcaaaaatctctttgggaaagacagtttctaacattcttgggatagtgacttcttagtgcccctcttcttgtctgacgtcaggtactcacgcatttctgcagccctgtgactaagttgcgtgttctgtctggttcttctcttcctctcagcattcatcacttgtttctcagcattagcagcagtcatttgccactttatgattgttatcatgctctttcctctcctaacagtgctatccccaatttctgattttctgtcatttctaaatgttgcatgtctgtgactaactttgcacacattgattttttttttattttttatttttgagatggagtctcgttctgttgcccaggctggagtgcagtggcgcgatcttggctcactgcaagctccacctcctgggttcacgccattctcctgcctcagcctactgagtagctaggactacagacgcccgccaccacacccggctaattttttttaaattttttagtagagacggggtttcaccatgttagccaggatggtctcgatctcctggccttgtgatccgcctgccttggcctcccaaagtgctgggattacaggcgtgagccaccgtgcccggcctgatttttaatttttatcactgtgatatttctcaagctgggttcttgtgcctgggtcaaagctgtgggttatcagagtgtcatctgggaaattagtgtgtgtgagtccccacacacagctgctcaccacattttggaattgtcttggcaacatatgagtgcatcagtttcacacaattctatcagctatatatagacacatttttttcatgggtttattaacaattctctgatcacttcgtgatcaccagttctgcatcctctgagtatggttagccacattgttcactgcacaagggcatctggccaaggaataccagcccatgctccacacacagaatggggagcaacagctcagggctgtgtctatctgtaggggcatgcagattgaaaatgggcttgtagcagccctgacagtgaatgctgcaaagagaccttatacatgtatatcagttccttttttaaatttttttgagatggagtctcactctgtcacccaggctggagtgcagtggcgcgatctcggctcactgcaatctccgcctcctgggttcaagcgattctcgttcctcagcctcctgagtagctgggattacaggtgtgtgccaccatgcccggctaatttttgtaattttagtagggatggggtttcaccatgttggccaggctaatctcgaactcctgaccttaagtgatctgcccaccttggcctccaaaagtgctggaattacaagcgtgagccaccacacctggcctctatttcgaatattaaactttaatttaccatatcccaaatatttttccttttgttgctattatgggctgaattgtgtccctccaaaatgcatatgttgaagttctagcccccagtacctcagaatgttacctttgaggtgattaagttaaaatgaggttattaaggggggccctaatccaatatgactgatttctttataagaagaggaaatttggatataggcacgcagaaggaagaccatgtgaagacagagaagatggttgtaagagacagaaaaacccaaagtgtgtttctcctactctcatacacaccgctcaccagagagtgcttcacctctggccacaaaaatgggtggagatttctccccaccaacaacctgttctccagcagacactaactgggtgttctctaattcaagtcaatctagtgttagattttttaggttaagggctcagtgccacaagactgctctctgcttcagatgccaattccaagtggtaagttgtcagctatacttctgaccaactggctataaatcaggggttcccatgccaccctccttgggttcaactctgtgagtggctcacagaactcagggaaactttagttatatttacccatttattataaagggtagagacaaacaccagatgaagagatgcatagggagaggtatggaaggaggggtgcagagctcccatgccctctccaggcaccacaccctccaggcaccttcacatgttccacagtctggaagctctcgaaaccctatcctcttgggtttttatgaaggcttcatgattgatcgcatctttggccatgtgatcaactcaaccatcagccccactccccattccccagaggtcaaatagtgggattgaaagtttcaaccctcagctgggcacagcagctcacgcctataatcccagcacttttggaggccaaggcgggtggatcacttgaggtcaggagttcgagaccagcctgaccaacatgatgaaacccatctctattaaaaatacaaaaatttgccaggtgtggtggtgggcaactgtagtcccagctatttggaaggctgaggcaggagaattgcttcaacccagaaggtggaggctgcagtgagccgagattgcctcactgcaccactccagcctgggcgacagagcaagactcagtgtcaaaaaaaaaaaaaaaaaaagaaagaaagaaaaaaagttccaaccatctgataacaaaagatgcttctatcacccaggaaattccaagggatttccatgtcagttgttcctctcactcaggaagttataaaggtcttaggatctctgcgtgaggaactgggtggaagaccaaatattagaacagaagttctcctagcatccctattgtcaagagttttaggagctctgtctcagaaatggggtatagagaccaaatatatatttctttacaatatcacaagaatcatctacaagccaaagaaagaggctatagaagaaaccaaccctgctgacactttaatctcagccttccagcctccagaactgtgagcaaataaatttatgttgtttaagccaccatctgtagtacttcttgtttttttttttttttagagacaggttcttgctctgttgcctaggctggagtgcagtagcacaatcatagctcactgcagcctccaacatcttggtgcaagcgatcctcccacttcagcctcctgagtagctgtgactacaggcatgtgccaccatgcctggctaattttttttatttttgtagaaacaggatctgactatgttgtccaggctggtcccaactcctgagctcaagcaatccttctgcctcagtctcccaaagtgctgggattacaagtgtgagccaccatgcctggcctgtggttctttgttatggtggttctaggaagctagtatagttgccttatttttctcataaatttagtttttagataccaaagtttaaaaattaaacctaggcctggcacagtggctcacacttgtaatcccagcactttgggaggccgaaggaggcaaatcacttgagtccaggagtttgagaccagcctggtcaacatggcgaaaccccaactctactaaaaatacaaaaaatttgccaggcatggtggtgcacacctgtaatctcagctatttaggaggctgaggcatgagaatcacttgaacccaggaggttgaggctgcagtgagccgagattgcgccactgcactccagcctgggcaacagagcgagacttcgtctcaaacagaaaaacgaaaaaaaggcctgggcgcagtggctcacacctgtaatcccagcactttgggaggctgaggtgggcggatcaactgaggtcgggagtttgagaccagcctgaccaacatggagaaacctcatctctactaaaaatacaaaaattagctgggcatggtggcgcatgcctgtaatcccagctattctggaggctgaggcaggagaattgcttgaacccaggaggtggaggttgcagtgagctgagatggcaccattgcactccagcctgggcaacaagaacgaaactctgtctcaaaaaacaaaaacgtaccaattaaacctagccatattgttgctgctaataattttatgaccttaataaaatcttcccttccttcttttgtatttaaaaataattaactgttaagcaaatgcgggatttattttggggtgaaatatgtatacaagttaaattatttgctgctggccaggtgtggtggctcacacctgtaatctcagcgctttgggaggatgaggcgggaagatcacttgaggtcaggagtttgagaccagcctgaccaacatggtgaaaccctgtctctactaaaaatacaaaaattacccgagcgtggtggtgcatgcctgtaatcccagctacttgggaggctgaggcaggagaatcacttgaacccaggaggcagaggtttcagtgacccgagatcgtgccattgcactccagcctgggcaatgagagcaaaattccatctaaaaaaaaaaaaagtgctgcaaagcagttgtcccaatagcatttatttaagtggggcgggggcgggggggtgggggcggggggagattcttattggttcgtaatttatcaagttagaccttttatgaaattccccccatgacctttgaccttctgtttttaacctggtaccaaacagcttttatcatcgtctcgtggtgtttatgttttgaagtccaatagggtgagttgtctatgattgtttccttcttttcccaaaaatattctttggagttcttacctactgattttttttttccagatgaattttgctgtcacttaagtttgacaaaatgttccctttgaaatttcaaatttttgaaatgaagtatgagatctaaaaaaaaaaagaaacctgtgtattggctcagcattacccttattcctctcagccaagtgcaagggatcacttactcaaatctttattcatcccactagagtttaatgacttccttgaatggctgttcaatgttcagtgacaggtctggcttttgttgtgaggccatctatggagtctctgggacccttccagtccctggaatcagtttggtctgagaggtcaggacttggaaacatactggaggcagggcaagggcaccctgctcttgttttggcatctacctcttttccgctggtccttcttatccatccaactagtccttttccctgagccaggtccatactttcccaccccaaacccttcctcttgtttcctggctctctgtttctggctacattcatttcctacactcctgtatcaaaagtaccacaattgcttctcgttcccacagtgcagtgcggctgagcgcctcagagcccgcggggacgctgcggggggattgcggggagggggcgttgggaggtgccgatgttgggctgggcggatgagcgcatctgcgtggtgagccttccaacgtgcgcgagaaggacgtggaagaccttttctacaagtacggccggatccgcaagatcaagcttaagaatgggcactgccttgtgcccttcgccttggtgcgctttgaggacccccgagatgcagaggatgctatttatggaagaaatagttatgattatggccagtgtcggcttcgtgtggagttctccaggacttacgaagtcggggtgggtggccccgtggtgggaggaatgggccttctgcaagaagatctgatttccgagttcttgtttcaggacttcctcaggcagctggcaggacctgaaggatcacatgcgagaagttggggatgtctgttatgccgatgtgcagaaggacggtgtggggatggttgagtatctcagaaaagaagacatggaatatgccctgcataaattggatgacactaaattccactctcatgatagtgaaacttcctacatctgagtttatcctgagagaagcaccagctatggctactcacagtctcggtttgggtcaaggggccgtgactctccatactaaagccggggttccccacaccacttctctcctttcaggccctactgagacaggtgatgggaattttttctttattttttaggttaactgagctgctttgtgctcagaatctgcattccagattgaggatttagcgtcttaggaaattattttaattttttttttttaaagaagaaaaaaaaactacatactttctaccagggccatattagcagtgaaacattttaaactgcagaaattgtggttttggttcagaaacaagttgtatatttttcactcctgaatatgggtaaaaaatcagttccgtctttgtgggttgctctgctatggagatcaacagttactgtgactgagttggcccattctgcttaaaaatatgttttaaacgtttaagaaaaatgctcatcatcactggccatcagagaaatgcaaatcaaaaccacaatgaggtaccatctcacaccagttagaatggcaatcattaaaagtcaggaaacaacaggtgctggagaggatgtggagaaatagaaacatttttacactgttggtgggagtgtaaactagttcacccattgtggaagacagtgtggcgattcctcaaggatctagaactagaaataccatttgacccagtgatcccgttattgggtatatacccaaaggattgtaaatcattctactataaagacacatgcacacgtatgtttattgcagcactgttcacaatagcaaagacttggaaccaacccaaatgtccatcagtgatagactggattaagaacatgtggcatggctgggtgcggtggctcatgcctgtaatcccagcgtggctcatgcctgtaatcccagcactttgggaggccaagacgggtagatcacgaggtcaggagatcgagaccatcctggctaacacggtgaaaccccgtctctactaaaaatacaaacaattagctgggcgtggtggtggcgggtacctgtagtcccagctactcggtaggctgaggcaggagaatggcatgaacccaggaggtggagcttgcagtgagccgagattgcgccactgcactccagcctgggcgacagagcgagactccatctcacaaaaaaaaaaaaaaaaaaaaaaaaaaagaagaagaaaatgtggcacatatacaccatggaatactatgcaaccataaaaaaggatgagttcgtgtcctttgtagggacatggatgaagctggaaaccatcattctgagcaaactactgcaaggacagaaaaccaaacactgcaggttctcactcataggtgggaattgaacaatgagaacacttgaacacggggtggggaacatcacacactggggcctgttgtggcgttgggggaggagggagggatagcattaggaggaatacctaatgtaaatgacgaattaatgggtgcagcacaccaacatggcacatgtatacatatgtaacaaagctgcacgttgtgcacatgtaccctagaacttaaaagtataattaaaaaaaaaaagtttagtaattgaaaaaaaaaagtacaacaattgggttggttggaacagcagaaatgaattgtctcacagctctggaggccaaaagtctgaactcaaggtgtcggcaggaccatgctccctctgaaacccatagggaaatccttctttgccccttctagcttctggttgtttgctggcagtctctggcattccctggcttgtagacgcatctttccaatcgtctgccttcacatggtagtctccctgtgtctgtctctttaagtggctgtcttttgttttttgtgtttttttaatttcaatttaatctattttttgtagacacattgtttcaccatgttgccaggctggtctcgaactccagggctcaagtgatcctcccgtctcagcttcccaaagtgctgggattacaggcgtgagccgccacacccagcccacatggctgtcttcttatgggaaaccagacatgggattagagacccactctattagagtaggattgcatttaactaattacatctgcaacaactctatttccaaataaggttacattctgaggtactaggggttaagacttaaatatatcctttttaggaaggacacagttcaacccacaatattagctggccacatgtttcccctgatctgtactttacttgttccccctggctctggtccctcctcgggtcaggtcctgcctgagcctcccctggccatgtcccttctttgtgcctggaccctcctgattaataccccatccccacccttgtgccctcagctgacttcttgtacctcccaccaggcatgatgacctgaaggagatgctggacaccaacaaggattctctcaagctggaggccatgaagaggattgtggcggtaagaggggaaggaggaggcctccctccgggcggggcctgggtggccaagagcagctctccttagctccttgtagaccttccctctagttagtgctgtgcctctcgctttgtccctcttcccctaccttgaccccaccacccagatgattgcccgaggaaagaatgcttcagacctgtttcccgcggtggtgaagaacgtggcctgtaagaacatagaggtgagcactacctggtgagggattgcttgtccccacctcccccaggaccacactcaagcttggggtgaggaaggaaatgatttagcccctgggggcccgacctgctgagaaatgtctctgagccaggagaagacactgtctccatgtccctgaactggatgtggatcaaggtaaaggacccggatacactcaggggtgctctcccccactgggagagtttgtccccatggaccgcagctggctggggagatgacatcccaggggtaggggggtgggcacaggtgcctgctgagaagcgttctgctgagaaacgtgctctccccaaggtgaagaagcttgtctatgtgtacctggtacgctacgctgaggagcagcaagacctggccctgctgtccatctccaccttccaacgtggcctaaaggtcaggggtctcagtttgcctcccagggcctgggcctcgttggcgctgtatcggaggagtaggcctggggagaggccatgagcatgggagcgggctctgcagaccccttcctacctgcctaaaattgggagggtcacagtcagaagaggccagccagaccctcagagagtggaagctgggctcagaaggggcgtaagagatgaagtgggtacccagggcccctgtctctcttcccaggagcctgtggtaatggctgcttctagtatgaaccacttgagcccccggagagtggagagtctctagcaatggagaacccctcaaccctcacccccctttgtgtaaaggtgtgaattgtggtccacagccaggtagatttcaacctttagcagtggcctgaatcccccacaccattctcaccttttgtttcattttgcccaaggcctctagttggatttacatatgttaggtgcatgtataagtctcccccctaagggcttttctggttagtctaagacatcttgagggtaaagacagccatttcaaggccattctctccatattggatttttcagctctgattacaaccattaactcctctatttttgcatacctttatttatttatttatttatgagacaggttctcactgtgttgcccaggctggagtgcagtggtgcaatcatggctcactggagcctcgacttccctgagctcaggtgattctcccacctctgtctcctgagtagctgcgactactcagcctgcatcaccatgctcggctaatttttttgtagtttttgtagagatggggtttcaccctgttgcctatgctggtcttggactcctgggctcaagtggcctcagcttcccaaagtgctgggattacagggatgagctaatactcctagcctggatacttttagttcaaatttctgtgagagagattgtgaaaggtccagctcatcttttcatatccagaagttctgtaggttgctgggtagacaggattgctgctcaaatccagggcccaccccttgtccaatctgctatggccagcaagaggggttgacagtcggcttctttggggtgagagtagaaagcatggtcacttgaatatacaattcattcatttagtaaatacttgggtgtctctatgccacacattgtgctagatttctttttataagtcaaaaccatggaatccgtcttagattggcaagtaatcttttggtttgagtaagggttaagtataaaaactaatctgaaattgttgtacagattttcacctatagtctctaccaactgaccctgtcccccttttagaaaaccagagctcatttagttcaactcaatgtgataatttctttctgcaaagtgccaaatagtattttaggttttgtaggccttatagtctcaactatgcaactactcaattttgcccttatggtgcaaatgcagccattgacaagtgggcgtggccgtgttccaataaatctatataaaaaacaggcaatagacagattttatccaagggctgtagcatgccagcctttgctctagaacatgtctaacaggtcatcttttctgatagggacctcactccttcataaggcaacttgctccatctcaagacaactaccactatttggggtgttttttaaaccattctcttttgttgaaacctccacaactataatttttaaaaattgatttcaggctgggtgtggtggctcatgcctgtaatcccagcactttgggaggccgaagcaggcaaatcacaaggtcaggagttcaagaccagcctggccaacatggtgaaactccatctctactaaaaatacaaaaaattagcttggcatggtggcgggtgcccataatcccagctactcaggaggctgacgcaggagaatggcttgaacccgggaggcagaggttgcaatgagccgagaacgtgccactgcagtccagcccaggcgacagtgtgagatccatctcaaaaaaaaaaaaaattgatttcaggctgtactgcattatgactgcacctgtgaatagccactgtactccagcctgggcaacatagggagaccctgtatctaaaaaataaaataaaatttactacaggttcacaaaaggcataaagaataatataatgaatatccataagaaatgacacatttctcaaatagccaaagcctcctatatatcttctcttgtttatcattcataggtatgtatttattcctgtgctagtaatttgcatattgttaagcaatataaaatgttttgtaaatggtgtcatcgtactacatatgtattcctttaaaacttgttttcttttttgttgtcactggcttttggtctctcctgcatgttggaaccaatcatttcaatccagccttctcccttctttcaatcctagcccaggctagggccgtgttcactttcttaggagatccctcatggaatcaaacctctgactggcaagcagataatccaggtctccctacatcctgtctttgtacagttggtcccttgaaccccctatgaaaccctactctatttcattttatcagtttagcacagggtccaaaccagggtgattctgaatcttaattatgtccctcctgattttgtgtcttctttcaagatactgataagctatttggaccagggcaaaagactgaggcatagcatgtttccaggttgacactgatctgttaataaaccttctccaagtatatttcaccacgttgtagacccacctgactgtacagacagctggcatttttctatcttgttaggaaggatcttattcaatagcaataaataaataaataaataacacctttcatgtgcaaagggttgtgggtgacacagagataaaacagatgtgaattctgctcttaaaaatgcttggctattaggtgaaacaaaaggcctacctaaaaaatagcaatgcaggaaatgctatgagacttccacaaacatatcactgaaatcaagatactaatatccaccggcctagttaccccatcaaaaaggaaaacacattttttttgataactttctgtgaatctataatcatttcccaaataaaatgctcacacacaaaaaaggaaaacaggtttaagcagatgatgtgactatttgtctctaagaaaacagagactccttccttttcaataaatgtttctaacccatctgtttaaaagtcaattccagaattttgtcaggaattagcatcaattttacctgcaattgtgaggatcttgtcttgtctttttccatttcagaaagtcagggtaatatctacccttctttagtgttctattcccgtcattctctaagagtaatagtacaggcacacctcattgtattgcactttgcagatattgccagatattgcactttttacaaattgagggtttgtggcaaccctacatcaatcaagtctatcagtgccatttttccaacagtatgtgctcacattgtgcctctgtcacattctggtaattctcacaatattccaaactttttaatgattattatatgttatggtgatcagtgatctttgatgttactattgtaattgttttggggtgccacaaaccatgctcagacatgaaagtgaaattaatcaataaatgttgtgtgtgttctgactgttcccccatctccttcaccttgggcctcttcattccctgagacacaacaatattgaaattagatcaattaataaccctacaatggcctctaagtgttcaagtgaaaggaggaaccacacatctctcactttaaatcaaaagctagaaatggttaggcttagtgaggaaggtatgttaaaagctgtgataggctgaaagctaggccacttgctccaaacatttagccaagttgtgaatgcaaagtaaaagttcttgaaggaaattaaaagtgctactccaggctgggcgtggtggctcacacctgtaatcccagcactttgggaggccgaggcaggaggatcacttgagaccaggggttcaagaccgtctctataaaaaatttttttaagttagcctgatgtggtggtacgcacctgtagtcttagctacttgggaggctgaggtgggaggatcacttgaacccagaagtttgaggtgcttctccagtaaacacatgaatgataaagaaagcaagacaggattattgctgatataggaaaatttaagtggtctggatagacgatcaaaccagctaccacattcccttaagccaaagcctaattcataggcaggtcttaaatctctccaattctatgatggctgagagaggtgaggaagctacagaagaaaagacggaagctagtggaggttggttcatgaagtttaagtacagaagccatctccataacaaaaaaatgcaaggtgaagcaaaagtgctgatggagaagctgcagcaagttgtccagaagatctagctaagatcattgatagatgtgactatgttcaacaagagatgctcaatgtaaatgaaacagcctcttactggaagaagatgccatctagcactttcctacctagagagaagtcaatgcctggctttaaaaaacaggctggctcttgttaggggccaatgcagctagtgactttaagttgaggccagtgctcaatgaccattctgaaaatcctggggtccttaagaattatggcagatctcctctgcctgtgctctataaatggaacaacagtgccatgacagcacatctgtttgcagttatggtttactgaattttttaagcccactgttgatacctaccgcttaaagattcctttcataatattactgctcattgacaatgcatttgttcactcaagagctctgatggagaggtacaaggagattaatgatttcatgcctgctaacacaaaatcagttctgcagcctatggatcaatgagtaattttgacttttaagtcttattatttaagaaatacatctcgtaaggctagagctgccatagatagtgattcctctcatggatctggacaaagtaaattgaaaaccttctggaaaggtttatagaaaccttctggaaaggtttaccattatagatgccattaggaacattcatgattcatgggaggaggtcaaaatattaacattaacaggagtttggaagaagttgattctaaactccatggatgactttgaggggttcactacttcagtggaggaagtaactacatatgtggtggaattctacctagaagtagaagtagaattaaaagtggagcctgaagatgtgactgaattgctgcaatctcatgataaaacttgaatggatgaggacttgcttcttatgagtgaacaaagaaagtcctttcttaaaatggaatctgccgggtgcagtggctcacgcctgtaatcccagcattttgggtggccgaggtgggtggatcacgaggtcaggagatcgagaccatcctggctaacacagtgaaaccccgtctctactaaaaacagaaaaattagccaggcatggtggcgggcacctgtagtcccagctactcgggaggctgaggcaggagaatggcgtgaacctgggaggtggagcttgcagtgacccgagatctcgccactgcattccagcctgggcgacagagcgagactccgttacaaaaaaaaaaaaaaaaaaaaaaaaaaaaactcctggtgcagatgctgtgaacattgttgaaatgacaacaaaggatttagaatattacataaacttagttgataaagcagaggcagagtttaagaggactgacttcaattttttttttttttgtagagactggggtctccctatgttgcccaggctggtcttgaactcctaggctcaagcaatcctcctacctcagcctcccaaagtgttgggattacaggcacaagccatcacgcccagcctacattgtttttttaaagacataatgctattgcatgcttagtagactacagtatattgtaaacataactttttttttttttttggagataggatctcactctgttgctcagtctggagtgcagtggcatgaacatatgtagctcacttcagcctccaactccctgggctcaagtgattctcccacttcagcttcccaagcagctgtaactataagcataacttgtatgcaccaggaaacaaaaaatttatgtgactcgttttagtgcgatatttgctttattgttgaggtctagaatcaaacccacaatatctccgaggtatgcctgtaatatatagctgctgctgctgatagtgggaagacagtcctaagccccatgatcacaatacagtgtaaggaatgcttttatacgttctgtataggatgcagtaggaataaagaagaagggcttggggccgggcgtggtggctcacgtctgtaatcccagtactttgggaggccgaggtgggcggatcacttgcggccaggagttcgagaccagcctggccaacacggcgaaacctaatctctactaaaaatacaaaaaattagctgggtgtggtggtgcgcgcctgtagtcccagctacttgggaggctgaggcaggagaatcgcttgaacccaggaggtggaggttgcagtgagccgagattgcaccaccgcactccagcctggcgacagagcgagactccatctcaaaaaaaaaaaaaaaaaaaaaaaggaagggcctacacccctattttgttttaaacactgtggaagaacagcagcttttgcaatgatttctgggagaaaggagtgtaaggttgaactccggaagggagaccagcttgcatctgctgggcggtcacctcaggcattaaaacaggcacctccaaaaaaacccttacaaggaacaggaagtgtttcaggtgtttcagcaattttaggtgttctgaaagtttttcagtgtttctggaagtgaagctacccattgcaacacctgttcaggtgtcagatttctgcaaccagagccaaaattaagtgtcccccagatacccatcactggcacaccatccaggctccagtcaagcggcagggaagcaagagctagtggtcgctggggacagtgacttccaaaggtgtggcctccccccatcagggcacctggtgccctttcatagctctgcctccacctctgcctttaggatcccaaccagctgattcgtgccagtgccctccgtgtcctctctagcatccgtgtgcccatcatagtgcccatcatgatgctagctatcaaggaagccgcctcggacatgtcaccctatgtgcggaaaacagctgcccacgccatccctaaactctacaggtatgccccagccctgtcccacgctccccaggaggctggttcctaagttctcaacccacccctggcctttcctaagtcttgcctgctgcttctcagagggtttgaggagggtagtttgggggactgacagagatggaggagaacaataaggctggggtgcaggaggtgagcatggcttggacagatattgggaaggctggggctgagagtggcaaattcccctcaccgatttctccctcagtttggactctgaccagaaggatcagctgatagaagtcattgagaagcttctggctgacaagaccacggtgcgtgtataggggcgctccgggaggggtggtgaccggcagccggccttccacccttcgcgttcaccctctcgtctttgttctttccccagctggtggcgggcagtgtggtgatggcctttgaggaggtctgcccggagcgcatcgacctgattcacaaaaactaccggaaactctgtaacctgctgatcgacgtggaggagtggggccaggtggtcatcatcagcatgctcacccgctacgcccgcacgcagttcctgagccccacccagaacgtaagtgggcccagcccaggcagagcgggccgaagtgtgtcccggggaggcgcccacagacccgtcggtctccccgtccaggaatccctactagaggagaacgcggaaaaagccttctacggctcagaggaggacgaggccaagggcgcggggtctgaggagacggccgccgcggccgccccctcccgaaagccctatgtcatggaccccgaccaccggctgctgctgcgcaacaccaaacccctgctgcagagccgcagcgccgcggtggtgatggcggtggcgcagctctacttccacctggcgcccaaggcggaagtgggcgtcatcgccaaggcgctggtgcgcctgctgcgcagccacaggtgcgctccgcccccagccccgccccctccctcgcctcctgccccgccccacgggctgcccggctccgccccctcacgcccaccagccgcttccacctctgcccacccgctccacactgaccgtagtcctgccctccgcactggtcctctccccgcaacgacttgccccaccttttcccctcatccgctgacccttgccccaaccgaggggcccggggtgctctgacccgtcctctccgcagtgaggtgcagtacgttgtgctccagaacgtggccaccatgtccatcaagcgccgggtgagcctgcgacggcgggctgtcctcgctgtccgagggccgcttctgcgggcactggaggcgttgtcggggctgggaccggggccggggaaagggaagatggaggaataccctggctgtgcagaggatggggcaggggaggctccaaatacagatagggagcagggcctggatcctgaggggccgctgaggggatgtccagtggaaaaagagctagtcagatctgagatggacgagggaagacttgaggagtggagggcagtggtgaggaggcaaggatcctgggcgctgggtcaggataggaggggtgtctctgggcagcgaggcaggcctggggcttcggtggagctccctagctgcctctcttgtgccagggtatgtttgagccctacctgaagagcttctacatcaggtccaccgaccccacccagattaagatcctgaaggtgagtgagggacagaagtgcatgtgcttcccagccctccccaccccatgtacccactcaaataactcacagtggcccccctggtgcctgcctattcctggggctgagcccaggagcccatgactgccccagctggagctgtttgttcagggagctgggctaaggagggtcagggggagaagggaactgctctttgcctagtacctggtatacacctgctactcttcataaatgaagtaacctgatatcacctcataataatcccaggatgtgtacattatattccttttataaaaatatagactctggccaggcacagtggctcacgcctaatcccagcactttgggaggccgagacaggcagatcgcctgaggtcaggagttcaagaccagcctggccaacatagcaaaacctcgtctcaacgaaaaatacaaaaattagccaggcgtggtggcaggtgcctgtaatcccagctactcgagaggctgaggctagagaattgcctgaacctgggagacagaggttgcagtgagctgagattgtgccattgcactccagcctgggtgacaagagcgaaactccatctcaatctaagaaaaagaaaaaaagactctgggaggtaactgccccaggtcacataattctgctgactccaaggttcacacttttctctcccacccacagtgttatggcccccacacacctgccccctcaggctctcctgcaaacattcacggacaaggaaagtggcgggagcccatacctccatttgattcctgctctgctgcctcattattgagtgatttccttcagcaacagttaatcttcctaacccttgtgaacatccactatgttctaggggtacatgatgagcaaactaatcagggaccctgcctttgtggagcttacagatgtggggaggaggagacattaagcagttaatcacaaggcaaatgtaaaagtccacttacaaaatatggaagaaagtgtggagagctataagggcataaaatagggagacctcatctagtctggtgccagggaagttttcccggaggatatgagacttgagctgaagcctgagagatgaacatgaattatgcagggacagaaatgggaagaactgctccacgcagaggaaacagcatctgcgaagaccctgggttaggaagtggagtgggattggggcctggaagacaagggggacagtgatgggagatgggaggtagacagcaagcagatcattcagggacttacagaccatggtgaatacgatggtctccatcctgaaagcaataggaagctttaagttttcaatgcagtagggaggtgacatggtcatactgtaagcatactgtgtagggaatccacttaagaggcaaactggtcctcttgctttttagacaagtttcataacctgtcaattccctcatcagtgtgaggatgatgcagggctgtcatgaggattgttttctggtctatgaagtgtatttggaatgaaagcacagaaagtccactggccaacccacccattttctgcctctccaaccctccctgcagctggaagtgctgaccaacctggccaatgagaccaacattcctactgtcctacgggaattccaggtacaggccagctcccagccagaagggcctgggagaggggcccatcagatccttgtgccctggtgggtaaacctcctcttatgagcccaaggctggagaaactattatcttacattcccgttccaatgtgtttggctggctttgggccaaggaatcactggattgggggtggagttgtcaccccctttcccaagtcttagtcaccggcatgataagccataaaatgaaaggccacagccttcttgaaggtcaccctcaagcctgcagagtcactgagggatttctttgtcatatcccacagacctatattcgcagcatggacaaggactttgtggcagccacaatccaggccattggacgctgtgcaactaacatcggccgagtccgtgacacctgcctcaatggcctggtgcagctgctgtccaaccgtgatggtcagtgtttccctgagtgtctaaccgtgatgatcagagggtgtctgcctgcaggtctgactctgctggccactggatatccaccagtctgcctagacacaatgtgtatccattggtctgtctgtcttgatcagggcccaagtgttcctacacctctgagggctgctagagaactgaagggggttgagagaaagagccaagggcctggggcactgcaggtgtgtctgtccacctgagtgtggccatctgactgtcttggggtccacacactcatttttgttctgtagagcttgtggttgcagagtcagtggtcgtcattaagaaattgctacagatgcagccagcacaacatggagagatcatcaaacacttggcaaagcttacagacaacatccaggtgagggagaagccatattttcactccccacttcaaggtcctccccatgatttcaagactgtataattacatatgctagccttatcaaaagtaacttccaaaccttaggtcttcaggtggaaggagcagagacactggaccatgtgaccctgaccttgttacccctgatttgctttccctttggagaccctcaatgagcacgatggactttactactactcttgttttctctctaaagctctagccaaccatggttgagtgacaaatcttgtgtttttctatcgcactgctaagctgaaacatctaaacaaggcattcccaaagattctggagagtaacatggaaataaagtactgag

SEQ ID NO: 15430 - DNA, 50457 bp, Homo sapiens
cctgccgcgccgccgccttcgccagcccggaccggaccggcccgccttcccttcctccgctccagccggcctccggccccgcaacctcctcctcggcgaagtctccctggccgccccatgtcggccgcccccgcctacagcgaagacaagggcggctccgctggccccggggagcccgagtacggccacgaccccgcgagcggcggcatcttctcctccgactacaagcggtgagggagcccgccaggaagctcgcgggagggttggggccggggaccgggcgaggcgcgcgggcaccatggacagcgcccggccccagcgccggccccgccccggccgcgccgaccggaagcccgcccggccccctcctgcggcctggagccccggcccagcgcgggcagcgctggcaccccggctccaggggccggcctaggacgcggaggggggcagataggggctggcgggggatgggccagctcagtttcgagaggagaaaccctccggttccaggtgtttctccggtttgcggcgttgcgttaggggttcccttcctttttcgtgctaggcgggttggcttcccaaaaatgtgggggaggggtctgagtcagcgaacttgagcttgagcctggggcctcttcaggaaggcgggccctggatgtacttgcacagcctcccagcttggccctgctgcaaattcatttcccctccctctggtccccatctccatctgaccctcacatccctgctcctggcattgcccctgtagttcagctccaccttcacaccctcccccacctttgattcgttcgtttgtttcttcatttgtttattcgtaaattctgcaacaagcatttatgaaaagccaactgtgtcgagtcctgaactagtcacggaatacaactgtgaacatgagacccttcttgtcctcacgatgctctagaggggagcacagatgaagaagcagtcagggacagtcgagtgtaatgggggcagtgggagcagggagaggacctagtctctggcgccggagagaaggaagacaggagcgtgaggtatgttccaggcagaggaaagggctttcaggaaggttgagagccaggccacaatctgtgtgagccactggactgaccagaaaagagggtggggaggactcctgaaggattctaagcaggcgacataatcagatttatattttagaaggacgtcaggctgctgcattgtggagaagagattggaggtgggccagattgaacaagagacaagggaggtgggtcttgaagttcacaggcctggcatgattgtggcctagaccaggggagaggcagaagatttgaggctgtggaagaggtggaagcctcagacctgatgattaattggatattgggtgggggtttagagggacagggggagaagatgaggattttcacgcacgtccatgtgaagagaccaccaaacaggctttgaacaataaagctttttaatcacttgggtgcaggccagctgagtccgaaaaaagagtcagcgaagggaaatggggtgggaccgttttacaggatttgggtaggtagtggaaaattacagtcaaagggggttgttctctggcggtggggggacacaaggtgctcagtgggggagcttttgagccaggatgagccaggagaaggaatttcacaagataatgtcatcagttaaggcaggcacaggccattttcactcttcagttacttcaggccatctggatgtatacgtgcaggtcacaggggatatcatggcttagcttgggctcagaggcctgacattcctgtcttcttttattaataagaaaaataacataaaatagtgttgaagtgttggggcagcaaacattttggcggggggtggtatggagagatactgcttctccatagccttgaagggctgcttcgagcgggattggggtggcgtgggaacctagagtgggagagattaagctgaaggcagattctgtggtaagggatgatattgtggggttgttagaagaaacatttgttgtataggattattggtgatggcctggatacggttttgtatgaattgaaaaactaaatggaataagagaaggagaaaaacaggtattaaaggactaagaattgggaggacccaggacatccaattagagagtgcccaaggaggttcagcatagccctgccagcaaagattatttatttactttaagagggagttaagactggcagtttggggatagcaccaggagatatcagctgtaatggtttggagaaacagtgtaaaccggcagtgtaaacaagagcagggcatgtatgagtagttgagtatggtgaataggagtatgactagtcagaagatagtagggatgacaagttttctggggcacagtccaagttggtctggtgtctggaatgagactggggcctaataaaaaggagcatctatacaggagcttgaatgggctgtaccctgcagcattccgaggacaggcccaaattctgagaagggcaagtggtaaaagtattgtcagtcctttttaagttggtggctgagcttggtgaggtgtgtttttaaaagaccattagtccgttctaccttttctgaagattgaggatggtaaggggtatgaaggtttcactgaataccaggagcctgagaaactgcttgggtgatttgaccagtaaaggctggtctgttattggactatatagaggcgggaaggccaaactgaggaattatgtctgacagaagggaagaaatgaccgcagtggccttctcagaccctgtgggaaaggcctctacccatccagtgaaagtatctacccagaccaagacgtattttagtttcctgactcggggcatgtgagtaaagtcaatttgccagtcctgggcagaggcaaatccccaggcttgatgtgtagggaagggagggggcctgaacaatccctgaggagtagtagaatagcagatggaacactgagaagtgatttccttgaggatagatttccacaatggaaaggaaatgagaggttctaagaggcaggctagcggcttgtaacctacatggaagaggttatgaaatgacgaaagaatagaatgggcctgtgaggctagaaggagatattttccttggtctgagaaccatttgccttgtgtgggaagagattcataggtgtaagtttcattgggggagtaggtaggagtgactgatgagaaggagaaaaactggccatgagggacagaagttggaatgctagctgcttttttagctaccttatcagcataagtgttgccctgagcgatgggatctgatgccttttgatggcccttgcagtgaatgactccagcttcctttggaagtaaagcggccttgagaagagtttttattaaagaggaattaatgatggaggacccttgtgtaatgaggaaagctttttgcccatataacagcatggaggtacaggatatggaaggcatatttagagtcagtataaatattgacacatagtccttttgcaagactgagggctcgagttaaggcaatgagttaagctttctgagaggtagtggaggggggcagaaagtatatgcgtcaggtgtgaggaagaaaatagattttggaagttatgagaactgtagagagtgagttgagcatagtttgtgattttgagggcctctgaaagtattaaagcagcggcagccgctgcacgcagacatgagggctaggccaaaacagtaaggtcaagttgttcggacagaaaggctacagggcgtggtcccagctcttgtgtaagaattccaaccgcacagccctgcactttggctgtgtgtgatgaaaaagggttgggatgaattagggagacctagtgtgagagcagcttctacggctgtttttaaggaatggaaaggagtggcaaaaggatttaggatctgtggggtcagctaggtttgcttttgtgagtttatataatggtttagtcaggatggtaaaactaggtatccaaaggtggaagtacctaaccatcccttgaaaggaaaggagttgttgctttgtagaagggattggggttcgggagattagccggacatgatcagcagggagagcacgtgtgttttcatgagaactatgccaagataggtaatggatgaggaagaaatttgggcttgactgaagtaatgggggctgtccgtgaagccttgcggcagtacagcctaggtagtttgctgagcctgatgggtgtcagggacagtccaagtgaaagcgaagagaggctgagatgaagggtgcaaatgaatagtaaagaaagcatgtttgaaatccagaagagaatgatgggttgtggaggggttgtggagggaggtattgaggaggagagtatatgagtttggcaccacggggtggataggcaaaacaatttggctgacaaggcacagatcctgaactaattgtaagacttgtctggtttttgaacaggtaaaatgggggaattgtaaggagagtttataggctttaaaaggccatgctgtaacaggcgagtgataacaggctttaatccttttaaagcctgctgggggatgggatattgacattgagcacggtaagggtgattaggttttaatgggatggtaaggggtgcatgatcagtcgccaaggagggaatagaggtgtcctatacttgaggattaaggtggggagatacaaggggaggatgtgaaggaggctttgaactgggggaaaaggtggcaatgaggtgtggctgtagcctaggaatagtcagggaagcagataatttaaagtgtctcggcctaataagggaactgcgcaggtggggataactgaaaaggagtgcataaaagagtattgtccaagttggcctcagagttggggagttttgagaggtttagaagcctggccatcaatacccacaacagttatggaggcaaaggaaacaggcctttgaaaagaaggtaatgtggagttggtagcctccgtattgattaagaaggggacggacttaccctccactgtaagagttacccaaagcatctgtgatggtccaggaagcttccaaggcgattgggcagtgtcagtcttcagctgctaagccgagaagatttgggaaggagtcagtcaggcagccttgggccagagttccaggggctctgggagtggctgccaggtgagttggacagtccgatttccagtggggttccacacagatgggacaaggcttaggaagaatcctgggctgtgggcattccttggcccagtggccagatttctggcacttgaagcaagatcctgatggagaaggtcctgtaggaatgcttgactgctgcagcttaggcattttgaagttcttgtgtactggagatgtggctggggtttctctcacagtggaggcaaggaactacaactcagaaatacattgctacttggctgcctttactctattattgtacaccttgaaggcgaggttaattaagtcctgttatggggtttgagggccggaatttaatttttggagttttatttaatgttgggagtggattgggtaataaaatgtatattgagaataagactgccttttgaccttttagggtctagggctgtaaagcgtctcagggttgctgcccaacgagccatgaactgggctgggtttttatatttgatgaaaaagagcctaaatactaactgatttggcagaggtcggataaaggaaaaggagcgttaaccttgactatgcctttagctccagccacctctttaagaggaaattgttgggcaggttggggagggctagtcgcagaacaaaactgtaagccggactgggtgtggggagaggaggtgatagaaggattatagggtggaggagcagaagctgagaaagaattggagtctgattcagcctggtggggagtgacctgaggagcattctggggattaggtgagaggtcagatgggtcggtagaaaaggaagattggaagattgaaaagacgcagcgacgcttggggttgggactgaggggacaggcgggagggaaagaaggaggatttgggatgagtcgcattgggaacagagactagggagggaccgatgtgtaaaagaatgcctggacatcaggcacctcagactgtttgcccattttacaacaagaattatctagatcttgtaggatggaaaaatcgaaagtgccgttttctggctatttggaaccattgttgagtttgtattggggttaagcggcattgcaaagaaaataaggcatttaggttttaggtcaggtgtgagttgaagaggttttaagttcttgagaacacaggctaagagagaagaaggaggaatggagggtggaatgttgcccacagtgaaggaggcaagcccagagaaaagagagggtagagacacggagagaaggggtggggggtgctttgccccccaggaaagtggagagaaaagagagggtagagacacagagagaaggagtcgggggtgcttgtcccccaggaacgtggagagaaaagagagggtagaaacatggagagaaggggtggggggtacttgccccccaaaaagtggtgtttgccactaagggtgaaagatcaaggcaggcatcctcgcggtgatcagacaactctgaaacgtgggtgaataatcaagcaggcgtccccgcagtgattaaacaccaagggaagactgtcttcctgagtccgtgatcggcgccggagttttgggttcacagataaaatgcatttcctgtctctaccagaaaaggaaaggaaccgaaattaagagaagggagagattgaaagatggcaccaagattgaaaggagaaagaggttgagggatagtgagagaggttggagaagagagtaaaaagaggccgcttacctgatttaaaattggtgagatgttcctcaggctggttggtctgaggacccgaggtcattaggtggatctttatcatgaagcaaagagcaggaggacaggggattgatcttccaagggtggtcccccgatccgagtcatggcaccaaatttcacgcacgtccatgtgaagagaccacccaacaggctttgtgtgagcaataaagctttttaatcacctggttgcaggccggctgagtctgaaaaaagagtcaacgaaaggagataggggtggggccattttataggatttgggtaggtagtggacaattacagtcaaaggggggtgttccttggtgggcaggggcgggggacacaaggtgctcagtgggggagcttttgagccaggatgagccaggagaaggaatttcacaaggtaatgtcatcagttaaggcaggaacaggccattttcacttcttttgtgattcttcaattacttcaggccatctggatatatacgtgcaggtcacaggggatatgatggtttagcttgggctcagaggcctgacaaggatgttactcaggttactagttcctgcaactggatggatgatggtgttattcagtgtaattggaaataaagatgttacaagcaaatttgtggaaaattaatgttgagcccagctttggacatattgagattgtaaactctgagggacatattaccctattaggtagctggatattacgatttgggttccaggagagagattagggaattattaacatatgtatgttaattaaagccacagaagtgaagataactcagggaggaggtataaaatgagttcagacactgcacaagtctgaaccctgaagacaccaacattagaagtgaccagagaacagtggaaagtgtttcaaggtacccaagaggtgaactaaaggctgaaagaaaacaatgtaatttcaagaaggagggagtggtcagtagtttcaatgcccattaaggtcaaatcaaacaaggaaaaaaatcatgaccattggttgacaaagaagagctcaattcctttctactctattccccacctcctgccctgggagataaattctggcaaagtaaggagaacaggagctagattatttctttcccagcattctgttgtggatgatttaaaacatacagaaaaatgaaatgaataatacaatgaacacatgtatatcatccatctagattcaactgtcattgacatcgtaccttatttgctttatctaaccatctattcgtatactttttttggttgaaccatgttaagttgcagagatcatgacccttcaaccccacattctaagtcgacatctaaagccagattaaaatgaataaaggagcacacaggtggtaagtagataaaacagtgaatggaaattttgctttcaagaaatttgactgtaaaagagaaagctgctggaggagaacctcactcagttcaaggaagtttgtctattttgttattttgggtttttttttttgtttcttaaaatgtatgactccatatttttgtttattattaatattaggcgggagagcctagagcaagtttaactgctgatgggaaggagcgattggtgggagagaggctgaagggaagaaaggaagtacagaacactgagtgatgggaggggaggcttactgagctgggtgggaggactagcctgggagcagggaggaccaactctgcccagagggaagagggcaggaggagaggagagtataaatgcagatggagactgggtacagtggctcatgcctgtaatcccagcactttgggaggctgaggcgggcaggtcacttgaaatcaagagttcaagactaacctggccaacatgtcaaaaccccgtctctactaaaaatacaaaaattagccagttgtggtaacgcatgtctataatcccagctactcaggaggctgaggcaggagaatcacatgaacccgggaggtggagattacagtgagccgagatggcaccactgcactccagcctgggcaacggagtgagactccatctctaaataaataaataagtaaataaatgcagatggatgggagtctggggcagggggctgcaggggatttcatctaaagactttccctttttcgggaaccaggtggtgaagccataagggcaaggctgggaatggggacttgagggtcaaaggggtttcaaatacaatgaagaaagccaaccaggccaggcgcggtggctcacgcctgtaatcctagcactttgggaggctgaggcaggcatatcacctaaggttgggagtttgagaccagcctgaccaacatggagaaaccccgtctctactaaaaatacaaaaattagccaggtgtggtggtgtatgcctgtaatcccagctacttgggaggctgaggcaggagaattgcttgaacccaggagacggaggttgcagtgagccgagatcacgccattacactccagcctgggcaataagagtgaaactccatctgaaaaaaaaaaaaaaaaaagccacccaccactggcaggccagtggcattggagaccagtgggacaagagggccaaggatgtgagagcagttggagggatagacacaggggttgcgggggagggtgctaggaggaagtagagataagagaaggttgatgggaaggaataaatcaagtattggctctggaaaggcaggtgaggattaagatgcctagggtcagtgagaagagggtatatgagatttctcaggaggctgcagtctaattgtggcagtgggattggagctgaagagggcatctctcacctctctatcaactccactgaccatctagtcccttgcccagagactaggggtaggcttggtctcctgtccctgcccttctttccctctagaggccttgtctctgagcagtgaagaggaaaccggagcatccctccctgccagtgtccggttaccaagttttgggggcgggccatctggtgactgtgacaggagccccagcgccctggccagctcagtccattcctggagaagaacctgatgcagcgattcctgcagctcccgggggccgtggtgaggcctggggtcagaggggcctgcggagctgatcaagaggctgctagccctgtgctggctcccgaaggtgggcccccactccggtaccaggccttggagcctgaggagcttcggtggctgcaggcccaggaggaagacacgaccccagaagcatctctggaaggaccttgcccagaggccagccagagccagagccagccactacggtatagaggaacccacaggaaccccctacccacacagccaggaaggccagggatgggcagttgcactctcagcccagacctcttccggtcccacctcctctgatggaggcttaggctggcatttagggtccaggctgggcggagaaggtggtcaggggcaccgtatgggggctgagggtatgagtgaggagagatgaggggcttaactccctggaggctctgaggggaggaggatagtaaaatatttgagggttgaggtcccaccttgacctctttctccccacaggcccccactggagtgggctctggacgaggtttggggacaggatacagcacagacagggtttggccagccactgcctgccagtggactggaacttaggtggtaagaggtgacagcgaggtgtatatcaagggaggtgagcatgactgacccccagtgccatgccaggccccctggctggctccagccacccccagaagagtcccttaggctaggtcagactaggggtcaggtcagagtgagtgcagcagcgtaaggggatctgactatgggagataatgtttcatggccttagggtgttgtgccttagtccctgcctctgcctcttgggaacagaagttggtgggagtgaggacgagaggcccagggcggtctcacctcaggtggtggctgcggtctgtgtcagtgcatattctgtgtcagtgcatattcgacagtcaatcttacctgtgctggctgctttaggcccagtggtcctgccccctttcattccccttctcctgcaggggcctggaatgtactcactaggctgggtggggaggatgccctggggtgtgtgcatttgacaggcgcatgtggcatttgtgggtgtggtgaggaagggaatacccagagttaaaggagattgggcaaacttggccctccttccacggaagcccagggaaaagccatcccagggtgactcctcagaagatcagaggacccttggggctggatatatttgatcttagaagcctacatttatcatcaaaaatctcaactaggagtccactgaccattttggtgaatgagactggagaggccaagtttggtccaagttatctgtgtattagatgtgatgcggcatgtgtgtgtgtgtgtagggggacgtgtgtggggtgtgtgtgtctctatgagggtgtgggggagcggggagaggtcttgtgatatatgtctgtaggggacatgtatgggatatgtgtgtctataagagggtgtgggagagtggggagaggtctcctggtggtatatgtctggggggtttgtaggtgtgtaggtgagttgtgtgggtggtttatgtgtgtagagtttttctgtgggaggtgtctgtatgtgggggagtgtgtttctctgggcgttgtgtaggcaggattttgtgggtgtgcgtgggtttatgtatggattctactagtgtctgcgggacctgtaggtatgtttgtatgagctgtccgtgaggtgtaggtatgtcgggggacatgggagtgtctgaggtatatgtgggtggtatcaatgtgtagttgtctgtggggtgtgcgtatgaaggatcctgacgtggagtgttgtgcattcatatctcagggaagctggtgcccagctctgtcatttttcctaggccctcggtgctgcccacgcctacccagctcaatggtctgtacctatgaccatgcccctggtgtcctgagctcagcctcctacccactaagaaactcaacagtctggtctgtgtttggcagggtaagagggtgattgtcttctggccctggcctgaccctggaagagtagaaggtgtcctctgatttggggggcatccccccaggtgagggagtttcagataacatgatggggctggatattttcttctgtcctcacatgacagatagcgagggcctcagataatgctggaaggcatcatctttctattttgctttccatcaaaaatctctttgggaaagacagtttctaacattcttgggatagtgacttcttagtgcccctcttcttgtctgacgtcaggtactcacgcatttctgcagccctgtgactaagttgcgtgttctgtctggttcttctcttcctctcagcattcatcacttgtttctcagcattagcagcagtcatttgccactttatgattgttatcatgctctttcctctcctaacagtgctatccccaatttctgattttctgtcatttctaaatgttgcatgtctgtgactaactttgcacacattgattttttttttattttttatttttgagatggagtctcgttctgttgcccaggctggagtgcagtggcgcgatcttggctcactgcaagctccacctcctgggttcacgccattctcctgcctcagcctactgagtagctaggactacagacgcccgccaccacacccggctaattttttttaaattttttagtagagacggggtttcaccatgttagccaggatggtctcgatctcctggccttgtgatccgcctgccttggcctcccaaagtgctgggattacaggcgtgagccaccgtgcccggcctgatttttaatttttatcactgtgatatttctcaagctgggttcttgtgcctgggtcaaagctgtgggttatcagagtgtcatctgggaaattagtgtgtgtgagtccccacacacagctgctcaccacattttggaattgtcttggcaacatatgagtgcatcagtttcacacaattctatcagctatatatagacacatttttttcatgggtttattaacaattctctgatcacttcgtgatcaccagttctgcatcctctgagtatggttagccacattgttcactgcacaagggcatctggccaaggaataccagcccatgctccacacacagaatggggagcaacagctcagggctgtgtctatctgtaggggcatgcagattgaaaatgggcttgtagcagccctgacagtgaatgctgcaaagagaccttatacatgtatatcagttccttttttaaatttttttgagatggagtctcactctgtcacccaggctggagtgcagtggcgcgatctcggctcactgcaatctccgcctcctgggttcaagcgattctcgttcctcagcctcctgagtagctgggattacaggtgtgtgccaccatgcccggctaatttttgtaattttagtagggatggggtttcaccatgttggccaggctaatctcgaactcctgaccttaagtgatctgcccaccttggcctccaaaagtgctggaattacaagcgtgagccaccacacctggcctctatttcgaatattaaactttaatttaccatatcccaaatatttttccttttgttgctattatgggctgaattgtgtccctccaaaatgcatatgttgaagttctagcccccagtacctcagaatgttacctttgaggtgattaagttaaaatgaggttattaaggggggccctaatccaatatgactgatttctttataagaagaggaaatttggatataggcacgcagaaggaagaccatgtgaagacagagaagatggttgtaagagacagaaaaacccaaagtgtgtttctcctactctcatacacaccgctcaccagagagtgcttcacctctggccacaaaaatgggtggagatttctccccaccaacaacctgttctccagcagacactaactgggtgttctctaattcaagtcaatctagtgttagattttttaggttaagggctcagtgccacaagactgctctctgcttcagatgccaattccaagtggtaagttgtcagctatacttctgaccaactggctataaatcaggggttcccatgccaccctccttgggttcaactctgtgagtggctcacagaactcagggaaactttagttatatttacccatttattataaagggtagagacaaacaccagatgaagagatgcatagggagaggtatggaaggaggggtgcagagctcccatgccctctccaggcaccacaccctccaggcaccttcacatgttccacagtctggaagctctcgaaaccctatcctcttgggtttttatgaaggcttcatgattgatcgcatctttggccatgtgatcaactcaaccatcagccccactccccattccccagaggtcaaatagtgggattgaaagtttcaaccctcagctgggcacagcagctcacgcctataatcccagcacttttggaggccaaggcgggtggatcacttgaggtcaggagttcgagaccagcctgaccaacatgatgaaacccatctctattaaaaatacaaaaatttgccaggtgtggtggtgggcaactgtagtcccagctatttggaaggctgaggcaggagaattgcttcaacccagaaggtggaggctgcagtgagccgagattgcctcactgcaccactccagcctgggcgacagagcaagactcagtgtcaaaaaaaaaaaaaaaaaaagaaagaaagaaaaaaagttccaaccatctgataacaaaagatgcttctatcacccaggaaattccaagggatttccatgtcagttgttcctctcactcaggaagttataaaggtcttaggatctctgcgtgaggaactgggtggaagaccaaatattagaacagaagttctcctagcatccctattgtcaagagttttaggagctctgtctcagaaatggggtatagagaccaaatatatatttctttacaatatcacaagaatcatctacaagccaaagaaagaggctatagaagaaaccaaccctgctgacactttaatctcagccttccagcctccagaactgtgagcaaataaatttatgttgtttaagccaccatctgtagtacttcttgtttttttttttttttagagacaggttcttgctctgttgcctaggctggagtgcagtagcacaatcatagctcactgcagcctccaacatcttggtgcaagcgatcctcccacttcagcctcctgagtagctgtgactacaggcatgtgccaccatgcctggctaattttttttatttttgtagaaacaggatctgactatgttgtccaggctggtcccaactcctgagctcaagcaatccttctgcctcagtctcccaaagtgctgggattacaagtgtgagccaccatgcctggcctgtggttctttgttatggtggttctaggaagctagtatagttgccttatttttctcataaatttagtttttagataccaaagtttaaaaattaaacctaggcctggcacagtggctcacacttgtaatcccagcactttgggaggccgaaggaggcaaatcacttgagtccaggagtttgagaccagcctggtcaacatggcgaaaccccaactctactaaaaatacaaaaaatttgccaggcatggtggtgcacacctgtaatctcagctatttaggaggctgaggcatgagaatcacttgaacccaggaggttgaggctgcagtgagccgagattgcgccactgcactccagcctgggcaacagagcgagacttcgtctcaaacagaaaaacgaaaaaaaggcctgggcgcagtggctcacacctgtaatcccagcactttgggaggctgaggtgggcggatcaactgaggtcgggagtttgagaccagcctgaccaacatggagaaacctcatctctactaaaaatacaaaaattagctgggcatggtggcgcatgcctgtaatcccagctattctggaggctgaggcaggagaattgcttgaacccaggaggtggaggttgcagtgagctgagatggcaccattgcactccagcctgggcaacaagaacgaaactctgtctcaaaaaacaaaaacgtaccaattaaacctagccatattgttgctgctaataattttatgaccttaataaaatcttcccttccttcttttgtatttaaaaataattaactgttaagcaaatgcgggatttattttggggtgaaatatgtatacaagttaaattatttgctgctggccaggtgtggtggctcacacctgtaatctcagcgctttgggaggatgaggcgggaagatcacttgaggtcaggagtttgagaccagcctgaccaacatggtgaaaccctgtctctactaaaaatacaaaaattacccgagcgtggtggtgcatgcctgtaatcccagctacttgggaggctgaggcaggagaatcacttgaacccaggaggcagaggtttcagtgacccgagatcgtgccattgcactccagcctgggcaatgagagcaaaattccatctaaaaaaaaaaaaagtgctgcaaagcagttgtcccaatagcatttatttaagtggggcgggggcgggggggtgggggcggggggagattcttattggttcgtaatttatcaagttagaccttttatgaaattccccccatgacctttgaccttctgtttttaacctggtaccaaacagcttttatcatcgtctcgtggtgtttatgttttgaagtccaatagggtgagttgtctatgattgtttccttcttttcccaaaaatattctttggagttcttacctactgattttttttttccagatgaattttgctgtcacttaagtttgacaaaatgttccctttgaaatttcaaatttttgaaatgaagtatgagatctaaaaaaaaaaagaaacctgtgtattggctcagcattacccttattcctctcagccaagtgcaagggatcacttactcaaatctttattcatcccactagagtttaatgacttccttgaatggctgttcaatgttcagtgacaggtctggcttttgttgtgaggccatctatggagtctctgggacccttccagtccctggaatcagtttggtctgagaggtcaggacttggaaacatactggaggcagggcaagggcaccctgctcttgttttggcatctacctcttttccgctggtccttcttatccatccaactagtccttttccctgagccaggtccatactttcccaccccaaacccttcctcttgtttcctggctctctgtttctggctacattcatttcctacactcctgtatcaaaagtaccacaattgcttctcgttcccacagtgcagtgcggctgagcgcctcagagcccgcggggacgctgcggggggattgcggggagggggcgttgggaggtgccgatgttgggctgggcggatgagcgcatctgcgtggtgagccttccaacgtgcgcgagaaggacgtggaagaccttttctacaagtacggccggatccgcaagatcaagcttaagaatgggcactgccttgtgcccttcgccttggtgcgctttgaggacccccgagatgcagaggatgctatttatggaagaaatagttatgattatggccagtgtcggcttcgtgtggagttctccaggacttacgaagtcggggtgggtggccccgtggtgggaggaatgggccttctgcaagaagatctgatttccgagttcttgtttcaggacttcctcaggcagctggcaggacctgaaggatcacatgcgagaagttggggatgtctgttatgccgatgtgcagaaggacggtgtggggatggttgagtatctcagaaaagaagacatggaatatgccctgcataaattggatgacactaaattccactctcatgatagtgaaacttcctacatctgagtttatcctgagagaagcaccagctatggctactcacagtctcggtttgggtcaaggggccgtgactctccatactaaagccggggttccccacaccacttctctcctttcaggccctactgagacaggtgatgggaattttttctttattttttaggttaactgagctgctttgtgctcagaatctgcattccagattgaggatttagcgtcttaggaaattattttaattttttttttttaaagaagaaaaaaaaactacatactttctaccagggccatattagcagtgaaacattttaaactgcagaaattgtggttttggttcagaaacaagttgtatatttttcactcctgaatatgggtaaaaaatcagttccgtctttgtgggttgctctgctatggagatcaacagttactgtgactgagttggcccattctgcttaaaaatatgttttaaacgtttaagaaaaatgctcatcatcactggccatcagagaaatgcaaatcaaaaccacaatgaggtaccatctcacaccagttagaatggcaatcattaaaagtcaggaaacaacaggtgctggagaggatgtggagaaatagaaacatttttacactgttggtgggagtgtaaactagttcacccattgtggaagacagtgtggcgattcctcaaggatctagaactagaaataccatttgacccagtgatcccgttattgggtatatacccaaaggattgtaaatcattctactataaagacacatgcacacgtatgtttattgcagcactgttcacaatagcaaagacttggaaccaacccaaatgtccatcagtgatagactggattaagaacatgtggcatggctgggtgcggtggctcatgcctgtaatcccagcgtggctcatgcctgtaatcccagcactttgggaggccaagacgggtagatcacgaggtcaggagatcgagaccatcctggctaacacggtgaaaccccgtctctactaaaaatacaaacaattagctgggcgtggtggtggcgggtacctgtagtcccagctactcggtaggctgaggcaggagaatggcatgaacccaggaggtggagcttgcagtgagccgagattgcgccactgcactccagcctgggcgacagagcgagactccatctcacaaaaaaaaaaaaaaaaaaaaaaaaaaagaagaagaaaatgtggcacatatacaccatggaatactatgcaaccataaaaaaggatgagttcgtgtcctttgtagggacatggatgaagctggaaaccatcattctgagcaaactactgcaaggacagaaaaccaaacactgcaggttctcactcataggtgggaattgaacaatgagaacacttgaacacggggtggggaacatcacacactggggcctgttgtggcgttgggggaggagggagggatagcattaggaggaatacctaatgtaaatgacgaattaatgggtgcagcacaccaacatggcacatgtatacatatgtaacaaagctgcacgttgtgcacatgtaccctagaacttaaaagtataattaaaaaaaaaaagtttagtaattgaaaaaaaaaagtacaacaattgggttggttggaacagcagaaatgaattgtctcacagctctggaggccaaaagtctgaactcaaggtgtcggcaggaccatgctccctctgaaacccatagggaaatccttctttgccccttctagcttctggttgtttgctggcagtctctggcattccctggcttgtagacgcatctttccaatcgtctgccttcacatggtagtctccctgtgtctgtctctttaagtggctgtcttttgttttttgtgtttttttaatttcaatttaatctattttttgtagacacattgtttcaccatgttgccaggctggtctcgaactccagggctcaagtgatcctcccgtctcagcttcccaaagtgctgggattacaggcgtgagccgccacacccagcccacatggctgtcttcttatgggaaaccagacatgggattagagacccactctattagagtaggattgcatttaactaattacatctgcaacaactctatttccaaataaggttacattctgaggtactaggggttaagacttaaatatatcctttttaggaaggacacagttcaacccacaatattagctggccacatgtttcccctgatctgtactttacttgttccccctggctctggtccctcctcgggtcaggtcctgcctgagcctcccctggccatgtcccttctttgtgcctggaccctcctgattaataccccatccccacccttgtgccctcagctgacttcttgtacctcccaccaggcatgatgacctgaaggagatgctggacaccaacaaggattctctcaagctggaggccatgaagaggattgtggcggtaagaggggaaggaggaggcctccctccgggcggggcctgggtggccaagagcagctctccttagctccttgtagaccttccctctagttagtgctgtgcctctcgctttgtccctcttcccctaccttgaccccaccacccagatgattgcccgaggaaagaatgcttcagacctgtttcccgcggtggtgaagaacgtggcctgtaagaacatagaggtgagcactacctggtgagggattgcttgtccccacctcccccaggaccacactcaagcttggggtgaggaaggaaatgatttagcccctgggggcccgacctgctgagaaatgtctctgagccaggagaagacactgtctccatgtccctgaactggatgtggatcaaggtaaaggacccggatacactcaggggtgctctcccccactgggagagtttgtccccatggaccgcagctggctggggagatgacatcccaggggtaggggggtgggcacaggtgcctgctgagaagcgttctgctgagaaacgtgctctccccaaggtgaagaagcttgtctatgtgtacctggtacgctacgctgaggagcagcaagacctggccctgctgtccatctccaccttccaacgtggcctaaaggtcaggggtctcagtttgcctcccagggcctgggcctcgttggcgctgtatcggaggagtaggcctggggagaggccatgagcatgggagcgggctctgcagaccccttcctacctgcctaaaattgggagggtcacagtcagaagaggccagccagaccctcagagagtggaagctgggctcagaaggggcgtaagagatgaagtgggtacccagggcccctgtctctcttcccaggagcctgtggtaatggctgcttctagtatgaaccacttgagcccccggagagtggagagtctctagcaatggagaacccctcaaccctcacccccctttgtgtaaaggtgtgaattgtggtccacagccaggtagatttcaacctttagcagtggcctgaatcccccacaccattctcaccttttgtttcattttgcccaaggcctctagttggatttacatatgttaggtgcatgtataagtctcccccctaagggcttttctggttagtctaagacatcttgagggtaaagacagccatttcaaggccattctctccatattggatttttcagctctgattacaaccattaactcctctatttttgcatacctttatttatttatttatttatgagacaggttctcactgtgttgcccaggctggagtgcagtggtgcaatcatggctcactggagcctcgacttccctgagctcaggtgattctcccacctctgtctcctgagtagctgcgactactcagcctgcatcaccatgctcggctaatttttttgtagtttttgtagagatggggtttcaccctgttgcctatgctggtcttggactcctgggctcaagtggcctcagcttcccaaagtgctgggattacagggatgagctaatactcctagcctggatacttttagttcaaatttctgtgagagagattgtgaaaggtccagctcatcttttcatatccagaagttctgtaggttgctgggtagacaggattgctgctcaaatccagggcccaccccttgtccaatctgctatggccagcaagaggggttgacagtcggcttctttggggtgagagtagaaagcatggtcacttgaatatacaattcattcatttagtaaatacttgggtgtctctatgccacacattgtgctagatttctttttataagtcaaaaccatggaatccgtcttagattggcaagtaatcttttggtttgagtaagggttaagtataaaaactaatctgaaattgttgtacagattttcacctatagtctctaccaactgaccctgtcccccttttagaaaaccagagctcatttagttcaactcaatgtgataatttctttctgcaaagtgccaaatagtattttaggttttgtaggccttatagtctcaactatgcaactactcaattttgcccttatggtgcaaatgcagccattgacaagtgggcgtggccgtgttccaataaatctatataaaaaacaggcaatagacagattttatccaagggctgtagcatgccagcctttgctctagaacatgtctaacaggtcatcttttctgatagggacctcactccttcataaggcaacttgctccatctcaagacaactaccactatttggggtgttttttaaaccattctcttttgttgaaacctccacaactataatttttaaaaattgatttcaggctgggtgtggtggctcatgcctgtaatcccagcactttgggaggccgaagcaggcaaatcacaaggtcaggagttcaagaccagcctggccaacatggtgaaactccatctctactaaaaatacaaaaaattagcttggcatggtggcgggtgcccataatcccagctactcaggaggctgacgcaggagaatggcttgaacccgggaggcagaggttgcaatgagccgagaacgtgccactgcagtccagcccaggcgacagtgtgagatccatctcaaaaaaaaaaaaaattgatttcaggctgtactgcattatgactgcacctgtgaatagccactgtactccagcctgggcaacatagggagaccctgtatctaaaaaataaaataaaatttactacaggttcacaaaaggcataaagaataatataatgaatatccataagaaatgacacatttctcaaatagccaaagcctcctatatatcttctcttgtttatcattcataggtatgtatttattcctgtgctagtaatttgcatattgttaagcaatataaaatgttttgtaaatggtgtcatcgtactacatatgtattcctttaaaacttgttttcttttttgttgtcactggcttttggtctctcctgcatgttggaaccaatcatttcaatccagccttctcccttctttcaatcctagcccaggctagggccgtgttcactttcttaggagatccctcatggaatcaaacctctgactggcaagcagataatccaggtctccctacatcctgtctttgtacagttggtcccttgaaccccctatgaaaccctactctatttcattttatcagtttagcacagggtccaaaccagggtgattctgaatcttaattatgtccctcctgattttgtgtcttctttcaagatactgataagctatttggaccagggcaaaagactgaggcatagcatgtttccaggttgacactgatctgttaataaaccttctccaagtatatttcaccacgttgtagacccacctgactgtacagacagctggcatttttctatcttgttaggaaggatcttattcaatagcaataaataaataaataaataacacctttcatgtgcaaagggttgtgggtgacacagagataaaacagatgtgaattctgctcttaaaaatgcttggctattaggtgaaacaaaaggcctacctaaaaaatagcaatgcaggaaatgctatgagacttccacaaacatatcactgaaatcaagatactaatatccaccggcctagttaccccatcaaaaaggaaaacacattttttttgataactttctgtgaatctataatcatttcccaaataaaatgctcacacacaaaaaaggaaaacaggtttaagcagatgatgtgactatttgtctctaagaaaacagagactccttccttttcaataaatgtttctaacccatctgtttaaaagtcaattccagaattttgtcaggaattagcatcaattttacctgcaattgtgaggatcttgtcttgtctttttccatttcagaaagtcagggtaatatctacccttctttagtgttctattcccgtcattctctaagagtaatagtacaggcacacctcattgtattgcactttgcagatattgccagatattgcactttttacaaattgagggtttgtggcaaccctacatcaatcaagtctatcagtgccatttttccaacagtatgtgctcacattgtgcctctgtcacattctggtaattctcacaatattccaaactttttaatgattattatatgttatggtgatcagtgatctttgatgttactattgtaattgttttggggtgccacaaaccatgctcagacatgaaagtgaaattaatcaataaatgttgtgtgtgttctgactgttcccccatctccttcaccttgggcctcttcattccctgagacacaacaatattgaaattagatcaattaataaccctacaatggcctctaagtgttcaagtgaaaggaggaaccacacatctctcactttaaatcaaaagctagaaatggttaggcttagtgaggaaggtatgttaaaagctgtgataggctgaaagctaggccacttgctccaaacatttagccaagttgtgaatgcaaagtaaaagttcttgaaggaaattaaaagtgctactccaggctgggcgtggtggctcacacctgtaatcccagcactttgggaggccgaggcaggaggatcacttgagaccaggggttcaagaccgtctctataaaaaatttttttaagttagcctgatgtggtggtacgcacctgtagtcttagctacttgggaggctgaggtgggaggatcacttgaacccagaagtttgaggtgcttctccagtaaacacatgaatgataaagaaagcaagacaggattattgctgatataggaaaatttaagtggtctggatagacgatcaaaccagctaccacattcccttaagccaaagcctaattcataggcaggtcttaaatctctccaattctatgatggctgagagaggtgaggaagctacagaagaaaagacggaagctagtggaggttggttcatgaagtttaagtacagaagccatctccataacaaaaaaatgcaaggtgaagcaaaagtgctgatggagaagctgcagcaagttgtccagaagatctagctaagatcattgatagatgtgactatgttcaacaagagatgctcaatgtaaatgaaacagcctcttactggaagaagatgccatctagcactttcctacctagagagaagtcaatgcctggctttaaaaaacaggctggctcttgttaggggccaatgcagctagtgactttaagttgaggccagtgctcaatgaccattctgaaaatcctggggtccttaagaattatggcagatctcctctgcctgtgctctataaatggaacaacagtgccatgacagcacatctgtttgcagttatggtttactgaattttttaagcccactgttgatacctaccgcttaaagattcctttcataatattactgctcattgacaatgcatttgttcactcaagagctctgatggagaggtacaaggagattaatgatttcatgcctgctaacacaaaatcagttctgcagcctatggatcaatgagtaattttgacttttaagtcttattatttaagaaatacatctcgtaaggctagagctgccatagatagtgattcctctcatggatctggacaaagtaaattgaaaaccttctggaaaggtttatagaaaccttctggaaaggtttaccattatagatgccattaggaacattcatgattcatgggaggaggtcaaaatattaacattaacaggagtttggaagaagttgattctaaactccatggatgactttgaggggttcactacttcagtggaggaagtaactacatatgtggtggaattctacctagaagtagaagtagaattaaaagtggagcctgaagatgtgactgaattgctgcaatctcatgataaaacttgaatggatgaggacttgcttcttatgagtgaacaaagaaagtcctttcttaaaatggaatctgccgggtgcagtggctcacgcctgtaatcccagcattttgggtggccgaggtgggtggatcacgaggtcaggagatcgagaccatcctggctaacacagtgaaaccccgtctctactaaaaacagaaaaattagccaggcatggtggcgggcacctgtagtcccagctactcgggaggctgaggcaggagaatggcgtgaacctgggaggtggagcttgcagtgacccgagatctcgccactgcattccagcctgggcgacagagcgagactccgttacaaaaaaaaaaaaaaaaaaaaaaaaaaaaactcctggtgcagatgctgtgaacattgttgaaatgacaacaaaggatttagaatattacataaacttagttgataaagcagaggcagagtttaagaggactgacttcaattttttttttttttgtagagactggggtctccctatgttgcccaggctggtcttgaactcctaggctcaagcaatcctcctacctcagcctcccaaagtgttgggattacaggcacaagccatcacgcccagcctacattgtttttttaaagacataatgctattgcatgcttagtagactacagtatattgtaaacataactttttttttttttttggagataggatctcactctgttgctcagtctggagtgcagtggcatgaacatatgtagctcacttcagcctccaactccctgggctcaagtgattctcccacttcagcttcccaagcagctgtaactataagcataacttgtatgcaccaggaaacaaaaaatttatgtgactcgttttagtgcgatatttgctttattgttgaggtctagaatcaaacccacaatatctccgaggtatgcctgtaatatatagctgctgctgctgatagtgggaagacagtcctaagccccatgatcacaatacagtgtaaggaatgcttttatacgttctgtataggatgcagtaggaataaagaagaagggcttggggccgggcgtggtggctcacgtctgtaatcccagtactttgggaggccgaggtgggcggatcacttgcggccaggagttcgagaccagcctggccaacacggcgaaacctaatctctactaaaaatacaaaaaattagctgggtgtggtggtgcgcgcctgtagtcccagctacttgggaggctgaggcaggagaatcgcttgaacccaggaggtggaggttgcagtgagccgagattgcaccaccgcactccagcctggcgacagagcgagactccatctcaaaaaaaaaaaaaaaaaaaaaaaggaagggcctacacccctattttgttttaaacactgtggaagaacagcagcttttgcaatgatttctgggagaaaggagtgtaaggttgaactccggaagggagaccagcttgcatctgctgggcggtcacctcaggcattaaaacaggcacctccaaaaaaacccttacaaggaacaggaagtgtttcaggtgtttcagcaattttaggtgttctgaaagtttttcagtgtttctggaagtgaagctacccattgcaacacctgttcaggtgtcagatttctgcaaccagagccaaaattaagtgtcccccagatacccatcactggcacaccatccaggctccagtcaagcggcagggaagcaagagctagtggtcgctggggacagtgacttccaaaggtgtggcctccccccatcagggcacctggtgccctttcatagctctgcctccacctctgcctttaggatcccaaccagctgattcgtgccagtgccctccgtgtcctctctagcatccgtgtgcccatcatagtgcccatcatgatgctagctatcaaggaagccgcctcggacatgtcaccctatgtgcggaaaacagctgcccacgccatccctaaactctacaggtatgccccagccctgtcccacgctccccaggaggctggttcctaagttctcaacccacccctggcctttcctaagtcttgcctgctgcttctcagagggtttgaggagggtagtttgggggactgacagagatggaggagaacaataaggctggggtgcaggaggtgagcatggcttggacagatattgggaaggctggggctgagagtggcaaattcccctcaccgatttctccctcagtttggactctgaccagaaggatcagctgatagaagtcattgagaagcttctggctgacaagaccacggtgcgtgtataggggcgctccgggaggggtggtgaccggcagccggccttccacccttcgcgttcaccctctcgtctttgttctttccccagctggtggcgggcagtgtggtgatggcctttgaggaggtctgcccggagcgcatcgacctgattcacaaaaactaccggaaactctgtaacctgctgatcgacgtggaggagtggggccaggtggtcatcatcagcatgctcacccgctacgcccgcacgcagttcctgagccccacccagaacgtaagtgggcccagcccaggcagagcgggccgaagtgtgtcccggggaggcgcccacagacccgtcggtctccccgtccaggaatccctactagaggagaacgcggaaaaagccttctacggctcagaggaggacgaggccaagggcgcggggtctgaggagacggccgccgcggccgccccctcccgaaagccctatgtcatggaccccgaccaccggctgctgctgcgcaacaccaaacccctgctgcagagccgcagcgccgcggtggtgatggcggtggcgcagctctacttccacctggcgcccaaggcggaagtgggcgtcatcgccaaggcgctggtgcgcctgctgcgcagccacaggtgcgctccgcccccagccccgccccctccctcgcctcctgccccgccccacgggctgcccggctccgccccctcacgcccaccagccgcttccacctctgcccacccgctccacactgaccgtagtcctgccctccgcactggtcctctccccgcaacgacttgccccaccttttcccctcatccgctgacccttgccccaaccgaggggcccggggtgctctgacccgtcctctccgcagtgaggtgcagtacgttgtgctccagaacgtggccaccatgtccatcaagcgccgggtgagcctgcgacggcgggctgtcctcgctgtccgagggccgcttctgcgggcactggaggcgttgtcggggctgggaccggggccggggaaagggaagatggaggaataccctggctgtgcagaggatggggcaggggaggctccaaatacagatagggagcagggcctggatcctgaggggccgctgaggggatgtccagtggaaaaagagctagtcagatctgagatggacgagggaagacttgaggagtggagggcagtggtgaggaggcaaggatcctgggcgctgggtcaggataggaggggtgtctctgggcagcgaggcaggcctggggcttcggtggagctccctagctgcctctcttgtgccagggtatgtttgagccctacctgaagagcttctacatcaggtccaccgaccccacccagattaagatcctgaaggtgagtgagggacagaagtgcatgtgcttcccagccctccccaccccatgtacccactcaaataactcacagtggcccccctggtgcctgcctattcctggggctgagcccaggagcccatgactgccccagctggagctgtttgttcagggagctgggctaaggagggtcagggggagaagggaactgctctttgcctagtacctggtatacacctgctactcttcataaatgaagtaacctgatatcacctcataataatcccaggatgtgtacattatattccttttataaaaatatagactctggccaggcacagtggctcacgcctaatcccagcactttgggaggccgagacaggcagatcgcctgaggtcaggagttcaagaccagcctggccaacatagcaaaacctcgtctcaacgaaaaatacaaaaattagccaggcgtggtggcaggtgcctgtaatcccagctactcgagaggctgaggctagagaattgcctgaacctgggagacagaggttgcagtgagctgagattgtgccattgcactccagcctgggtgacaagagcgaaactccatctcaatctaagaaaaagaaaaaaagactctgggaggtaactgccccaggtcacataattctgctgactccaaggttcacacttttctctcccacccacagtgttatggcccccacacacctgccccctcaggctctcctgcaaacattcacggacaaggaaagtggcgggagcccatacctccatttgattcctgctctgctgcctcattattgagtgatttccttcagcaacagttaatcttcctaacccttgtgaacatccactatgttctaggggtacatgatgagcaaactaatcagggaccctgcctttgtggagcttacagatgtggggaggaggagacattaagcagttaatcacaaggcaaatgtaaaagtccacttacaaaatatggaagaaagtgtggagagctataagggcataaaatagggagacctcatctagtctggtgccagggaagttttcccggaggatatgagacttgagctgaagcctgagagatgaacatgaattatgcagggacagaaatgggaagaactgctccacgcagaggaaacagcatctgcgaagaccctgggttaggaagtggagtgggattggggcctggaagacaagggggacagtgatgggagatgggaggtagacagcaagcagatcattcagggacttacagaccatggtgaatacgatggtctccatcctgaaagcaataggaagctttaagttttcaatgcagtagggaggtgacatggtcatactgtaagcatactgtgtagggaatccacttaagaggcaaactggtcctcttgctttttagacaagtttcataacctgtcaattccctcatcagtgtgaggatgatgcagggctgtcatgaggattgttttctggtctatgaagtgtatttggaatgaaagcacagaaagtccactggccaacccacccattttctgcctctccaaccctccctgcagctggaagtgctgaccaacctggccaatgagaccaacattcctactgtcctacgggaattccaggtacaggccagctcccagccagaagggcctgggagaggggcccatcagatccttgtgccctggtgggtaaacctcctcttatgagcccaaggctggagaaactattatcttacattcccgttccaatgtgtttggctggctttgggccaaggaatcactggattgggggtggagttgtcaccccctttcccaagtcttagtcaccggcatgataagccataaaatgaaaggccacagccttcttgaaggtcaccctcaagcctgcagagtcactgagggatttctttgtcatatcccacagacctatattcgcagcatggacaaggactttgtggcagccacaatccaggccattggacgctgtgcaactaacatcggccgagtccgtgacacctgcctcaatggcctggtgcagctgctgtccaaccgtgatggtcagtgtttccctgagtgtctaaccgtgatgatcagagggtgtctgcctgcaggtctgactctgctggccactggatatccaccagtctgcctagacacaatgtgtatccattggtctgtctgtcttgatcagggcccaagtgttcctacacctctgagggctgctagagaactgaagggggttgagagaaagagccaagggcctggggcactgcaggtgtgtctgtccacctgagtgtggccatctgactgtcttggggtccacacactcatttttgttctgtagagcttgtggttgcagagtcagtggtcgtcattaagaaattgctacagatgcagccagcacaacatggagagatcatcaaacacttggcaaagcttacagacaacatccaggtgagggagaagccatattttcactccccacttcaaggtcctccccatgatttcaagactgtataattacatatgctagccttatcaaaagtaacttccaaaccttaggtcttcaggtggaaggagcagagacactggaccatgtgaccctgaccttgttacccctgatttgctttccctttggagaccctcaatgagcacgatggactttactactactcttgttttctctctaaagctctagccaaccatggttgagtgacaaatcttgtgtttttctatcgcactgctaagctgaaacatctaaacaaggcattcccaaagattctggagagtaacatggaaataaagtactgagggtacaatgaatccagaaaatcaatcttttacatcatgactgacttagggtcttgaaagctctatgctaatgaagccctagggaagaggggaaatgctgtctaggaaatgtctaccttttaacctctctctatctcaccacccccaactcccatttccagagaacccataatacaacaggccagcacagatgaggagtgctgtttccctggaagtccacaatcctacccacccactttcccgtatttacccatcttcactcctctcccacaaccacaggtgcccatggcccgagccagcatcctgtggctcatcggagagtactgtgagcatgtccccaggattgcacctgatgtcttaagaaaaatggccaagtcattcacagcagaggaggatattgtcaagctgcaggtcatcaacctggcagccaagctctacctgaccaactctaaacaggtaaagattaagagatgaccccccagatactctggtccccagaaactccctagacagtattcttttggccctccctaggcagggctgaactctagctcctattttggaaaagaagaatcagggaaggtggctggtctgcccacataaccaatgctaccccagtgcccacaaagaccttgtagtgctggtggtcactgttgaagagactctcctatgaagctgtgacctccagtctgctagtacaagagtcctgtctgccaccttggaactctggggctgtgaagaaccacagttgattgggataagggaagggcccaacagtggcaggtactgatgggagaacatgcatcccagatgtggtctgtgcttctttccaaagcttgacaatgcttggccagtctgtgccaaagataagggggtgagtctctgcttgggcttgggtggtgctggtggccactgtcattcccaaggtgaaaggttataagagatacacagccaaggatgaggctcaactaagttgtagtatcagggtgttcagagcctcctagctgtctggcatctcctgagatggttccaggagattctcctaaaatgaagcataatgtgctgagcttttcaaggtgtcagggacatcaaacaccatgacgatttccacactctcccactcagttaagcaggacagggattggcaaactactgcccataggctgaatttggcctattcctgtttttgtaataaagttttgttggaacacagccctgctcattcatttacaaattacctatggctgcttttgtgctacaacagcagggttaactagttgcaacagactgtattgcccacaaagcctagaatagttattctctggcccttttataaaaagactctgccaatccttgaagcaaaacctctggctaggtggctggggtctacagatttatagcagggatatcccctggagactgtagcatccctgccatgtccactgtgcgtgggagtctttggatggtggcacttatctttttcagtggcttctttgatccattgtggccagagtgagccccagaggctcaaggtgaggtaggcagggccaccaagtgctgtgactgtaatcaggagtcaaaggacagcagcaacatgtggaggcaactgagtctgtataattaaatatgctagccttatcaaaagtaacttccaaaccttaggtcttcaggtggaaggaggagagacactggaccatgtgaccctgagcttgttatcagtgttgtgggcaaagcagattggagagagagaagttagagggggagagagagaagttagagggagaaagagcaccatggggaagcgttcaatcgttgaaaaaatatttgtatacttcctttgttcaggtgggaggaaggagcaagtgggaggaatgtttgaaaagatgaagcagcctgggtggggagccacccaggtaggtgggagtcttgacatgctcagcaatgagccagagtcctaaaccccaggatggtgaggttggcatgttttcataagcctgggcctgtccacatgtcatttcccccaagttgtcactgtgagctacatgtgcatttgttcatttatttaacatatatgtaggtgggagtctgacatgctcagcactgagccagagtcctaaaccccaggatggtgaggttggcatgttttcataagcctgggcctgtccacatgtcatttcccccaagttgttactgtgagctacatgtgcatttgttcatttatttaacatgtaggcctactatttgcctggtactgtgctgcgtcctgaggatatgacaatgagtgagacacatttacaggtctccagatactcacagccaagtaggagaaacaggacaaaaataaacattttaaacacagcagtaacagctgtcatcagggttggcacagcgagctgtgggtatatacagctgaaccctcccctaggaatgacccctgtcagggaacccagagtaggctgttcaggcaaatggacactcacctccagggcgcccttcacctgcaagtgagtttttgcaggccccttagaatggttatttgattcaataaagatttttgtcctccctttctttctcctttcttcccagcctcttctgggagtggtaaagaagggggagtccttggggtactaggagggaggtggtttggatgcgcacatgaccatgcttgcaaaacagtagtgatgcttcccatcctgggaccatgagtggcaatctgcccagctaaaaggccacagtaatctcagtcattctctccaatttggacatgggcccacggcatgccagatcctggcccaggatgaggccaaggaaatgaccaagatgaggcctctgccctgctattgatcagcagataatcagatactagaccagaggccacaaaggcataacatgcaggtggcgggggatgggggggttggtaatcaaagtggctattacatccacctggatatagaccctggggaaactgcctagcaggttagtttgcttttatgtgtcaggtgagatgtgtggcaggagggtctgccaggggcacagtgggatctacaaccctcccatgtgaccgcctttacagtgaatagaagattctgacaaattttgcagaattgcttttaaaaacgtaaactttttttaatatgctaaaggtaatacatgcttatcatagaacatttggaaaactcagaaaattataagtttaaactattaataagtccaccatttagaagaccaccattaattatatatttccttattttttattcctatatatagtcattcagaagttgtacttttgtctattgtccaatattttaaacttttctgcttcttttcaatgctttcatatttaatacttttttttccccattcacatttcaattaaacttttcacttagaattttctccaggctgggttcagtggctcacacctgtaatcccagcactttgggagcccaaggtgggtgggtcatttgaggtcatgaattcaagaccagcctgaccaacatggcaaaaccctgtctctactaaaagtacaaaaaaattagctgggtgtggtggtgcgctgaaatctcagctacttgggaggctgtggcaggagaattgcttgaacccaggaggtggaggttacagtgagctgagatggtaccaccacactccagcctgggccacagagcaagatccatctcaaaaataaataaaaattaaaaagaatttcctccaaatttttttctactttcacatttttaaatcaattgtattagttttctgctacataataaattactataaatttggtggcttcaaacaacacacgtttattttctcagtgtctatgggtcgagaattcaggtatggcttagttggatcttatgcaaggctacaactgaggtgtcagccaaggctgagtttttatctggaggctgtactggggaaaggtccacttccaagtcacatggtgccacgatccacttccttgcagttgtaggattgtggccctggcttcttgctggctgtcagctgggggctgcccttgccttctagaggccgtccttagctcattgccataggggcctcccaacacggatgcttaatttctccaaagccacaagggagaaagtctctagagccagtctgctagcaagaccgtcttctttttattttttaatttttatgggtacatagtaggtgtatatatttatggggtatgtgagatattttgatacaggcatataatgcataacaatcacatcagggaatggggtatccatcctctcaagcatttatcttttgtgttacaaacaatcaaattacactctcttagttatttataaatgtataataaattattgttgactgtagtcaccctgttgtgctgtcaaatactagatcttacacattctatctaactataattttgtacccattaactatccccacttcccccacccactacccttctcagcctctggtaaccattattctactctccaactccatgagctcaattcttttaatttttagccctcacaaataagtgagaacatgtgaagtttgtttttctgtgcttggcttatttcacttaaaataatgacctctagttctatccatgttgttgcaaatgacaggatctcattcttttttattctttttttatagtactgcattgtgcatatgtaccgtattttctttatctatttgtctgttgatagacacttaagttgctttcaaatcttggctatggtgaacagtgctgcaataaacgtaggtgtgcagatataacttcaatatgttgatttccttacttttgggtatatacatagcattgggattgctggatcatatggtagcactatttttagtttttgtttgtttgtttgagatggagtcttgcactgtcacccaggctggagtgcaatggcatgatctcagctcactgcaacctccgcctcccaggttcaaacgattctcctgcctcagcctcctgagtagctgggattacaggcgcccgccaccaagtctggctaattttcatatttttagtagagatggggtttcaccatgttggccaggctggtcttgaactcctggccgcaagtgatctgcccgactcggcctcccaaagtgctgggattacaggcgtgagccactgcacctggcctatttgtagtgtttttttttgagatggtgtttcactcttttttcccaggctggagtgcaatggcgtgatcttgcctcactgcaacctctgcctcctgggtgcaagtgattcttcttctgcctcagcctcccaagtagctgagattacaggtgcctgccaccacgcctagctaattttttgtatttttagtagagacagggtttcaccatgttggccaggatggtcttgatctcttgacctcgcgatccacccacctcggcctcccaaagtgctgggattacaggtgtgagccaccgtgcccggcctatgtttagttttttaaggaacctccaaactgttctccagacatttccactaacagtgtacaagggttgccttttctccatgttcttgtcagcatttgttattgcctatcttttggatataagcctacttggggtgagatgatatatctttttttgttttgttttgttttttgagacggagtcttgctctgtcacccaggctggagtgtgcagtggtgcgatcttggctcactgcaacctctgcctctgtggttcaagtgattctcctgcctcagcctcctgagtagctgggactacaggcgtgcgtcaccacgccccgttaatttctgtacttttagtaaagatggggtttcgctgtgttggtcaggctggtctcaactcctgatctcaggtgatccgcctgcctcagcctcccaaagtactgggattacaggcatgagccacccgtgcctggcctttcattgtagttttgatttgcatttctctgatgctcaatgatgttgatcaccttttcatatacgtgtttgctatctgtatgtcttcttttgagaaatgtctattcagctcttttgcccatttttaaattggattattgaatttttttttcctattgagttatttgatctccttacgtattctggttattaatcccttgtcagatgggtagtttgcaaattttttcctcctattctgtggcttgtctctttgttgattcctttgctgtgcagaacctttgtaacttgatgtgatcccatttgtctacttttgctttggttgcccgtgcttgtggggtatcactcaagaaatctttgcccagtacaatgtcctggagaatttctctaatgttttcttttattagtttcatagtttgaagtgttagatttaagtttttaatccactatgatttgatttttgcatatggtgagagataggggtctggttttattgttctgcatgtggatatcccgttttcccagcgccatttattgaagagactctcctttccctaatgtatgttcttgatacctttgtcaaaaatgaattcacggccaggcgtggtggctcatgcctgtaatcccagcatcttgggaggccgaggctggtggatcacctgaagtcaggagttcaagagcagcctggccagcatggcgaaaccctgtctctactaaaaatacaaaaattagctgagcgtggtggcgggtgcctgtaatcccagctacttgggaggctgaggcaggagaattgcttgaacccgggaggcggaggttgcagtgagccaagatcgcgccactgcactccagcctaggggacaagagcgagacttcatcttcgtccccccccgccaaaaaaaaaaaagccactgatttttttttttttttttttttttggagacggagttttgctcttgttgcccaggctggagtgcaatgggtttttttttttttttttttttgagatggagttctcactctgttgcccaggctctggactgcagtgacgcgatctccactcaccacaacctctgcctcccgggttcaagcaattctcctgcctcagcctcccgagtagctgggattacaggcatgcaccaccatgcccagctaattttgtatttttagtagagacagggtttctccatgttggtcagactggtctcgaactcctgacctcaggtattctgcctgcctcggcctcccaaagtgcttgctaggattacaggtgtgagccactgtgcctggacaatgctactgattttttttttttttgaaacggagtcttgctctgtcaccaggctggagtgcagtggcgccatcttggctcactgcaaccttcacctcccgggttcaagcggttctcctgcctcagcctcctgagtagctcggactacaggtgtgcatcaccacatccagctaatttttgtatttttagtagagacaggatttcatcatgttggccacgatggtctcaatctcttgatctcacgatctgcctgcctcggcctcccaaagtgctgggattacaggcatcagccaccgcacctggccaatgctactgatttttatgtggattttgtatcctgcgactttactgaatttattagttctaatagttttttggtggaatccttaagattttttaaatataagatcatatcatctgcaaacaaggataatttgaattcttttccaatttggataccctttatttctttctcctgtctgattgctctagatagaacttccaatacagagtcttcttaataaaacataatcataggatcatatatagtcatataccacctttgccatatcctgttggttagaagcaagtctcaggttttgcccatacccaaggtgagggattgcacaaaggcatgaacaccaggaggcagctactggtggggaagaccttagaatctgtctgccacatccatctagagcttaaacttactcatgtgtaatgtgtgaattgaggatatatttcaattttttttaacagccagttttctaagcatgattagcaggcatctgcaaggtagcatgtatgttggcataggttatggaaaggaagtcagtgtttcctgcttaaaattcctctctgacaactggagcctgttggtgagggggagccttgttctgttcttggcacactggagtgtatctcagaggccttcttgaacagcctgtaattcctgcacatcctggctagatgaggtgggggtcttggtggtgcacacaggatgccacaatccacagggaatggccccttggggtggagaagggtaatgaattattataggcaaatcctgcagtgttgaggtggtgggccagccccttcctgtgttggttgttaacatgcagttaaggctgtggacagatggatccaaataccaaacagttctttctagaactaggcaaggacttgaaggagggagtctgtgatcagccagctgggaaatctgtggaggaagacattgtccaaaccaaaagagggatcagcagcctcttgataattgactatgttggtaagggcatccactagccctggccatttagatggtgtctggccaagagaggggcaggttggtgatgaaatctgttgtgatggcatcttattttcatatttttaagtctattctattagcggtgcatgggattgggattgcttatctgtgactataacagtatcgcaggtgctgctttgctggaagggactgagctgaagagggcctgtgggccagattggaggtaggaatgtggaatcatagtggctctctagagtggtgtggggcaattctgccaaagcagctgctcagactctgggtcagcatctgaggggctttgccccttatggacatctgcttgatgtccctgccagattagctgggttaaccatgtccaaggctacacgtaacagtatgtcaccataaacctcaggaagaacagagtcagttccaggctccctcctgccggcccctgatgcccttgggcattctgcttgttgaccacttggtggttttgatcttggtcacaagtgatggaaacatggagacctgggccagggcaggctccttatgtcagcaggtaggcagtgaagggaagcagatggggtgcagctccagcagatgcaggcctaggtgcagtactgatgggctccttggcctgggaaaagccccttaatgatcctgcttcttttctgtaaaatgggggcaataatgcctacttctcagaaggcttggggagattagatgagctagtgtggagcacctagcacagagttggtgccagaaggcacttgataagtgatggctgctaccgctgttgccatgttaaggcaggttagattaggccaagatcatggcagaaatggagatattttaggtctgcagttgtagcttccctgactgcagactgtgaaccctacatgaccttggcaaatgcatgggcagctgcagtttgccctgatgtcattagaagcttccagggaaggataaagacctctgagacccctgggctgctcagaatctactaaatgggtggatagggcatgagggtggcccctgccaaagggacccctgtttatctgccctgtctttttgttgtctaattccccctgggtggtggagcctggaaactgtgaggtccagcagagcattccatacttccacataccctgctgccctagagtaaagaggctggacaggcctggagtggtagggaccacaaatctagggaagaatggagtccagagccaggagtggggaaagtccaaaaggaaaacctcttttgttggcccaaggcagttgtcaaagttgggatcatcaggaggcatgtccagagagatgagagaaaattctgagcccagaacaagggcaggtggggagggacagctgggtggaagcgccggtcctaagcagggagaggagacgttctgcctgaaagtgtcggcttaaagaatctgtttctgagcctcctgtgtccccatccccccgtcagctgacccacctcttcctgttcctccagaccaagctgctgacccagtatgtgctgagtctggccaaatatgaccagaactatgatattcgcgaccgggcgcgcttcacccggcagctcatcgtcccttccgagcagggtggggccctcagccgccatgccaagaagctcttcctggcacccaaaccagctccagtcttggagtcatccttcaaaggtgggagctgaaatcaagggtaaccttcctaggggaatggaaaggaactggccagagtctctgccccagaccttcctgaggcccctagccaggcaccaggcttctgtggacagtcctgctccctggctcactccttttgtccctcctgtggcaccaggaattactctttcaccctcccataaccactgccagcatcatctcacctgagggtctgccttcctggccaggatggacttgtgcctcctctcctctcaggctcccttttccatctccctccctgagcagacactaggctttggaatacataccaagatcttaaataccaaggacccaggaaggcagaaagcaaaacaacacacaaaggagaggtgtatatttttataaaggtcctgagaaagcagttgcctgcattctgtgagcttagtcactacagtcagtccaaatcccaggccccagggcttcagccttgcctctgttcctgggcttggcccttaaggcctcttttcccaagacaacggccttgagatgggcctgggagggaagggtcctcccgctgcttctccgggccccaggagtggaagccaggaacctacacagaagagagcctccttcacaaagctcagttcttctgggtatcttttcgttctttttctcttccctggacctcacgaatggggagattctgagggtgggcacagctttgaaattctcccaggaagaaggcaacagtccctttctccccgacaccatcctcactcacaggcctgtgctgccctcctccagcagtgcctcaactctgatccagacttctacacactcatgctctgactgttcatccctccctgctgagtccagagcctgactagacgtgcatgctgagcagacaggtcggcagcatctgtgggcccagagtctcctcctgcccacctctgtaggctgcctttccctggccctcagtccctgctctggcctggccagacagccttttcttccagcatgtgggcctaaaggtgcagtcagggtggaagagccattagggcacacatccatctccttcccctacccacctgggaagtcccaaccagaatcaccacccagccccacctggaaaacagctcccagagctttccctcactgctgctacctgcctgacctctaaacctatccctagaccgggaccacttccagctgggctcactgtcccacctgcttaatgccaaggccacaggctaccaggagctcccagactggccggaggaagccccagacccatctgtgcgcaacgtggaggtcagcggggtggagggttgaagtgtgtgtgtgtgtgtgtgtgtgtgtgtgtgtgtgtgtgtgtgtgtgtgtgtgtgtgttggtgggggcagacagtagggagccctggcagtgccggcccagccctcctaacaccctcccccacacacacaggaagaagatctctcccttattgagactcacgtgggcctgttgggcgaatacactgaggtcccaccttcgtgtgacgtgtgctctctcccctgccctgtctgtgtccctcttcttcccctgtgtgttgtgctcctgggccttcccatactctgtttccaccttggtttggcagtgctcctctgtgagcagcattccctcccctccatggacagtgcccctttcttcctcctctgttattccctttgtgggacagaccaggtagggcctcacaaagaggtggaataaagggtaagggcttgtgcctgcctgccttctccccaaccatgatgaaatgaccctgcaccctacccccatctccaggtacctgaatggaccaagtgctcaaatcgggagaagagaaaggagaaggaaaaacccttctactcggactctgagggggagtcaggccccacggagtccgcagacagtggtgagcagatggcagagctggggtcctctgtgctctgcccatgcatctgtgtgactgactatatgaggggtatatgtatatggttgtgtgtctaggggtgtgcacctgcttgtgaattgtttgtgcacctgagggattcatgttccaggtgtgtgtgcttgtgcaggtttctatccatggagtccatctgtgtttctgtcagttccagctggcatgtagggctgggggcaggtcagagaggtttgagggttcagtactgaatgtgaaggtggaacccaggtgtctgctccagacccaaggaggcctgcatatgagggaggaggcctcatattgttcctccacagaccctgagtctgagagtgaatcggacagtaagagcagcagtgagagcggctctggggagtccagcagtgagtccgacaatgaagaccaggatgaggatgaggagaaagggagaggcagtgagaggtgagaagggagctagccagatggctggtggggttcagggggctttcctggaaagagggctagcattgagctttagccagtctcctaagagcccctgagcccctcgtgagctgggtggggctgtcagctcacatgacgcctactttcgctggctgcaggagatctctgaggcctcatgggctggtgtggagaagcaaccagagtcctagagcctgagctggcacaagctggcttcaagctctcacggggtccctgctataggacctcaggtgtgaaccctcctggctcaggctccccacaccactccagcttttcagcatttctcctgcttctgtgaagcaaggagggagtgtccaggccaggcctgagccaacctttcccactccttcagtgaacagagtgaggaggatggtaagaggaagacaaagaagaaggtgccagagagaaaaggagaagcgtcatcctctgatgagggcagcgattccagcagtagctcatcagagtccgagatgacatcggagtccgaggaggagcagttagaacctgcctcctggagcaggaaaacagtgagagccttggggcagagtcagggtgtgctcatgggccagggccctccccaacctctgggccaggcccagacatctatctccctaccatccagaacagaacatgacatcttctacccaacccagaacatgccaaggtgctccccttccccacacccacatcccatttttctctttcagcctcccagcagcaaaagtgctcctgcaaccaaggagatctccctgcttgatctagaggattgtgagtttgggtggtaaaagtcacaggggaaaggaggcctggggagcatgaattagaacagcccatagggactctggatcgggttcctcaggtcttgtgggagcaggggagcagacagaacatatcttcaggcctgagagggcagcagggctgacctccccaggtctggggttgaggtctaggaatgggtattttgcgagagcctccaggcagccatgtgccccgctgtccatggtgctgaaatgcgtgctccttgatccctaggctccctgctcaacccaagccacctccactttgcctcctcatagtcttatctactcccacagtcacccctcccagtgtccagcctgtgtctcccccagcaattgtgtctaccagtctggctgctgacctggagggcctgacactcacagactccaccctggtaccgtcggtgagtgggatggaggaggggaccgggctggggcagggacacatccctgtgctgcatcctatggtgtggatgtgtgtggggggtgggtgtgatggaggatgtgatagctttgagtcccagctgctggatggccctaggggacaatgctgggacaggctctctccatcttgctcagttctgtccttccctacccctccactctagcttctgagtccagtatcgggtgttgggcggcaggagctgctgcaccgggtagctggcgaggggctggctgtggactacaccttcagccgccaacctttctccggggatccccacatggtgtccgtgcacatccacttctccaacagctctgatacccccatcaagggcctgcatgtgggcactcccaaactgcctgctggcatcagcatccaagaatttcccgaaattggtgcgaagggctttggatggggtggaggaggaggctcctgggcagagtcagtctttctgtggttgctgataccctccttgtgccaggccaggggccaagctataggggcacagagatagcatctaacatgatcaacactctggtggacaagacagatgatgaaataagcaagttcacatcagggcgggaggtgcttgcagcagcagatttgggccttggttgtttcaggactaacttaaatgtggtgagggtgagtgggggaaagggtgcttagagttcaggaggaaaccgggaacagtctccagcagccaagaaagccaagattctgtagagggctggtcagctgtgacagtggagaggagagtagggctaggctgggttctagacctatcaggtgatggtggccctccctctccccttcactgccttataccacttcagagtccctggcacctggagaatctgccactgctgtaatgggcattaatttctgtgactcaacccaggcagccaacttccagctgtggtatgtgcccaactcgaggtgggggtgagaggatgggctggaaagggacagggtaacaatgaactggaaatggaggtggtgcttagtggggatacatcatgattgggtgggtctggaagccatctcaggccctcattcctgacctcactctttcactgcctccaagctgtgcctctacacagggtgggaagtgaggggagagatgacagccttaattcttctccgtttcctcccacccctcccagcacccagacccgacagttctacgtctccattcagccacctgttggggagctgatggcccctgtgttcatgagtgaaaatgagtttaagaaggaacagggtgagtgctccctgggagtgggcagagagggaagtatagaagctgactccagaatgtccagcttggatggtagggagaatggtggtgtccttcatctagaccaggggtcagcaaactttctgtaacgggccaaagataaatgttttaggctttgagaatcatgtggtctctgttgcagttacaacacgactgtggctgttgaaacatagaaacatccacagacagtatgtaaatgaacgagtatggctgtgttccaagaaatttccatttatatttatagatactgaagtttaaatttcatgtaattttcatgtgtcatgaaatattaatcttttgattgctcccccaacacttaaaaaatattaaaaacattgtgggccatataggtggtgggctggatttggtctggaggctgtaatttgcaaaacctctggcctagaagaaagaagagtggcttgggcaagggaggagggaagatcatggttagttttggataagctgattttgaaatgcatttgggaaattcaggaggagctatttagtatgcaactgaaaatatgggtctatgcccaggaaacactttgaagctggagtcatgaacatagaggtggtaatggaagctgtgaatatgaatgagatcactctgggaggtgggagaaaataggaaggccaaggacagaaccttgggggaaaacctgaattctgcagaagaaagaggaggggagggataagagaaggagcacagggagaggtgggaggagaaccaggagagacaacaaggcagaaggtgtctgcaaaccacagttacctaagaccttcagagtcagcatataaaaggctactgccaacctgagggagagagggtcattgctaaaggagggacagaggccaactgcagtgggttgagggagaccacggctcaagtacatgcagtcctctttggaggactttagccatgaatgaggagggagacagggcattggcacgatgaaggatctcacttctggaaaggattttttggagacggggacacttgaacatgaacagattgaaggaacaaaaacaagaaaatgttattagtcatgaatgaaggggatagaagaaacaggagagggatgtcagtttctaaaaggaggtgaagaataggggaagcagtggagggaggaaagaggctgaagagaagactgctggtgtgcaggagagcagacggaggagctcccatggggggcctggatcatgtgagtggagagaagtcagccttgcagaatgaggagttctgggggtgctgtgaaggtttggaggcttcaggagccctggctaggtctggagctgctactgcagaggtacaattaaaaatgtacctgtgaatgctgcatgtgactactggattctggctgagagatcacagcagccacctgtgatctttttgtgagggcttagcttccaggagctgagtgggagttgaatgtgggttggagggccccccaggaaagatcaaagggtgtgaggttcaggatgggcgaacctcttaagaactgactggccactctcaaggggctggtagcccagatgtctgatggaggaagcgccaaatcagtctttggtaacaacatggataaaggcctgggtgggaggggtagagaggctgacaaaggcttcctgagggagggcccagtctgagagggaagtaccttctccccaagactgatgatttaaattctgacctgccctttgcatgataccttcccagcctgggagaacttgttgctcagtaagcagacccaggtgctggcctctgtacccaccatggcctctgccctcatcacgacctctacccccaggaaagctgatgggcatgaatgagatcacagagaaactcatgctgccagacacctgtcggagtgaccacattgtggtgcagaaagtgactgccactgccaacctgggtcgtgttccttgtgggacatctgatgagtacaggtactaggccaccagtagaggggaaatgatgagcatgggggccctggtttgaaggaggagccccagctgctgatccccttccaaacacagtcacccttagcagctcttcctcaccccttctattcccacctcaggtttgcagggaggacactgactggtggaagcctcgttctgctgaccctggatgcccggccagctggagctgcccagctgactgtcaacagcgagaaaatggtgattggcaccatgctggtaaaggatgtgatacaggctctgacccagtgacttccaaatgctgtgacctgtttggctcccatctatacctccccatgacacctaggctgtcagtctctctcatctttctctctctctctcatcatcctcctcatgccagatagcattcagggtgtcctctctccctctggaggaccaagccctcccctaatgccctccccatggattccttagtgatctgtgc

SEQ ID NO: 15431 - DNA, 50604 bp, Homo sapiens
ggcgccggtgcctttaagacctcagcgcgcggccctgattgagaaatccgcgcgcagcctccgccgctgcacactgcagcctctgctgaacccctgccgcgccgccgccttcgccagcccggaccggaccggcccgccttcccttcctccgctccagccggcctccggccccgcaacctcctcctcggcgaagtctccctggccgccccatgtcggccgcccccgcctacagcgaagacaagggcggctccgctggccccggggagcccgagtacggccacgaccccgcgagcggcggcatcttctcctccgactacaagcggtgagggagcccgccaggaagctcgcgggagggttggggccggggaccgggcgaggcgcgcgggcaccatggacagcgcccggccccagcgccggccccgccccggccgcgccgaccggaagcccgcccggccccctcctgcggcctggagccccggcccagcgcgggcagcgctggcaccccggctccaggggccggcctaggacgcggaggggggcagataggggctggcgggggatgggccagctcagtttcgagaggagaaaccctccggttccaggtgtttctccggtttgcggcgttgcgttaggggttcccttcctttttcgtgctaggcgggttggcttcccaaaaatgtgggggaggggtctgagtcagcgaacttgagcttgagcctggggcctcttcaggaaggcgggccctggatgtacttgcacagcctcccagcttggccctgctgcaaattcatttcccctccctctggtccccatctccatctgaccctcacatccctgctcctggcattgcccctgtagttcagctccaccttcacaccctcccccacctttgattcgttcgtttgtttcttcatttgtttattcgtaaattctgcaacaagcatttatgaaaagccaactgtgtcgagtcctgaactagtcacggaatacaactgtgaacatgagacccttcttgtcctcacgatgctctagaggggagcacagatgaagaagcagtcagggacagtcgagtgtaatgggggcagtgggagcagggagaggacctagtctctggcgccggagagaaggaagacaggagcgtgaggtatgttccaggcagaggaaagggctttcaggaaggttgagagccaggccacaatctgtgtgagccactggactgaccagaaaagagggtggggaggactcctgaaggattctaagcaggcgacataatcagatttatattttagaaggacgtcaggctgctgcattgtggagaagagattggaggtgggccagattgaacaagagacaagggaggtgggtcttgaagttcacaggcctggcatgattgtggcctagaccaggggagaggcagaagatttgaggctgtggaagaggtggaagcctcagacctgatgattaattggatattgggtgggggtttagagggacagggggagaagatgaggattttcacgcacgtccatgtgaagagaccaccaaacaggctttgaacaataaagctttttaatcacttgggtgcaggccagctgagtccgaaaaaagagtcagcgaagggaaatggggtgggaccgttttacaggatttgggtaggtagtggaaaattacagtcaaagggggttgttctctggcggtggggggacacaaggtgctcagtgggggagcttttgagccaggatgagccaggagaaggaatttcacaagataatgtcatcagttaaggcaggcacaggccattttcactcttcagttacttcaggccatctggatgtatacgtgcaggtcacaggggatatcatggcttagcttgggctcagaggcctgacattcctgtcttcttttattaataagaaaaataacataaaatagtgttgaagtgttggggcagcaaacattttggcggggggtggtatggagagatactgcttctccatagccttgaagggctgcttcgagcgggattggggtggcgtgggaacctagagtgggagagattaagctgaaggcagattctgtggtaagggatgatattgtggggttgttagaagaaacatttgttgtataggattattggtgatggcctggatacggttttgtatgaattgaaaaactaaatggaataagagaaggagaaaaacaggtattaaaggactaagaattgggaggacccaggacatccaattagagagtgcccaaggaggttcagcatagccctgccagcaaagattatttatttactttaagagggagttaagactggcagtttggggatagcaccaggagatatcagctgtaatggtttggagaaacagtgtaaaccggcagtgtaaacaagagcagggcatgtatgagtagttgagtatggtgaataggagtatgactagtcagaagatagtagggatgacaagttttctggggcacagtccaagttggtctggtgtctggaatgagactggggcctaataaaaaggagcatctatacaggagcttgaatgggctgtaccctgcagcattccgaggacaggcccaaattctgagaagggcaagtggtaaaagtattgtcagtcctttttaagttggtggctgagcttggtgaggtgtgtttttaaaagaccattagtccgttctaccttttctgaagattgaggatggtaaggggtatgaaggtttcactgaataccaggagcctgagaaactgcttgggtgatttgaccagtaaaggctggtctgttattggactatatagaggcgggaaggccaaactgaggaattatgtctgacagaagggaagaaatgaccgcagtggccttctcagaccctgtgggaaaggcctctacccatccagtgaaagtatctacccagaccaagacgtattttagtttcctgactcggggcatgtgagtaaagtcaatttgccagtcctgggcagaggcaaatccccaggcttgatgtgtagggaagggagggggcctgaacaatccctgaggagtagtagaatagcagatggaacactgagaagtgatttccttgaggatagatttccacaatggaaaggaaatgagaggttctaagaggcaggctagcggcttgtaacctacatggaagaggttatgaaatgacgaaagaatagaatgggcctgtgaggctagaaggagatattttccttggtctgagaaccatttgccttgtgtgggaagagattcataggtgtaagtttcattgggggagtaggtaggagtgactgatgagaaggagaaaaactggccatgagggacagaagttggaatgctagctgcttttttagctaccttatcagcataagtgttgccctgagcgatgggatctgatgccttttgatggcccttgcagtgaatgactccagcttcctttggaagtaaagcggccttgagaagagtttttattaaagaggaattaatgatggaggacccttgtgtaatgaggaaagctttttgcccatataacagcatggaggtacaggatatggaaggcatatttagagtcagtataaatattgacacatagtccttttgcaagactgagggctcgagttaaggcaatgagttaagctttctgagaggtagtggaggggggcagaaagtatatgcgtcaggtgtgaggaagaaaatagattttggaagttatgagaactgtagagagtgagttgagcatagtttgtgattttgagggcctctgaaagtattaaagcagcggcagccgctgcacgcagacatgagggctaggccaaaacagtaaggtcaagttgttcggacagaaaggctacagggcgtggtcccagctcttgtgtaagaattccaaccgcacagccctgcactttggctgtgtgtgatgaaaaagggttgggatgaattagggagacctagtgtgagagcagcttctacggctgtttttaaggaatggaaaggagtggcaaaaggatttaggatctgtggggtcagctaggtttgcttttgtgagtttatataatggtttagtcaggatggtaaaactaggtatccaaaggtggaagtacctaaccatcccttgaaaggaaaggagttgttgctttgtagaagggattggggttcgggagattagccggacatgatcagcagggagagcacgtgtgttttcatgagaactatgccaagataggtaatggatgaggaagaaatttgggcttgactgaagtaatgggggctgtccgtgaagccttgcggcagtacagcctaggtagtttgctgagcctgatgggtgtcagggacagtccaagtgaaagcgaagagaggctgagatgaagggtgcaaatgaatagtaaagaaagcatgtttgaaatccagaagagaatgatgggttgtggaggggttgtggagggaggtattgaggaggagagtatatgagtttggcaccacggggtggataggcaaaacaatttggctgacaaggcacagatcctgaactaattgtaagacttgtctggtttttgaacaggtaaaatgggggaattgtaaggagagtttataggctttaaaaggccatgctgtaacaggcgagtgataacaggctttaatccttttaaagcctgctgggggatgggatattgacattgagcacggtaagggtgattaggttttaatgggatggtaaggggtgcatgatcagtcgccaaggagggaatagaggtgtcctatacttgaggattaaggtggggagatacaaggggaggatgtgaaggaggctttgaactgggggaaaaggtggcaatgaggtgtggctgtagcctaggaatagtcagggaagcagataatttaaagtgtctcggcctaataagggaactgcgcaggtggggataactgaaaaggagtgcataaaagagtattgtccaagttggcctcagagttggggagttttgagaggtttagaagcctggccatcaatacccacaacagttatggaggcaaaggaaacaggcctttgaaaagaaggtaatgtggagttggtagcctccgtattgattaagaaggggacggacttaccctccactgtaagagttacccaaagcatctgtgatggtccaggaagcttccaaggcgattgggcagtgtcagtcttcagctgctaagccgagaagatttgggaaggagtcagtcaggcagccttgggccagagttccaggggctctgggagtggctgccaggtgagttggacagtccgatttccagtggggttccacacagatgggacaaggcttaggaagaatcctgggctgtgggcattccttggcccagtggccagatttctggcacttgaagcaagatcctgatggagaaggtcctgtaggaatgcttgactgctgcagcttaggcattttgaagttcttgtgtactggagatgtggctggggtttctctcacagtggaggcaaggaactacaactcagaaatacattgctacttggctgcctttactctattattgtacaccttgaaggcgaggttaattaagtcctgttatggggtttgagggccggaatttaatttttggagttttatttaatgttgggagtggattgggtaataaaatgtatattgagaataagactgccttttgaccttttagggtctagggctgtaaagcgtctcagggttgctgcccaacgagccatgaactgggctgggtttttatatttgatgaaaaagagcctaaatactaactgatttggcagaggtcggataaaggaaaaggagcgttaaccttgactatgcctttagctccagccacctctttaagaggaaattgttgggcaggttggggagggctagtcgcagaacaaaactgtaagccggactgggtgtggggagaggaggtgatagaaggattatagggtggaggagcagaagctgagaaagaattggagtctgattcagcctggtggggagtgacctgaggagcattctggggattaggtgagaggtcagatgggtcggtagaaaaggaagattggaagattgaaaagacgcagcgacgcttggggttgggactgaggggacaggcgggagggaaagaaggaggatttgggatgagtcgcattgggaacagagactagggagggaccgatgtgtaaaagaatgcctggacatcaggcacctcagactgtttgcccattttacaacaagaattatctagatcttgtaggatggaaaaatcgaaagtgccgttttctggctatttggaaccattgttgagtttgtattggggttaagcggcattgcaaagaaaataaggcatttaggttttaggtcaggtgtgagttgaagaggttttaagttcttgagaacacaggctaagagagaagaaggaggaatggagggtggaatgttgcccacagtgaaggaggcaagcccagagaaaagagagggtagagacacggagagaaggggtggggggtgctttgccccccaggaaagtggagagaaaagagagggtagagacacagagagaaggagtcgggggtgcttgtcccccaggaacgtggagagaaaagagagggtagaaacatggagagaaggggtggggggtacttgccccccaaaaagtggtgtttgccactaagggtgaaagatcaaggcaggcatcctcgcggtgatcagacaactctgaaacgtgggtgaataatcaagcaggcgtccccgcagtgattaaacaccaagggaagactgtcttcctgagtccgtgatcggcgccggagttttgggttcacagataaaatgcatttcctgtctctaccagaaaaggaaaggaaccgaaattaagagaagggagagattgaaagatggcaccaagattgaaaggagaaagaggttgagggatagtgagagaggttggagaagagagtaaaaagaggccgcttacctgatttaaaattggtgagatgttcctcaggctggttggtctgaggacccgaggtcattaggtggatctttatcatgaagcaaagagcaggaggacaggggattgatcttccaagggtggtcccccgatccgagtcatggcaccaaatttcacgcacgtccatgtgaagagaccacccaacaggctttgtgtgagcaataaagctttttaatcacctggttgcaggccggctgagtctgaaaaaagagtcaacgaaaggagataggggtggggccattttataggatttgggtaggtagtggacaattacagtcaaaggggggtgttccttggtgggcaggggcgggggacacaaggtgctcagtgggggagcttttgagccaggatgagccaggagaaggaatttcacaaggtaatgtcatcagttaaggcaggaacaggccattttcacttcttttgtgattcttcaattacttcaggccatctggatatatacgtgcaggtcacaggggatatgatggtttagcttgggctcagaggcctgacaaggatgttactcaggttactagttcctgcaactggatggatgatggtgttattcagtgtaattggaaataaagatgttacaagcaaatttgtggaaaattaatgttgagcccagctttggacatattgagattgtaaactctgagggacatattaccctattaggtagctggatattacgatttgggttccaggagagagattagggaattattaacatatgtatgttaattaaagccacagaagtgaagataactcagggaggaggtataaaatgagttcagacactgcacaagtctgaaccctgaagacaccaacattagaagtgaccagagaacagtggaaagtgtttcaaggtacccaagaggtgaactaaaggctgaaagaaaacaatgtaatttcaagaaggagggagtggtcagtagtttcaatgcccattaaggtcaaatcaaacaaggaaaaaaatcatgaccattggttgacaaagaagagctcaattcctttctactctattccccacctcctgccctgggagataaattctggcaaagtaaggagaacaggagctagattatttctttcccagcattctgttgtggatgatttaaaacatacagaaaaatgaaatgaataatacaatgaacacatgtatatcatccatctagattcaactgtcattgacatcgtaccttatttgctttatctaaccatctattcgtatactttttttggttgaaccatgttaagttgcagagatcatgacccttcaaccccacattctaagtcgacatctaaagccagattaaaatgaataaaggagcacacaggtggtaagtagataaaacagtgaatggaaattttgctttcaagaaatttgactgtaaaagagaaagctgctggaggagaacctcactcagttcaaggaagtttgtctattttgttattttgggtttttttttttgtttcttaaaatgtatgactccatatttttgtttattattaatattaggcgggagagcctagagcaagtttaactgctgatgggaaggagcgattggtgggagagaggctgaagggaagaaaggaagtacagaacactgagtgatgggaggggaggcttactgagctgggtgggaggactagcctgggagcagggaggaccaactctgcccagagggaagagggcaggaggagaggagagtataaatgcagatggagactgggtacagtggctcatgcctgtaatcccagcactttgggaggctgaggcgggcaggtcacttgaaatcaagagttcaagactaacctggccaacatgtcaaaaccccgtctctactaaaaatacaaaaattagccagttgtggtaacgcatgtctataatcccagctactcaggaggctgaggcaggagaatcacatgaacccgggaggtggagattacagtgagccgagatggcaccactgcactccagcctgggcaacggagtgagactccatctctaaataaataaataagtaaataaatgcagatggatgggagtctggggcagggggctgcaggggatttcatctaaagactttccctttttcgggaaccaggtggtgaagccataagggcaaggctgggaatggggacttgagggtcaaaggggtttcaaatacaatgaagaaagccaaccaggccaggcgcggtggctcacgcctgtaatcctagcactttgggaggctgaggcaggcatatcacctaaggttgggagtttgagaccagcctgaccaacatggagaaaccccgtctctactaaaaatacaaaaattagccaggtgtggtggtgtatgcctgtaatcccagctacttgggaggctgaggcaggagaattgcttgaacccaggagacggaggttgcagtgagccgagatcacgccattacactccagcctgggcaataagagtgaaactccatctgaaaaaaaaaaaaaaaaaagccacccaccactggcaggccagtggcattggagaccagtgggacaagagggccaaggatgtgagagcagttggagggatagacacaggggttgcgggggagggtgctaggaggaagtagagataagagaaggttgatgggaaggaataaatcaagtattggctctggaaaggcaggtgaggattaagatgcctagggtcagtgagaagagggtatatgagatttctcaggaggctgcagtctaattgtggcagtgggattggagctgaagagggcatctctcacctctctatcaactccactgaccatctagtcccttgcccagagactaggggtaggcttggtctcctgtccctgcccttctttccctctagaggccttgtctctgagcagtgaagaggaaaccggagcatccctccctgccagtgtccggttaccaagttttgggggcgggccatctggtgactgtgacaggagccccagcgccctggccagctcagtccattcctggagaagaacctgatgcagcgattcctgcagctcccgggggccgtggtgaggcctggggtcagaggggcctgcggagctgatcaagaggctgctagccctgtgctggctcccgaaggtgggcccccactccggtaccaggccttggagcctgaggagcttcggtggctgcaggcccaggaggaagacacgaccccagaagcatctctggaaggaccttgcccagaggccagccagagccagagccagccactacggtatagaggaacccacaggaaccccctacccacacagccaggaaggccagggatgggcagttgcactctcagcccagacctcttccggtcccacctcctctgatggaggcttaggctggcatttagggtccaggctgggcggagaaggtggtcaggggcaccgtatgggggctgagggtatgagtgaggagagatgaggggcttaactccctggaggctctgaggggaggaggatagtaaaatatttgagggttgaggtcccaccttgacctctttctccccacaggcccccactggagtgggctctggacgaggtttggggacaggatacagcacagacagggtttggccagccactgcctgccagtggactggaacttaggtggtaagaggtgacagcgaggtgtatatcaagggaggtgagcatgactgacccccagtgccatgccaggccccctggctggctccagccacccccagaagagtcccttaggctaggtcagactaggggtcaggtcagagtgagtgcagcagcgtaaggggatctgactatgggagataatgtttcatggccttagggtgttgtgccttagtccctgcctctgcctcttgggaacagaagttggtgggagtgaggacgagaggcccagggcggtctcacctcaggtggtggctgcggtctgtgtcagtgcatattctgtgtcagtgcatattcgacagtcaatcttacctgtgctggctgctttaggcccagtggtcctgccccctttcattccccttctcctgcaggggcctggaatgtactcactaggctgggtggggaggatgccctggggtgtgtgcatttgacaggcgcatgtggcatttgtgggtgtggtgaggaagggaatacccagagttaaaggagattgggcaaacttggccctccttccacggaagcccagggaaaagccatcccagggtgactcctcagaagatcagaggacccttggggctggatatatttgatcttagaagcctacatttatcatcaaaaatctcaactaggagtccactgaccattttggtgaatgagactggagaggccaagtttggtccaagttatctgtgtattagatgtgatgcggcatgtgtgtgtgtgtgtagggggacgtgtgtggggtgtgtgtgtctctatgagggtgtgggggagcggggagaggtcttgtgatatatgtctgtaggggacatgtatgggatatgtgtgtctataagagggtgtgggagagtggggagaggtctcctggtggtatatgtctggggggtttgtaggtgtgtaggtgagttgtgtgggtggtttatgtgtgtagagtttttctgtgggaggtgtctgtatgtgggggagtgtgtttctctgggcgttgtgtaggcaggattttgtgggtgtgcgtgggtttatgtatggattctactagtgtctgcgggacctgtaggtatgtttgtatgagctgtccgtgaggtgtaggtatgtcgggggacatgggagtgtctgaggtatatgtgggtggtatcaatgtgtagttgtctgtggggtgtgcgtatgaaggatcctgacgtggagtgttgtgcattcatatctcagggaagctggtgcccagctctgtcatttttcctaggccctcggtgctgcccacgcctacccagctcaatggtctgtacctatgaccatgcccctggtgtcctgagctcagcctcctacccactaagaaactcaacagtctggtctgtgtttggcagggtaagagggtgattgtcttctggccctggcctgaccctggaagagtagaaggtgtcctctgatttggggggcatccccccaggtgagggagtttcagataacatgatggggctggatattttcttctgtcctcacatgacagatagcgagggcctcagataatgctggaaggcatcatctttctattttgctttccatcaaaaatctctttgggaaagacagtttctaacattcttgggatagtgacttcttagtgcccctcttcttgtctgacgtcaggtactcacgcatttctgcagccctgtgactaagttgcgtgttctgtctggttcttctcttcctctcagcattcatcacttgtttctcagcattagcagcagtcatttgccactttatgattgttatcatgctctttcctctcctaacagtgctatccccaatttctgattttctgtcatttctaaatgttgcatgtctgtgactaactttgcacacattgattttttttttattttttatttttgagatggagtctcgttctgttgcccaggctggagtgcagtggcgcgatcttggctcactgcaagctccacctcctgggttcacgccattctcctgcctcagcctactgagtagctaggactacagacgcccgccaccacacccggctaattttttttaaattttttagtagagacggggtttcaccatgttagccaggatggtctcgatctcctggccttgtgatccgcctgccttggcctcccaaagtgctgggattacaggcgtgagccaccgtgcccggcctgatttttaatttttatcactgtgatatttctcaagctgggttcttgtgcctgggtcaaagctgtgggttatcagagtgtcatctgggaaattagtgtgtgtgagtccccacacacagctgctcaccacattttggaattgtcttggcaacatatgagtgcatcagtttcacacaattctatcagctatatatagacacatttttttcatgggtttattaacaattctctgatcacttcgtgatcaccagttctgcatcctctgagtatggttagccacattgttcactgcacaagggcatctggccaaggaataccagcccatgctccacacacagaatggggagcaacagctcagggctgtgtctatctgtaggggcatgcagattgaaaatgggcttgtagcagccctgacagtgaatgctgcaaagagaccttatacatgtatatcagttccttttttaaatttttttgagatggagtctcactctgtcacccaggctggagtgcagtggcgcgatctcggctcactgcaatctccgcctcctgggttcaagcgattctcgttcctcagcctcctgagtagctgggattacaggtgtgtgccaccatgcccggctaatttttgtaattttagtagggatggggtttcaccatgttggccaggctaatctcgaactcctgaccttaagtgatctgcccaccttggcctccaaaagtgctggaattacaagcgtgagccaccacacctggcctctatttcgaatattaaactttaatttaccatatcccaaatatttttccttttgttgctattatgggctgaattgtgtccctccaaaatgcatatgttgaagttctagcccccagtacctcagaatgttacctttgaggtgattaagttaaaatgaggttattaaggggggccctaatccaatatgactgatttctttataagaagaggaaatttggatataggcacgcagaaggaagaccatgtgaagacagagaagatggttgtaagagacagaaaaacccaaagtgtgtttctcctactctcatacacaccgctcaccagagagtgcttcacctctggccacaaaaatgggtggagatttctccccaccaacaacctgttctccagcagacactaactgggtgttctctaattcaagtcaatctagtgttagattttttaggttaagggctcagtgccacaagactgctctctgcttcagatgccaattccaagtggtaagttgtcagctatacttctgaccaactggctataaatcaggggttcccatgccaccctccttgggttcaactctgtgagtggctcacagaactcagggaaactttagttatatttacccatttattataaagggtagagacaaacaccagatgaagagatgcatagggagaggtatggaaggaggggtgcagagctcccatgccctctccaggcaccacaccctccaggcaccttcacatgttccacagtctggaagctctcgaaaccctatcctcttgggtttttatgaaggcttcatgattgatcgcatctttggccatgtgatcaactcaaccatcagccccactccccattccccagaggtcaaatagtgggattgaaagtttcaaccctcagctgggcacagcagctcacgcctataatcccagcacttttggaggccaaggcgggtggatcacttgaggtcaggagttcgagaccagcctgaccaacatgatgaaacccatctctattaaaaatacaaaaatttgccaggtgtggtggtgggcaactgtagtcccagctatttggaaggctgaggcaggagaattgcttcaacccagaaggtggaggctgcagtgagccgagattgcctcactgcaccactccagcctgggcgacagagcaagactcagtgtcaaaaaaaaaaaaaaaaaaagaaagaaagaaaaaaagttccaaccatctgataacaaaagatgcttctatcacccaggaaattccaagggatttccatgtcagttgttcctctcactcaggaagttataaaggtcttaggatctctgcgtgaggaactgggtggaagaccaaatattagaacagaagttctcctagcatccctattgtcaagagttttaggagctctgtctcagaaatggggtatagagaccaaatatatatttctttacaatatcacaagaatcatctacaagccaaagaaagaggctatagaagaaaccaaccctgctgacactttaatctcagccttccagcctccagaactgtgagcaaataaatttatgttgtttaagccaccatctgtagtacttcttgtttttttttttttttagagacaggttcttgctctgttgcctaggctggagtgcagtagcacaatcatagctcactgcagcctccaacatcttggtgcaagcgatcctcccacttcagcctcctgagtagctgtgactacaggcatgtgccaccatgcctggctaattttttttatttttgtagaaacaggatctgactatgttgtccaggctggtcccaactcctgagctcaagcaatccttctgcctcagtctcccaaagtgctgggattacaagtgtgagccaccatgcctggcctgtggttctttgttatggtggttctaggaagctagtatagttgccttatttttctcataaatttagtttttagataccaaagtttaaaaattaaacctaggcctggcacagtggctcacacttgtaatcccagcactttgggaggccgaaggaggcaaatcacttgagtccaggagtttgagaccagcctggtcaacatggcgaaaccccaactctactaaaaatacaaaaaatttgccaggcatggtggtgcacacctgtaatctcagctatttaggaggctgaggcatgagaatcacttgaacccaggaggttgaggctgcagtgagccgagattgcgccactgcactccagcctgggcaacagagcgagacttcgtctcaaacagaaaaacgaaaaaaaggcctgggcgcagtggctcacacctgtaatcccagcactttgggaggctgaggtgggcggatcaactgaggtcgggagtttgagaccagcctgaccaacatggagaaacctcatctctactaaaaatacaaaaattagctgggcatggtggcgcatgcctgtaatcccagctattctggaggctgaggcaggagaattgcttgaacccaggaggtggaggttgcagtgagctgagatggcaccattgcactccagcctgggcaacaagaacgaaactctgtctcaaaaaacaaaaacgtaccaattaaacctagccatattgttgctgctaataattttatgaccttaataaaatcttcccttccttcttttgtatttaaaaataattaactgttaagcaaatgcgggatttattttggggtgaaatatgtatacaagttaaattatttgctgctggccaggtgtggtggctcacacctgtaatctcagcgctttgggaggatgaggcgggaagatcacttgaggtcaggagtttgagaccagcctgaccaacatggtgaaaccctgtctctactaaaaatacaaaaattacccgagcgtggtggtgcatgcctgtaatcccagctacttgggaggctgaggcaggagaatcacttgaacccaggaggcagaggtttcagtgacccgagatcgtgccattgcactccagcctgggcaatgagagcaaaattccatctaaaaaaaaaaaaagtgctgcaaagcagttgtcccaatagcatttatttaagtggggcgggggcgggggggtgggggcggggggagattcttattggttcgtaatttatcaagttagaccttttatgaaattccccccatgacctttgaccttctgtttttaacctggtaccaaacagcttttatcatcgtctcgtggtgtttatgttttgaagtccaatagggtgagttgtctatgattgtttccttcttttcccaaaaatattctttggagttcttacctactgattttttttttccagatgaattttgctgtcacttaagtttgacaaaatgttccctttgaaatttcaaatttttgaaatgaagtatgagatctaaaaaaaaaaagaaacctgtgtattggctcagcattacccttattcctctcagccaagtgcaagggatcacttactcaaatctttattcatcccactagagtttaatgacttccttgaatggctgttcaatgttcagtgacaggtctggcttttgttgtgaggccatctatggagtctctgggacccttccagtccctggaatcagtttggtctgagaggtcaggacttggaaacatactggaggcagggcaagggcaccctgctcttgttttggcatctacctcttttccgctggtccttcttatccatccaactagtccttttccctgagccaggtccatactttcccaccccaaacccttcctcttgtttcctggctctctgtttctggctacattcatttcctacactcctgtatcaaaagtaccacaattgcttctcgttcccacagtgcagtgcggctgagcgcctcagagcccgcggggacgctgcggggggattgcggggagggggcgttgggaggtgccgatgttgggctgggcggatgagcgcatctgcgtggtgagccttccaacgtgcgcgagaaggacgtggaagaccttttctacaagtacggccggatccgcaagatcaagcttaagaatgggcactgccttgtgcccttcgccttggtgcgctttgaggacccccgagatgcagaggatgctatttatggaagaaatagttatgattatggccagtgtcggcttcgtgtggagttctccaggacttacgaagtcggggtgggtggccccgtggtgggaggaatgggccttctgcaagaagatctgatttccgagttcttgtttcaggacttcctcaggcagctggcaggacctgaaggatcacatgcgagaagttggggatgtctgttatgccgatgtgcagaaggacggtgtggggatggttgagtatctcagaaaagaagacatggaatatgccctgcataaattggatgacactaaattccactctcatgatagtgaaacttcctacatctgagtttatcctgagagaagcaccagctatggctactcacagtctcggtttgggtcaaggggccgtgactctccatactaaagccggggttccccacaccacttctctcctttcaggccctactgagacaggtgatgggaattttttctttattttttaggttaactgagctgctttgtgctcagaatctgcattccagattgaggatttagcgtcttaggaaattattttaattttttttttttaaagaagaaaaaaaaactacatactttctaccagggccatattagcagtgaaacattttaaactgcagaaattgtggttttggttcagaaacaagttgtatatttttcactcctgaatatgggtaaaaaatcagttccgtctttgtgggttgctctgctatggagatcaacagttactgtgactgagttggcccattctgcttaaaaatatgttttaaacgtttaagaaaaatgctcatcatcactggccatcagagaaatgcaaatcaaaaccacaatgaggtaccatctcacaccagttagaatggcaatcattaaaagtcaggaaacaacaggtgctggagaggatgtggagaaatagaaacatttttacactgttggtgggagtgtaaactagttcacccattgtggaagacagtgtggcgattcctcaaggatctagaactagaaataccatttgacccagtgatcccgttattgggtatatacccaaaggattgtaaatcattctactataaagacacatgcacacgtatgtttattgcagcactgttcacaatagcaaagacttggaaccaacccaaatgtccatcagtgatagactggattaagaacatgtggcatggctgggtgcggtggctcatgcctgtaatcccagcgtggctcatgcctgtaatcccagcactttgggaggccaagacgggtagatcacgaggtcaggagatcgagaccatcctggctaacacggtgaaaccccgtctctactaaaaatacaaacaattagctgggcgtggtggtggcgggtacctgtagtcccagctactcggtaggctgaggcaggagaatggcatgaacccaggaggtggagcttgcagtgagccgagattgcgccactgcactccagcctgggcgacagagcgagactccatctcacaaaaaaaaaaaaaaaaaaaaaaaaaaagaagaagaaaatgtggcacatatacaccatggaatactatgcaaccataaaaaaggatgagttcgtgtcctttgtagggacatggatgaagctggaaaccatcattctgagcaaactactgcaaggacagaaaaccaaacactgcaggttctcactcataggtgggaattgaacaatgagaacacttgaacacggggtggggaacatcacacactggggcctgttgtggcgttgggggaggagggagggatagcattaggaggaatacctaatgtaaatgacgaattaatgggtgcagcacaccaacatggcacatgtatacatatgtaacaaagctgcacgttgtgcacatgtaccctagaacttaaaagtataattaaaaaaaaaaagtttagtaattgaaaaaaaaaagtacaacaattgggttggttggaacagcagaaatgaattgtctcacagctctggaggccaaaagtctgaactcaaggtgtcggcaggaccatgctccctctgaaacccatagggaaatccttctttgccccttctagcttctggttgtttgctggcagtctctggcattccctggcttgtagacgcatctttccaatcgtctgccttcacatggtagtctccctgtgtctgtctctttaagtggctgtcttttgttttttgtgtttttttaatttcaatttaatctattttttgtagacacattgtttcaccatgttgccaggctggtctcgaactccagggctcaagtgatcctcccgtctcagcttcccaaagtgctgggattacaggcgtgagccgccacacccagcccacatggctgtcttcttatgggaaaccagacatgggattagagacccactctattagagtaggattgcatttaactaattacatctgcaacaactctatttccaaataaggttacattctgaggtactaggggttaagacttaaatatatcctttttaggaaggacacagttcaacccacaatattagctggccacatgtttcccctgatctgtactttacttgttccccctggctctggtccctcctcgggtcaggtcctgcctgagcctcccctggccatgtcccttctttgtgcctggaccctcctgattaataccccatccccacccttgtgccctcagctgacttcttgtacctcccaccaggcatgatgacctgaaggagatgctggacaccaacaaggattctctcaagctggaggccatgaagaggattgtggcggtaagaggggaaggaggaggcctccctccgggcggggcctgggtggccaagagcagctctccttagctccttgtagaccttccctctagttagtgctgtgcctctcgctttgtccctcttcccctaccttgaccccaccacccagatgattgcccgaggaaagaatgcttcagacctgtttcccgcggtggtgaagaacgtggcctgtaagaacatagaggtgagcactacctggtgagggattgcttgtccccacctcccccaggaccacactcaagcttggggtgaggaaggaaatgatttagcccctgggggcccgacctgctgagaaatgtctctgagccaggagaagacactgtctccatgtccctgaactggatgtggatcaaggtaaaggacccggatacactcaggggtgctctcccccactgggagagtttgtccccatggaccgcagctggctggggagatgacatcccaggggtaggggggtgggcacaggtgcctgctgagaagcgttctgctgagaaacgtgctctccccaaggtgaagaagcttgtctatgtgtacctggtacgctacgctgaggagcagcaagacctggccctgctgtccatctccaccttccaacgtggcctaaaggtcaggggtctcagtttgcctcccagggcctgggcctcgttggcgctgtatcggaggagtaggcctggggagaggccatgagcatgggagcgggctctgcagaccccttcctacctgcctaaaattgggagggtcacagtcagaagaggccagccagaccctcagagagtggaagctgggctcagaaggggcgtaagagatgaagtgggtacccagggcccctgtctctcttcccaggagcctgtggtaatggctgcttctagtatgaaccacttgagcccccggagagtggagagtctctagcaatggagaacccctcaaccctcacccccctttgtgtaaaggtgtgaattgtggtccacagccaggtagatttcaacctttagcagtggcctgaatcccccacaccattctcaccttttgtttcattttgcccaaggcctctagttggatttacatatgttaggtgcatgtataagtctcccccctaagggcttttctggttagtctaagacatcttgagggtaaagacagccatttcaaggccattctctccatattggatttttcagctctgattacaaccattaactcctctatttttgcatacctttatttatttatttatttatgagacaggttctcactgtgttgcccaggctggagtgcagtggtgcaatcatggctcactggagcctcgacttccctgagctcaggtgattctcccacctctgtctcctgagtagctgcgactactcagcctgcatcaccatgctcggctaatttttttgtagtttttgtagagatggggtttcaccctgttgcctatgctggtcttggactcctgggctcaagtggcctcagcttcccaaagtgctgggattacagggatgagctaatactcctagcctggatacttttagttcaaatttctgtgagagagattgtgaaaggtccagctcatcttttcatatccagaagttctgtaggttgctgggtagacaggattgctgctcaaatccagggcccaccccttgtccaatctgctatggccagcaagaggggttgacagtcggcttctttggggtgagagtagaaagcatggtcacttgaatatacaattcattcatttagtaaatacttgggtgtctctatgccacacattgtgctagatttctttttataagtcaaaaccatggaatccgtcttagattggcaagtaatcttttggtttgagtaagggttaagtataaaaactaatctgaaattgttgtacagattttcacctatagtctctaccaactgaccctgtcccccttttagaaaaccagagctcatttagttcaactcaatgtgataatttctttctgcaaagtgccaaatagtattttaggttttgtaggccttatagtctcaactatgcaactactcaattttgcccttatggtgcaaatgcagccattgacaagtgggcgtggccgtgttccaataaatctatataaaaaacaggcaatagacagattttatccaagggctgtagcatgccagcctttgctctagaacatgtctaacaggtcatcttttctgatagggacctcactccttcataaggcaacttgctccatctcaagacaactaccactatttggggtgttttttaaaccattctcttttgttgaaacctccacaactataatttttaaaaattgatttcaggctgggtgtggtggctcatgcctgtaatcccagcactttgggaggccgaagcaggcaaatcacaaggtcaggagttcaagaccagcctggccaacatggtgaaactccatctctactaaaaatacaaaaaattagcttggcatggtggcgggtgcccataatcccagctactcaggaggctgacgcaggagaatggcttgaacccgggaggcagaggttgcaatgagccgagaacgtgccactgcagtccagcccaggcgacagtgtgagatccatctcaaaaaaaaaaaaaattgatttcaggctgtactgcattatgactgcacctgtgaatagccactgtactccagcctgggcaacatagggagaccctgtatctaaaaaataaaataaaatttactacaggttcacaaaaggcataaagaataatataatgaatatccataagaaatgacacatttctcaaatagccaaagcctcctatatatcttctcttgtttatcattcataggtatgtatttattcctgtgctagtaatttgcatattgttaagcaatataaaatgttttgtaaatggtgtcatcgtactacatatgtattcctttaaaacttgttttcttttttgttgtcactggcttttggtctctcctgcatgttggaaccaatcatttcaatccagccttctcccttctttcaatcctagcccaggctagggccgtgttcactttcttaggagatccctcatggaatcaaacctctgactggcaagcagataatccaggtctccctacatcctgtctttgtacagttggtcccttgaaccccctatgaaaccctactctatttcattttatcagtttagcacagggtccaaaccagggtgattctgaatcttaattatgtccctcctgattttgtgtcttctttcaagatactgataagctatttggaccagggcaaaagactgaggcatagcatgtttccaggttgacactgatctgttaataaaccttctccaagtatatttcaccacgttgtagacccacctgactgtacagacagctggcatttttctatcttgttaggaaggatcttattcaatagcaataaataaataaataaataacacctttcatgtgcaaagggttgtgggtgacacagagataaaacagatgtgaattctgctcttaaaaatgcttggctattaggtgaaacaaaaggcctacctaaaaaatagcaatgcaggaaatgctatgagacttccacaaacatatcactgaaatcaagatactaatatccaccggcctagttaccccatcaaaaaggaaaacacattttttttgataactttctgtgaatctataatcatttcccaaataaaatgctcacacacaaaaaaggaaaacaggtttaagcagatgatgtgactatttgtctctaagaaaacagagactccttccttttcaataaatgtttctaacccatctgtttaaaagtcaattccagaattttgtcaggaattagcatcaattttacctgcaattgtgaggatcttgtcttgtctttttccatttcagaaagtcagggtaatatctacccttctttagtgttctattcccgtcattctctaagagtaatagtacaggcacacctcattgtattgcactttgcagatattgccagatattgcactttttacaaattgagggtttgtggcaaccctacatcaatcaagtctatcagtgccatttttccaacagtatgtgctcacattgtgcctctgtcacattctggtaattctcacaatattccaaactttttaatgattattatatgttatggtgatcagtgatctttgatgttactattgtaattgttttggggtgccacaaaccatgctcagacatgaaagtgaaattaatcaataaatgttgtgtgtgttctgactgttcccccatctccttcaccttgggcctcttcattccctgagacacaacaatattgaaattagatcaattaataaccctacaatggcctctaagtgttcaagtgaaaggaggaaccacacatctctcactttaaatcaaaagctagaaatggttaggcttagtgaggaaggtatgttaaaagctgtgataggctgaaagctaggccacttgctccaaacatttagccaagttgtgaatgcaaagtaaaagttcttgaaggaaattaaaagtgctactccaggctgggcgtggtggctcacacctgtaatcccagcactttgggaggccgaggcaggaggatcacttgagaccaggggttcaagaccgtctctataaaaaatttttttaagttagcctgatgtggtggtacgcacctgtagtcttagctacttgggaggctgaggtgggaggatcacttgaacccagaagtttgaggtgcttctccagtaaacacatgaatgataaagaaagcaagacaggattattgctgatataggaaaatttaagtggtctggatagacgatcaaaccagctaccacattcccttaagccaaagcctaattcataggcaggtcttaaatctctccaattctatgatggctgagagaggtgaggaagctacagaagaaaagacggaagctagtggaggttggttcatgaagtttaagtacagaagccatctccataacaaaaaaatgcaaggtgaagcaaaagtgctgatggagaagctgcagcaagttgtccagaagatctagctaagatcattgatagatgtgactatgttcaacaagagatgctcaatgtaaatgaaacagcctcttactggaagaagatgccatctagcactttcctacctagagagaagtcaatgcctggctttaaaaaacaggctggctcttgttaggggccaatgcagctagtgactttaagttgaggccagtgctcaatgaccattctgaaaatcctggggtccttaagaattatggcagatctcctctgcctgtgctctataaatggaacaacagtgccatgacagcacatctgtttgcagttatggtttactgaattttttaagcccactgttgatacctaccgcttaaagattcctttcataatattactgctcattgacaatgcatttgttcactcaagagctctgatggagaggtacaaggagattaatgatttcatgcctgctaacacaaaatcagttctgcagcctatggatcaatgagtaattttgacttttaagtcttattatttaagaaatacatctcgtaaggctagagctgccatagatagtgattcctctcatggatctggacaaagtaaattgaaaaccttctggaaaggtttatagaaaccttctggaaaggtttaccattatagatgccattaggaacattcatgattcatgggaggaggtcaaaatattaacattaacaggagtttggaagaagttgattctaaactccatggatgactttgaggggttcactacttcagtggaggaagtaactacatatgtggtggaattctacctagaagtagaagtagaattaaaagtggagcctgaagatgtgactgaattgctgcaatctcatgataaaacttgaatggatgaggacttgcttcttatgagtgaacaaagaaagtcctttcttaaaatggaatctgccgggtgcagtggctcacgcctgtaatcccagcattttgggtggccgaggtgggtggatcacgaggtcaggagatcgagaccatcctggctaacacagtgaaaccccgtctctactaaaaacagaaaaattagccaggcatggtggcgggcacctgtagtcccagctactcgggaggctgaggcaggagaatggcgtgaacctgggaggtggagcttgcagtgacccgagatctcgccactgcattccagcctgggcgacagagcgagactccgttacaaaaaaaaaaaaaaaaaaaaaaaaaaaaactcctggtgcagatgctgtgaacattgttgaaatgacaacaaaggatttagaatattacataaacttagttgataaagcagaggcagagtttaagaggactgacttcaattttttttttttttgtagagactggggtctccctatgttgcccaggctggtcttgaactcctaggctcaagcaatcctcctacctcagcctcccaaagtgttgggattacaggcacaagccatcacgcccagcctacattgtttttttaaagacataatgctattgcatgcttagtagactacagtatattgtaaacataactttttttttttttttggagataggatctcactctgttgctcagtctggagtgcagtggcatgaacatatgtagctcacttcagcctccaactccctgggctcaagtgattctcccacttcagcttcccaagcagctgtaactataagcataacttgtatgcaccaggaaacaaaaaatttatgtgactcgttttagtgcgatatttgctttattgttgaggtctagaatcaaacccacaatatctccgaggtatgcctgtaatatatagctgctgctgctgatagtgggaagacagtcctaagccccatgatcacaatacagtgtaaggaatgcttttatacgttctgtataggatgcagtaggaataaagaagaagggcttggggccgggcgtggtggctcacgtctgtaatcccagtactttgggaggccgaggtgggcggatcacttgcggccaggagttcgagaccagcctggccaacacggcgaaacctaatctctactaaaaatacaaaaaattagctgggtgtggtggtgcgcgcctgtagtcccagctacttgggaggctgaggcaggagaatcgcttgaacccaggaggtggaggttgcagtgagccgagattgcaccaccgcactccagcctggcgacagagcgagactccatctcaaaaaaaaaaaaaaaaaaaaaaaggaagggcctacacccctattttgttttaaacactgtggaagaacagcagcttttgcaatgatttctgggagaaaggagtgtaaggttgaactccggaagggagaccagcttgcatctgctgggcggtcacctcaggcattaaaacaggcacctccaaaaaaacccttacaaggaacaggaagtgtttcaggtgtttcagcaattttaggtgttctgaaagtttttcagtgtttctggaagtgaagctacccattgcaacacctgttcaggtgtcagatttctgcaaccagagccaaaattaagtgtcccccagatacccatcactggcacaccatccaggctccagtcaagcggcagggaagcaagagctagtggtcgctggggacagtgacttccaaaggtgtggcctccccccatcagggcacctggtgccctttcatagctctgcctccacctctgcctttaggatcccaaccagctgattcgtgccagtgccctccgtgtcctctctagcatccgtgtgcccatcatagtgcccatcatgatgctagctatcaaggaagccgcctcggacatgtcaccctatgtgcggaaaacagctgcccacgccatccctaaactctacaggtatgccccagccctgtcccacgctccccaggaggctggttcctaagttctcaacccacccctggcctttcctaagtcttgcctgctgcttctcagagggtttgaggagggtagtttgggggactgacagagatggaggagaacaataaggctggggtgcaggaggtgagcatggcttggacagatattgggaaggctggggctgagagtggcaaattcccctcaccgatttctccctcagtttggactctgaccagaaggatcagctgatagaagtcattgagaagcttctggctgacaagaccacggtgcgtgtataggggcgctccgggaggggtggtgaccggcagccggccttccacccttcgcgttcaccctctcgtctttgttctttccccagctggtggcgggcagtgtggtgatggcctttgaggaggtctgcccggagcgcatcgacctgattcacaaaaactaccggaaactctgtaacctgctgatcgacgtggaggagtggggccaggtggtcatcatcagcatgctcacccgctacgcccgcacgcagttcctgagccccacccagaacgtaagtgggcccagcccaggcagagcgggccgaagtgtgtcccggggaggcgcccacagacccgtcggtctccccgtccaggaatccctactagaggagaacgcggaaaaagccttctacggctcagaggaggacgaggccaagggcgcggggtctgaggagacggccgccgcggccgccccctcccgaaagccctatgtcatggaccccgaccaccggctgctgctgcgcaacaccaaacccctgctgcagagccgcagcgccgcggtggtgatggcggtggcgcagctctacttccacctggcgcccaaggcggaagtgggcgtcatcgccaaggcgctggtgcgcctgctgcgcagccacaggtgcgctccgcccccagccccgccccctccctcgcctcctgccccgccccacgggctgcccggctccgccccctcacgcccaccagccgcttccacctctgcccacccgctccacactgaccgtagtcctgccctccgcactggtcctctccccgcaacgacttgccccaccttttcccctcatccgctgacccttgccccaaccgaggggcccggggtgctctgacccgtcctctccgcagtgaggtgcagtacgttgtgctccagaacgtggccaccatgtccatcaagcgccgggtgagcctgcgacggcgggctgtcctcgctgtccgagggccgcttctgcgggcactggaggcgttgtcggggctgggaccggggccggggaaagggaagatggaggaataccctggctgtgcagaggatggggcaggggaggctccaaatacagatagggagcagggcctggatcctgaggggccgctgaggggatgtccagtggaaaaagagctagtcagatctgagatggacgagggaagacttgaggagtggagggcagtggtgaggaggcaaggatcctgggcgctgggtcaggataggaggggtgtctctgggcagcgaggcaggcctggggcttcggtggagctccctagctgcctctcttgtgccagggtatgtttgagccctacctgaagagcttctacatcaggtccaccgaccccacccagattaagatcctgaaggtgagtgagggacagaagtgcatgtgcttcccagccctccccaccccatgtacccactcaaataactcacagtggcccccctggtgcctgcctattcctggggctgagcccaggagcccatgactgccccagctggagctgtttgttcagggagctgggctaaggagggtcagggggagaagggaactgctctttgcctagtacctggtatacacctgctactcttcataaatgaagtaacctgatatcacctcataataatcccaggatgtgtacattatattccttttataaaaatatagactctggccaggcacagtggctcacgcctaatcccagcactttgggaggccgagacaggcagatcgcctgaggtcaggagttcaagaccagcctggccaacatagcaaaacctcgtctcaacgaaaaatacaaaaattagccaggcgtggtggcaggtgcctgtaatcccagctactcgagaggctgaggctagagaattgcctgaacctgggagacagaggttgcagtgagctgagattgtgccattgcactccagcctgggtgacaagagcgaaactccatctcaatctaagaaaaagaaaaaaagactctgggaggtaactgccccaggtcacataattctgctgactccaaggttcacacttttctctcccacccacagtgttatggcccccacacacctgccccctcaggctctcctgcaaacattcacggacaaggaaagtggcgggagcccatacctccatttgattcctgctctgctgcctcattattgagtgatttccttcagcaacagttaatcttcctaacccttgtgaacatccactatgttctaggggtacatgatgagcaaactaatcagggaccctgcctttgtggagcttacagatgtggggaggaggagacattaagcagttaatcacaaggcaaatgtaaaagtccacttacaaaatatggaagaaagtgtggagagctataagggcataaaatagggagacctcatctagtctggtgccagggaagttttcccggaggatatgagacttgagctgaagcctgagagatgaacatgaattatgcagggacagaaatgggaagaactgctccacgcagaggaaacagcatctgcgaagaccctgggttaggaagtggagtgggattggggcctggaagacaagggggacagtgatgggagatgggaggtagacagcaagcagatcattcagggacttacagaccatggtgaatacgatggtctccatcctgaaagcaataggaagctttaagttttcaatgcagtagggaggtgacatggtcatactgtaagcatactgtgtagggaatccacttaagaggcaaactggtcctcttgctttttagacaagtttcataacctgtcaattccctcatcagtgtgaggatgatgcagggctgtcatgaggattgttttctggtctatgaagtgtatttggaatgaaagcacagaaagtccactggccaacccacccattttctgcctctccaaccctccctgcagctggaagtgctgaccaacctggccaatgagaccaacattcctactgtcctacgggaattccaggtacaggccagctcccagccagaagggcctgggagaggggcccatcagatccttgtgccctggtgggtaaacctcctcttatgagcccaaggctggagaaactattatcttacattcccgttccaatgtgtttggctggctttgggccaaggaatcactggattgggggtggagttgtcaccccctttcccaagtcttagtcaccggcatgataagccataaaatgaaaggccacagccttcttgaaggtcaccctcaagcctgcagagtcactgagggatttctttgtcatatcccacagacctatattcgcagcatggacaaggactttgtggcagccacaatccaggccattggacgctgtgcaactaacatcggccgagtccgtgacacctgcctcaatggcctggtgcagctgctgtccaaccgtgatggtcagtgtttccctgagtgtctaaccgtgatgatcagagggtgtctgcctgcaggtctgactctgctggccactggatatccaccagtctgcctagacacaatgtgtatccattggtctgtctgtcttgatcagggcccaagtgttcctacacctctgagggctgctagagaactgaagggggttgagagaaagagccaagggcctggggcactgcaggtgtgtctgtccacctgagtgtggccatctgactgtcttggggtccacacactcatttttgttctgtagagcttgtggttgcagagtcagtggtcgtcattaagaaattgctacagatgcagccagcacaacatggagagatcatcaaacacttggcaaagcttacagacaacatccaggtgagggagaagccatattttcactccccacttcaaggtcctccccatgatttcaagactgtataattacatatgctagccttatcaaaagtaacttccaaaccttaggtcttcaggtggaaggagcagagacactggaccatgtgaccctgaccttgttacccctgatttgctttccctttggagaccctcaatgagcacgatggactttactactactcttgttttctctctaaagctctagccaaccatggttgagtgacaaatcttgtgtttttctatcgcactgctaagctgaaacatctaaacaaggcattcccaaagattctggagagtaacatggaaataaagtactgagggtacaatgaatccagaaaatcaatcttttacatcatgactgacttagggtcttgaaagctctatgctaatgaagccctagggaagaggggaaatgctgtctaggaaatgtctaccttttaacctctctctatctcaccacccccaactcccatttccagagaacccataatacaacaggccagcacagatgaggagtgctgtttccctggaagtccacaatcctacccacccactttcccgtatttacccatcttcactcctctcccacaaccacaggtgcccatggcccgagccagcatcctgtggctcatcggagagtactgtgagcatgtccccaggattgcacctgatgtcttaagaaaaatggccaagtcattcacagcagaggaggatattgtcaagctgcaggtcatcaacctggcagccaagctctacctgaccaactctaaacaggtaaagattaagagatgaccccccagatactctggtccccagaaactccctagacagtattcttttggccctccctaggcagggctgaactctagctcctattttggaaaagaagaatcagggaaggtggctggtctgcccacataaccaatgctaccccagtgcccacaaagaccttgtagtgctggtggtcactgttgaagagactctcctatgaagctgtgacctccagtctgctagtacaagagtcctgtctgccaccttggaactctggggctgtgaagaaccacagttgattgggataagggaagggcccaacagtggcaggtactgatgggagaacatgcatcccagatgtggtctgtgcttctttccaaagcttgacaatgcttggccagtctgtgccaaagataagggggtgagtctctgcttgggcttgggtggtgctggtggccactgtcattcccaaggtgaaaggttataagagatacacagccaaggatgaggctcaactaagttgtagtatcagggtgttcagagcctcctagctgtctggcatctcctgagatggttccaggagattctcctaaaatgaagcataatgtgctgagcttttcaaggtgtcagggacatcaaacaccatgacgatttccacactctcccactcagttaagcaggacagggattggcaaactactgcccataggctgaatttggcctattcctgtttttgtaataaagttttgttggaacacagccctgctcattcatttacaaattacctatggctgcttttgtgctacaacagcagggttaactagttgcaacagactgtattgcccacaaagcctagaatagttattctctggcccttttataaaaagactctgccaatccttgaagcaaaacctctggctaggtggctggggtctacagatttatagcagggatatcccctggagactgtagcatccctgccatgtccactgtgcgtgggagtctttggatggtggcacttatctttttcagtggcttctttgatccattgtggccagagtgagccccagaggctcaaggtgaggtaggcagggccaccaagtgctgtgactgtaatcaggagtcaaaggacagcagcaacatgtggaggcaactgagtctgtataattaaatatgctagccttatcaaaagtaacttccaaaccttaggtcttcaggtggaaggaggagagacactggaccatgtgaccctgagcttgttatcagtgttgtgggcaaagcagattggagagagagaagttagagggggagagagagaagttagagggagaaagagcaccatggggaagcgttcaatcgttgaaaaaatatttgtatacttcctttgttcaggtgggaggaaggagcaagtgggaggaatgtttgaaaagatgaagcagcctgggtggggagccacccaggtaggtgggagtcttgacatgctcagcaatgagccagagtcctaaaccccaggatggtgaggttggcatgttttcataagcctgggcctgtccacatgtcatttcccccaagttgtcactgtgagctacatgtgcatttgttcatttatttaacatatatgtaggtgggagtctgacatgctcagcactgagccagagtcctaaaccccaggatggtgaggttggcatgttttcataagcctgggcctgtccacatgtcatttcccccaagttgttactgtgagctacatgtgcatttgttcatttatttaacatgtaggcctactatttgcctggtactgtgctgcgtcctgaggatatgacaatgagtgagacacatttacaggtctccagatactcacagccaagtaggagaaacaggacaaaaataaacattttaaacacagcagtaacagctgtcatcagggttggcacagcgagctgtgggtatatacagctgaaccctcccctaggaatgacccctgtcagggaacccagagtaggctgttcaggcaaatggacactcacctccagggcgcccttcacctgcaagtgagtttttgcaggccccttagaatggttatttgattcaataaagatttttgtcctccctttctttctcctttcttcccagcctcttctgggagtggtaaagaagggggagtccttggggtactaggagggaggtggtttggatgcgcacatgaccatgcttgcaaaacagtagtgatgcttcccatcctgggaccatgagtggcaatctgcccagctaaaaggccacagtaatctcagtcattctctccaatttggacatgggcccacggcatgccagatcctggcccaggatgaggccaaggaaatgaccaagatgaggcctctgccctgctattgatcagcagataatcagatactagaccagaggccacaaaggcataacatgcaggtggcgggggatgggggggttggtaatcaaagtggctattacatccacctggatatagaccctggggaaactgcctagcaggttagtttgcttttatgtgtcaggtgagatgtgtggcaggagggtctgccaggggcacagtgggatctacaaccctcccatgtgaccgcctttacagtgaatagaagattctgacaaattttgcagaattgcttttaaaaacgtaaactttttttaatatgctaaaggtaatacatgcttatcatagaacatttggaaaactcagaaaattataagtttaaactattaataagtccaccatttagaagaccaccattaattatatatttccttattttttattcctatatatagtcattcagaagttgtacttttgtctattgtccaatattttaaacttttctgcttcttttcaatgctttcatatttaatacttttttttccccattcacatttcaattaaacttttcacttagaattttctccaggctgggttcagtggctcacacctgtaatcccagcactttgggagcccaaggtgggtgggtcatttgaggtcatgaattcaagaccagcctgaccaacatggcaaaaccctgtctctactaaaagtacaaaaaaattagctgggtgtggtggtgcgctgaaatctcagctacttgggaggctgtggcaggagaattgcttgaacccaggaggtggaggttacagtgagctgagatggtaccaccacactccagcctgggccacagagcaagatccatctcaaaaataaataaaaattaaaaagaatttcctccaaatttttttctactttcacatttttaaatcaattgtattagttttctgctacataataaattactataaatttggtggcttcaaacaacacacgtttattttctcagtgtctatgggtcgagaattcaggtatggcttagttggatcttatgcaaggctacaactgaggtgtcagccaaggctgagtttttatctggaggctgtactggggaaaggtccacttccaagtcacatggtgccacgatccacttccttgcagttgtaggattgtggccctggcttcttgctggctgtcagctgggggctgcccttgccttctagaggccgtccttagctcattgccataggggcctcccaacacggatgcttaatttctccaaagccacaagggagaaagtctctagagccagtctgctagcaagaccgtcttctttttattttttaatttttatgggtacatagtaggtgtatatatttatggggtatgtgagatattttgatacaggcatataatgcataacaatcacatcagggaatggggtatccatcctctcaagcatttatcttttgtgttacaaacaatcaaattacactctcttagttatttataaatgtataataaattattgttgactgtagtcaccctgttgtgctgtcaaatactagatcttacacattctatctaactataattttgtacccattaactatccccacttcccccacccactacccttctcagcctctggtaaccattattctactctccaactccatgagctcaattcttttaatttttagccctcacaaataagtgagaacatgtgaagtttgtttttctgtgcttggcttatttcacttaaaataatgacctctagttctatccatgttgttgcaaatgacaggatctcattcttttttattctttttttatagtactgcattgtgcatatgtaccgtattttctttatctatttgtctgttgatagacacttaagttgctttcaaatcttggctatggtgaacagtgctgcaataaacgtaggtgtgcagatataacttcaatatgttgatttccttacttttgggtatatacatagcattgggattgctggatcatatggtagcactatttttagtttttgtttgtttgtttgagatggagtcttgcactgtcacccaggctggagtgcaatggcatgatctcagctcactgcaacctccgcctcccaggttcaaacgattctcctgcctcagcctcctgagtagctgggattacaggcgcccgccaccaagtctggctaattttcatatttttagtagagatggggtttcaccatgttggccaggctggtcttgaactcctggccgcaagtgatctgcccgactcggcctcccaaagtgctgggattacaggcgtgagccactgcacctggcctatttgtagtgtttttttttgagatggtgtttcactcttttttcccaggctggagtgcaatggcgtgatcttgcctcactgcaacctctgcctcctgggtgcaagtgattcttcttctgcctcagcctcccaagtagctgagattacaggtgcctgccaccacgcctagctaattttttgtatttttagtagagacagggtttcaccatgttggccaggatggtcttgatctcttgacctcgcgatccacccacctcggcctcccaaagtgctgggattacaggtgtgagccaccgtgcccggcctatgtttagttttttaaggaacctccaaactgttctccagacatttccactaacagtgtacaagggttgccttttctccatgttcttgtcagcatttgttattgcctatcttttggatataagcctacttggggtgagatgatatatctttttttgttttgttttgttttttgagacggagtcttgctctgtcacccaggctggagtgtgcagtggtgcgatcttggctcactgcaacctctgcctctgtggttcaagtgattctcctgcctcagcctcctgagtagctgggactacaggcgtgcgtcaccacgccccgttaatttctgtacttttagtaaagatggggtttcgctgtgttggtcaggctggtctcaactcctgatctcaggtgatccgcctgcctcagcctcccaaagtactgggattacaggcatgagccacccgtgcctggcctttcattgtagttttgatttgcatttctctgatgctcaatgatgttgatcaccttttcatatacgtgtttgctatctgtatgtcttcttttgagaaatgtctattcagctcttttgcccatttttaaattggattattgaatttttttttcctattgagttatttgatctccttacgtattctggttattaatcccttgtcagatgggtagtttgcaaattttttcctcctattctgtggcttgtctctttgttgattcctttgctgtgcagaacctttgtaacttgatgtgatcccatttgtctacttttgctttggttgcccgtgcttgtggggtatcactcaagaaatctttgcccagtacaatgtcctggagaatttctctaatgttttcttttattagtttcatagtttgaagtgttagatttaagtttttaatccactatgatttgatttttgcatatggtgagagataggggtctggttttattgttctgcatgtggatatcccgttttcccagcgccatttattgaagagactctcctttccctaatgtatgttcttgatacctttgtcaaaaatgaattcacggccaggcgtggtggctcatgcctgtaatcccagcatcttgggaggccgaggctggtggatcacctgaagtcaggagttcaagagcagcctggccagcatggcgaaaccctgtctctactaaaaatacaaaaattagctgagcgtggtggcgggtgcctgtaatcccagctacttgggaggctgaggcaggagaattgcttgaacccgggaggcggaggttgcagtgagccaagatcgcgccactgcactccagcctaggggacaagagcgagacttcatcttcgtccccccccgccaaaaaaaaaaaagccactgatttttttttttttttttttttttggagacggagttttgctcttgttgcccaggctggagtgcaatgggtttttttttttttttttttttgagatggagttctcactctgttgcccaggctctggactgcagtgacgcgatctccactcaccacaacctctgcctcccgggttcaagcaattctcctgcctcagcctcccgagtagctgggattacaggcatgcaccaccatgcccagctaattttgtatttttagtagagacagggtttctccatgttggtcagactggtctcgaactcctgacctcaggtattctgcctgcctcggcctcccaaagtgcttgctaggattacaggtgtgagccactgtgcctggacaatgctactgattttttttttttttgaaacggagtcttgctctgtcaccaggctggagtgcagtggcgccatcttggctcactgcaaccttcacctcccgggttcaagcggttctcctgcctcagcctcctgagtagctcggactacaggtgtgcatcaccacatccagctaatttttgtatttttagtagagacaggatttcatcatgttggccacgatggtctcaatctcttgatctcacgatctgcctgcctcggcctcccaaagtgctgggattacaggcatcagccaccgcacctggccaatgctactgatttttatgtggattttgtatcctgcgactttactgaatttattagttctaatagttttttggtggaatccttaagattttttaaatataagatcatatcatctgcaaacaaggataatttgaattcttttccaatttggataccctttatttctttctcctgtctgattgctctagatagaacttccaatacagagtcttcttaataaaacataatcataggatcatatatagtcatataccacctttgccatatcctgttggttagaagcaagtctcaggttttgcccatacccaaggtgagggattgcacaaaggcatgaacaccaggaggcagctactggtggggaagaccttagaatctgtctgccacatccatctagagcttaaacttactcatgtgtaatgtgtgaattgaggatatatttcaattttttttaacagccagttttctaagcatgattagcaggcatctgcaaggtagcatgtatgttggcataggttatggaaaggaagtcagtgtttcctgcttaaaattcctctctgacaactggagcctgttggtgagggggagccttgttctgttcttggcacactggagtgtatctcagaggccttcttgaacagcctgtaattcctgcacatcctggctagatgaggtgggggtcttggtggtgcacacaggatgccacaatccacagggaatggccccttggggtggagaagggtaatgaattattataggcaaatcctgcagtgttgaggtggtgggccagccccttcctgtgttggttgttaacatgcagttaaggctgtggacagatggatccaaataccaaacagttctttctagaactaggcaaggacttgaaggagggagtctgtgatcagccagctgggaaatctgtggaggaagacattgtccaaaccaaaagagggatcagcagcctcttgataattgactatgttggtaagggcatccactagccctggccatttagatggtgtctggccaagagaggggcaggttggtgatgaaatctgttgtgatggcatcttattttcatatttttaagtctattctattagcggtgcatgggattgggattgcttatctgtgactataacagtatcgcaggtgctgctttgctggaagggactgagctgaagagggcctgtgggccagattggaggtaggaatgtggaatcatagtggctctctagagtggtgtggggcaattctgccaaagcagctgctcagactctgggtcagcatctgaggggctttgccccttatggacatctgcttgatgtccctgccagattagctgggttaaccatgtccaaggctacacgtaacagtatgtcaccataaacctcaggaagaacagagtcagttccaggctccctcctgccggcccctgatgcccttgggcattctgcttgttgaccacttggtggttttgatcttggtcacaagtgatggaaacatggagacctgggccagggcaggctccttatgtcagcaggtaggcagtgaagggaagcagatggggtgcagctccagcagatgcaggcctaggtgcagtactgatgggctccttggcctgggaaaagccccttaatgatcctgcttcttttctgtaaaatgggggcaataatgcctacttctcagaaggcttggggagattagatgagctagtgtggagcacctagcacagagttggtgccagaaggcacttgataagtgatggctgctaccgctgttgccatgttaaggcaggttagattaggccaagatcatggcagaaatggagatattttaggtctgcagttgtagcttccctgactgcagactgtgaaccctacatgaccttggcaaatgcatgggcagctgcagtttgccctgatgtcattagaagcttccagggaaggataaagacctctgagacccctgggctgctcagaatctactaaatgggtggatagggcatgagggtggcccctgccaaagggacccctgtttatctgccctgtctttttgttgtctaattccccctgggtggtggagcctggaaactgtgaggtccagcagagcattccatacttccacataccctgctgccctagagtaaagaggctggacaggcctggagtggtagggaccacaaatctagggaagaatggagtccagagccaggagtggggaaagtccaaaaggaaaacctcttttgttggcccaaggcagttgtcaaagttgggatcatcaggaggcatgtccagagagatgagagaaaattctgagcccagaacaagggcaggtggggagggacagctgggtggaagcgccggtcctaagcagggagaggagacgttctgcctgaaagtgtcggcttaaagaatctgtttctgagcctcctgtgtccccatccccccgtcagctgacccacctcttcctgttcctccagaccaagctgctgacccagtatgtgctgagtctggccaaatatgaccagaactatgatattcgcgaccgggcgcgcttcacccggcagctcatcgtcccttccgagcagggtggggccctcagccgccatgccaagaagctcttcctggcacccaaaccagctccagtcttggagtcatccttcaaaggtgggagctgaaatcaagggtaaccttcctaggggaatggaaaggaactggccagagtctctgccccagaccttcctgaggcccctagccaggcaccaggcttctgtggacagtcctgctccctggctcactccttttgtccctcctgtggcaccaggaattactctttcaccctcccataaccactgccagcatcatctcacctgagggtctgccttcctggccaggatggacttgtgcctcctctcctctcaggctcccttttccatctccctccctgagcagacactaggctttggaatacataccaagatcttaaataccaaggacccaggaaggcagaaagcaaaacaacacacaaaggagaggtgtatatttttataaaggtcctgagaaagcagttgcctgcattctgtgagcttagtcactacagtcagtccaaatcccaggccccagggcttcagccttgcctctgttcctgggcttggcccttaaggcctcttttcccaagacaacggccttgagatgggcctgggagggaagggtcctcccgctgcttctccgggccccaggagtggaagccaggaacctacacagaagagagcctccttcacaaagctcagttcttctgggtatcttttcgttctttttctcttccctggacctcacgaatggggagattctgagggtgggcacagctttgaaattctcccaggaagaaggcaacagtccctttctccccgacaccatcctcactcacaggcctgtgctgccctcctccagcagtgcctcaactctgatccagacttctacacactcatgctctgactgttcatccctccctgctgagtccagagcctgactagacgtgcatgctgagcagacaggtcggcagcatctgtgggcccagagtctcctcctgcccacctctgtaggctgcctttccctggccctcagtccctgctctggcctggccagacagccttttcttccagcatgtgggcctaaaggtgcagtcagggtggaagagccattagggcacacatccatctccttcccctacccacctgggaagtcccaaccagaatcaccacccagccccacctggaaaacagctcccagagctttccctcactgctgctacctgcctgacctctaaacctatccctagaccgggaccacttccagctgggctcactgtcccacctgcttaatgccaaggccacaggctaccaggagctcccagactggccggaggaagccccagacccatctgtgcgcaacgtggaggtcagcggggtggagggttgaagtgtgtgtgtgtgtgtgtgtgtgtgtgtgtgtgtgtgtgtgtgtgtgtgtgtgtgtgttggtgggggcagacagtagggagccctggcagtgccggcccagccctcctaacaccctcccccacacacacaggaagaagatctctcccttattgagactcacgtgggcctgttgggcgaatacactgaggtcccaccttcgtgtgacgtgtgctctctcccctgccctgtctgtgtccctcttcttcccctgtgtgttgtgctcctgggccttcccatactctgtttccaccttggtttggcagtgctcctctgtgagcagcattccctcccctccatggacagtgcccctttcttcctcctctgttattccctttgtgggacagaccaggtagggcctcacaaagaggtggaataaagggtaagggcttgtgcctgcctgccttctccccaaccatgatgaaatgaccctgcaccctacccccatctccaggtacctgaatggaccaagtgctcaaatcgggagaagagaaaggagaaggaaaaacccttctactcggactctgagggggagtcaggccccacggagtccgcagacagtggtgagcagatggcagagctggggtcctctgtgctctgcccatgcatctgtgtgactgactatatgaggggtatatgtatatggttgtgtgtctaggggtgtgcacctgcttgtgaattgtttgtgcacctgagggattcatgttccaggtgtgtgtgcttgtgcaggtttctatccatggagtccatctgtgtttctgtcagttccagctggcatgtagggctgggggcaggtcagagaggtttgagggttcagtactgaatgtgaaggtggaacccaggtgtctgctccagacccaaggaggcctgcatatgagggaggaggcctcatattgttcctccacagaccctgagtctgagagtgaatcggacagtaagagcagcagtgagagcggctctggggagtccagcagtgagtccgacaatgaagaccaggatgaggatgaggagaaagggagaggcagtgagaggtgagaagggagctagccagatggctggtggggttcagggggctttcctggaaagagggctagcattgagctttagccagtctcctaagagcccctgagcccctcgtgagctgggtggggctgtcagctcacatgacgcctactttcgctggctgcaggagatctctgaggcctcatgggctggtgtggagaagcaaccagagtcctagagcctgagctggcacaagctggcttcaagctctcacggggtccctgctataggacctcaggtgtgaaccctcctggctcaggctccccacaccactccagcttttcagcatttctcctgcttctgtgaagcaaggagggagtgtccaggccaggcctgagccaacctttcccactccttcagtgaacagagtgaggaggatggtaagaggaagacaaagaagaaggtgccagagagaaaaggagaagcgtcatcctctgatgagggcagcgattccagcagtagctcatcagagtccgagatgacatcggagtccgaggaggagcagttagaacctgcctcctggagcaggaaaacagtgagagccttggggcagagtcagggtgtgctcatgggccagggccctccccaacctctgggccaggcccagacatctatctccctaccatccagaacagaacatgacatcttctacccaacccagaacatgccaaggtgctccccttccccacacccacatcccatttttctctttcagcctcccagcagcaaaagtgctcctgcaaccaaggagatctccctgcttgatctagaggattgtgagtttgggtggtaaaagtcacaggggaaaggaggcctggggagcatgaattagaacagcccatagggactctggatcgggttcctcaggtcttgtgggagcaggggagcagacagaacatatcttcaggcctgagagggcagcagggctgacctccccaggtctggggttgaggtctaggaatgggtattttgcgagagcctccaggcagccatgtgccccgctgtccatggtgctgaaatgcgtgctccttgatccctaggctccctgctcaacccaagccacctccactttgcctcctcatagtcttatctactcccacagtcacccctcccagtgtccagcctgtgtctcccccagcaattgtgtctaccagtctggctgctgacctggagggcctgacactcacagactccaccctggtaccgtcggtgagtgggatggaggaggggaccgggctggggcagggacacatccctgtgctgcatcctatggtgtggatgtgtgtggggggtgggtgtgatggaggatgtgatagctttgagtcccagctgctggatggccctaggggacaatgctgggacaggctctctccatcttgctcagttctgtccttccctacccctccactctagcttctgagtccagtatcgggtgttgggcggcaggagctgctgcaccgggtagctggcgaggggctggctgtggactacaccttcagccgccaacctttctccggggatccccacatggtgtccgtgcacatccacttctccaacagctctgatacccccatcaagggcctgcatgtgggcactcccaaactgcctgctggcatcagcatccaagaatttcccgaaattggtgcgaagggctttggatggggtggaggaggaggctcctgggcagagtcagtctttctgtggttgctgataccctccttgtgccaggccaggggccaagctataggggcacagagatagcatctaacatgatcaacactctggtggacaagacagatgatgaaataagcaagttcacatcagggcgggaggtgcttgcagcagcagatttgggccttggttgtttcaggactaacttaaatgtggtgagggtgagtgggggaaagggtgcttagagttcaggaggaaaccgggaacagtctccagcagccaagaaagccaagattctgtagagggctggtcagctgtgacagtggagaggagagtagggctaggctgggttctagacctatcaggtgatggtggccctccctctccccttcactgccttataccacttcagagtccctggcacctggagaatctgccactgctgtaatgggcattaatttctgtgactcaacccaggcagccaacttccagctgtggtatgtgcccaactcgaggtgggggtgagaggatgggctggaaagggacagggtaacaatgaactggaaatggaggtggtgcttagtggggatacatcatgattgggtgggtctggaagccatctcaggccctcattcctgacctcactctttcactgcctccaagctgtgcctctacacagggtgggaagtgaggggagagatgacagccttaattcttctccgtttcctcccacccctcccagcacccagacccgacagttctacgtctccattcagccacctgttggggagctgatggcccctgtgttcatgagtgaaaatgagtttaagaaggaacagggtgagtgctccctgggagtgggcagagagggaagtatagaagctgactccagaatgtccagcttggatggtagggagaatggtggtgtccttcatctagaccaggggtcagcaaactttctgtaacgggccaaagataaatgttttaggctttgagaatcatgtggtctctgttgcagttacaacacgactgtggctgttgaaacatagaaacatccacagacagtatgtaaatgaacgagtatggctgtgttccaagaaatttccatttatatttatagatactgaagtttaaatttcatgtaattttcatgtgtcatgaaatattaatcttttgattgctcccccaacacttaaaaaatattaaaaacattgtgggccatataggtggtgggctggatttggtctggaggctgtaatttgcaaaacctctggcctagaagaaagaagagtggcttgggcaagggaggagggaagatcatggttagttttggataagctgattttgaaatgcatttgggaaattcaggaggagctatttagtatgcaactgaaaatatgggtctatgcccaggaaacactttgaagctggagtcatgaacatagaggtggtaatggaagctgtgaatatgaatgagatcactctgggaggtgggagaaaataggaaggccaaggacagaaccttgggggaaaacctgaattctgcagaagaaagaggaggggagggataagagaaggagcacagggagaggtgggaggagaaccaggagagacaacaaggcagaaggtgtctgcaaaccacagttacctaagaccttcagagtcagcatataaaaggctactgccaacctgagggagagagggtcattgctaaaggagggacagaggccaactgcagtgggttgagggagaccacggctcaagtacatgcagtcctctttggaggactttagccatgaatgaggagggagacagggcattggcacgatgaaggatctcacttctggaaaggattttttggagacggggacacttgaacatgaacagattgaaggaacaaaaacaagaaaatgttattagtcatgaatgaaggggatagaagaaacaggagagggatgtcagtttctaaaaggaggtgaagaataggggaagcagtggagggaggaaagaggctgaagagaagactgctggtgtgcaggagagcagacggaggagctcccatggggggcctggatcatgtgagtggagagaagtcagccttgcagaatgaggagttctgggggtgctgtgaaggtttggaggcttcaggagccctggctaggtctggagctgctactgcagaggtacaattaaaaatgtacctgtgaatgctgcatgtgactactggattctggctgagagatcacagcagccacctgtgatctttttgtgagggcttagcttccaggagctgagtgggagttgaatgtgggttggagggccccccaggaaagatcaaagggtgtgaggttcaggatgggcgaacctcttaagaactgactggccactctcaaggggctggtagcccagatgtctgatggaggaagcgccaaatcagtctttggtaacaacatggataaaggcctgggtgggaggggtagagaggctgacaaaggcttcctgagggagggcccagtctgagagggaagtaccttctccccaagactgatgatttaaattctgacctgccctttgcatgataccttcccagcctgggagaacttgttgctcagtaagcagacccaggtgctggcctctgtacccaccatggcctctgccctcatcacgacctctacccccaggaaagctgatgggcatgaatgagatcacagagaaactcatgctgccagacacctgtcggagtgaccacattgtggtgcagaaagtgactgccactgccaacctgggtcgtgttccttgtgggacatctgatgagtacaggtactaggccaccagtagaggggaaatgatgagcatgggggccctggtttgaaggaggagccccagctgctgatccccttccaaacacagtcacccttagcagctcttcctcaccccttctattcccacctcaggtttgcagggaggacactgactggtggaagcctcgttctgctgaccctggatgcccggccagctggagctgcccagctgactgtcaacagcgagaaaatggtgattggcaccatgctggtaaaggatgtgatacaggctctgacccagtgacttccaaatgctgtgacctgtttggctcccatctatacctccccatgacacctaggctgtcagtctctctcatctttctctctctctctcatcatcctcctcatgccagatagcattcagggtgtcctctctccctctggaggaccaagccctcccctaatgccctccccatggattccttagtgatctgtgcagagagagatggcagccactcccttcagtcctcccagatttctgtagctatttat

SEQ ID NO: 15432 - DNA, 50434 bp, Homo sapiens
gcctcctcgcggacacgccctccgctcggctggcgccggtgcctttaagacctcagcgcgcggccctgattgagaaatccgcgcgcagcctccgccgctgcacactgcagcctctgctgaacccctgccgcgccgccgccttcgccagcccggaccggaccggcccgccttcccttcctccgctccagccggcctccggccccgcaacctcctcctcggcgaagtctccctggccgccccatgtcggccgcccccgcctacagcgaagacaagggcggctccgctggccccggggagcccgagtacggccacgaccccgcgagcggcggcatcttctcctccgactacaagcggtgagggagcccgccaggaagctcgcgggagggttggggccggggaccgggcgaggcgcgcgggcaccatggacagcgcccggccccagcgccggccccgccccggccgcgccgaccggaagcccgcccggccccctcctgcggcctggagccccggcccagcgcgggcagcgctggcaccccggctccaggggccggcctaggacgcggaggggggcagataggggctggcgggggatgggccagctcagtttcgagaggagaaaccctccggttccaggtgtttctccggtttgcggcgttgcgttaggggttcccttcctttttcgtgctaggcgggttggcttcccaaaaatgtgggggaggggtctgagtcagcgaacttgagcttgagcctggggcctcttcaggaaggcgggccctggatgtacttgcacagcctcccagcttggccctgctgcaaattcatttcccctccctctggtccccatctccatctgaccctcacatccctgctcctggcattgcccctgtagttcagctccaccttcacaccctcccccacctttgattcgttcgtttgtttcttcatttgtttattcgtaaattctgcaacaagcatttatgaaaagccaactgtgtcgagtcctgaactagtcacggaatacaactgtgaacatgagacccttcttgtcctcacgatgctctagaggggagcacagatgaagaagcagtcagggacagtcgagtgtaatgggggcagtgggagcagggagaggacctagtctctggcgccggagagaaggaagacaggagcgtgaggtatgttccaggcagaggaaagggctttcaggaaggttgagagccaggccacaatctgtgtgagccactggactgaccagaaaagagggtggggaggactcctgaaggattctaagcaggcgacataatcagatttatattttagaaggacgtcaggctgctgcattgtggagaagagattggaggtgggccagattgaacaagagacaagggaggtgggtcttgaagttcacaggcctggcatgattgtggcctagaccaggggagaggcagaagatttgaggctgtggaagaggtggaagcctcagacctgatgattaattggatattgggtgggggtttagagggacagggggagaagatgaggattttcacgcacgtccatgtgaagagaccaccaaacaggctttgaacaataaagctttttaatcacttgggtgcaggccagctgagtccgaaaaaagagtcagcgaagggaaatggggtgggaccgttttacaggatttgggtaggtagtggaaaattacagtcaaagggggttgttctctggcggtggggggacacaaggtgctcagtgggggagcttttgagccaggatgagccaggagaaggaatttcacaagataatgtcatcagttaaggcaggcacaggccattttcactcttcagttacttcaggccatctggatgtatacgtgcaggtcacaggggatatcatggcttagcttgggctcagaggcctgacattcctgtcttcttttattaataagaaaaataacataaaatagtgttgaagtgttggggcagcaaacattttggcggggggtggtatggagagatactgcttctccatagccttgaagggctgcttcgagcgggattggggtggcgtgggaacctagagtgggagagattaagctgaaggcagattctgtggtaagggatgatattgtggggttgttagaagaaacatttgttgtataggattattggtgatggcctggatacggttttgtatgaattgaaaaactaaatggaataagagaaggagaaaaacaggtattaaaggactaagaattgggaggacccaggacatccaattagagagtgcccaaggaggttcagcatagccctgccagcaaagattatttatttactttaagagggagttaagactggcagtttggggatagcaccaggagatatcagctgtaatggtttggagaaacagtgtaaaccggcagtgtaaacaagagcagggcatgtatgagtagttgagtatggtgaataggagtatgactagtcagaagatagtagggatgacaagttttctggggcacagtccaagttggtctggtgtctggaatgagactggggcctaataaaaaggagcatctatacaggagcttgaatgggctgtaccctgcagcattccgaggacaggcccaaattctgagaagggcaagtggtaaaagtattgtcagtcctttttaagttggtggctgagcttggtgaggtgtgtttttaaaagaccattagtccgttctaccttttctgaagattgaggatggtaaggggtatgaaggtttcactgaataccaggagcctgagaaactgcttgggtgatttgaccagtaaaggctggtctgttattggactatatagaggcgggaaggccaaactgaggaattatgtctgacagaagggaagaaatgaccgcagtggccttctcagaccctgtgggaaaggcctctacccatccagtgaaagtatctacccagaccaagacgtattttagtttcctgactcggggcatgtgagtaaagtcaatttgccagtcctgggcagaggcaaatccccaggcttgatgtgtagggaagggagggggcctgaacaatccctgaggagtagtagaatagcagatggaacactgagaagtgatttccttgaggatagatttccacaatggaaaggaaatgagaggttctaagaggcaggctagcggcttgtaacctacatggaagaggttatgaaatgacgaaagaatagaatgggcctgtgaggctagaaggagatattttccttggtctgagaaccatttgccttgtgtgggaagagattcataggtgtaagtttcattgggggagtaggtaggagtgactgatgagaaggagaaaaactggccatgagggacagaagttggaatgctagctgcttttttagctaccttatcagcataagtgttgccctgagcgatgggatctgatgccttttgatggcccttgcagtgaatgactccagcttcctttggaagtaaagcggccttgagaagagtttttattaaagaggaattaatgatggaggacccttgtgtaatgaggaaagctttttgcccatataacagcatggaggtacaggatatggaaggcatatttagagtcagtataaatattgacacatagtccttttgcaagactgagggctcgagttaaggcaatgagttaagctttctgagaggtagtggaggggggcagaaagtatatgcgtcaggtgtgaggaagaaaatagattttggaagttatgagaactgtagagagtgagttgagcatagtttgtgattttgagggcctctgaaagtattaaagcagcggcagccgctgcacgcagacatgagggctaggccaaaacagtaaggtcaagttgttcggacagaaaggctacagggcgtggtcccagctcttgtgtaagaattccaaccgcacagccctgcactttggctgtgtgtgatgaaaaagggttgggatgaattagggagacctagtgtgagagcagcttctacggctgtttttaaggaatggaaaggagtggcaaaaggatttaggatctgtggggtcagctaggtttgcttttgtgagtttatataatggtttagtcaggatggtaaaactaggtatccaaaggtggaagtacctaaccatcccttgaaaggaaaggagttgttgctttgtagaagggattggggttcgggagattagccggacatgatcagcagggagagcacgtgtgttttcatgagaactatgccaagataggtaatggatgaggaagaaatttgggcttgactgaagtaatgggggctgtccgtgaagccttgcggcagtacagcctaggtagtttgctgagcctgatgggtgtcagggacagtccaagtgaaagcgaagagaggctgagatgaagggtgcaaatgaatagtaaagaaagcatgtttgaaatccagaagagaatgatgggttgtggaggggttgtggagggaggtattgaggaggagagtatatgagtttggcaccacggggtggataggcaaaacaatttggctgacaaggcacagatcctgaactaattgtaagacttgtctggtttttgaacaggtaaaatgggggaattgtaaggagagtttataggctttaaaaggccatgctgtaacaggcgagtgataacaggctttaatccttttaaagcctgctgggggatgggatattgacattgagcacggtaagggtgattaggttttaatgggatggtaaggggtgcatgatcagtcgccaaggagggaatagaggtgtcctatacttgaggattaaggtggggagatacaaggggaggatgtgaaggaggctttgaactgggggaaaaggtggcaatgaggtgtggctgtagcctaggaatagtcagggaagcagataatttaaagtgtctcggcctaataagggaactgcgcaggtggggataactgaaaaggagtgcataaaagagtattgtccaagttggcctcagagttggggagttttgagaggtttagaagcctggccatcaatacccacaacagttatggaggcaaaggaaacaggcctttgaaaagaaggtaatgtggagttggtagcctccgtattgattaagaaggggacggacttaccctccactgtaagagttacccaaagcatctgtgatggtccaggaagcttccaaggcgattgggcagtgtcagtcttcagctgctaagccgagaagatttgggaaggagtcagtcaggcagccttgggccagagttccaggggctctgggagtggctgccaggtgagttggacagtccgatttccagtggggttccacacagatgggacaaggcttaggaagaatcctgggctgtgggcattccttggcccagtggccagatttctggcacttgaagcaagatcctgatggagaaggtcctgtaggaatgcttgactgctgcagcttaggcattttgaagttcttgtgtactggagatgtggctggggtttctctcacagtggaggcaaggaactacaactcagaaatacattgctacttggctgcctttactctattattgtacaccttgaaggcgaggttaattaagtcctgttatggggtttgagggccggaatttaatttttggagttttatttaatgttgggagtggattgggtaataaaatgtatattgagaataagactgccttttgaccttttagggtctagggctgtaaagcgtctcagggttgctgcccaacgagccatgaactgggctgggtttttatatttgatgaaaaagagcctaaatactaactgatttggcagaggtcggataaaggaaaaggagcgttaaccttgactatgcctttagctccagccacctctttaagaggaaattgttgggcaggttggggagggctagtcgcagaacaaaactgtaagccggactgggtgtggggagaggaggtgatagaaggattatagggtggaggagcagaagctgagaaagaattggagtctgattcagcctggtggggagtgacctgaggagcattctggggattaggtgagaggtcagatgggtcggtagaaaaggaagattggaagattgaaaagacgcagcgacgcttggggttgggactgaggggacaggcgggagggaaagaaggaggatttgggatgagtcgcattgggaacagagactagggagggaccgatgtgtaaaagaatgcctggacatcaggcacctcagactgtttgcccattttacaacaagaattatctagatcttgtaggatggaaaaatcgaaagtgccgttttctggctatttggaaccattgttgagtttgtattggggttaagcggcattgcaaagaaaataaggcatttaggttttaggtcaggtgtgagttgaagaggttttaagttcttgagaacacaggctaagagagaagaaggaggaatggagggtggaatgttgcccacagtgaaggaggcaagcccagagaaaagagagggtagagacacggagagaaggggtggggggtgctttgccccccaggaaagtggagagaaaagagagggtagagacacagagagaaggagtcgggggtgcttgtcccccaggaacgtggagagaaaagagagggtagaaacatggagagaaggggtggggggtacttgccccccaaaaagtggtgtttgccactaagggtgaaagatcaaggcaggcatcctcgcggtgatcagacaactctgaaacgtgggtgaataatcaagcaggcgtccccgcagtgattaaacaccaagggaagactgtcttcctgagtccgtgatcggcgccggagttttgggttcacagataaaatgcatttcctgtctctaccagaaaaggaaaggaaccgaaattaagagaagggagagattgaaagatggcaccaagattgaaaggagaaagaggttgagggatagtgagagaggttggagaagagagtaaaaagaggccgcttacctgatttaaaattggtgagatgttcctcaggctggttggtctgaggacccgaggtcattaggtggatctttatcatgaagcaaagagcaggaggacaggggattgatcttccaagggtggtcccccgatccgagtcatggcaccaaatttcacgcacgtccatgtgaagagaccacccaacaggctttgtgtgagcaataaagctttttaatcacctggttgcaggccggctgagtctgaaaaaagagtcaacgaaaggagataggggtggggccattttataggatttgggtaggtagtggacaattacagtcaaaggggggtgttccttggtgggcaggggcgggggacacaaggtgctcagtgggggagcttttgagccaggatgagccaggagaaggaatttcacaaggtaatgtcatcagttaaggcaggaacaggccattttcacttcttttgtgattcttcaattacttcaggccatctggatatatacgtgcaggtcacaggggatatgatggtttagcttgggctcagaggcctgacaaggatgttactcaggttactagttcctgcaactggatggatgatggtgttattcagtgtaattggaaataaagatgttacaagcaaatttgtggaaaattaatgttgagcccagctttggacatattgagattgtaaactctgagggacatattaccctattaggtagctggatattacgatttgggttccaggagagagattagggaattattaacatatgtatgttaattaaagccacagaagtgaagataactcagggaggaggtataaaatgagttcagacactgcacaagtctgaaccctgaagacaccaacattagaagtgaccagagaacagtggaaagtgtttcaaggtacccaagaggtgaactaaaggctgaaagaaaacaatgtaatttcaagaaggagggagtggtcagtagtttcaatgcccattaaggtcaaatcaaacaaggaaaaaaatcatgaccattggttgacaaagaagagctcaattcctttctactctattccccacctcctgccctgggagataaattctggcaaagtaaggagaacaggagctagattatttctttcccagcattctgttgtggatgatttaaaacatacagaaaaatgaaatgaataatacaatgaacacatgtatatcatccatctagattcaactgtcattgacatcgtaccttatttgctttatctaaccatctattcgtatactttttttggttgaaccatgttaagttgcagagatcatgacccttcaaccccacattctaagtcgacatctaaagccagattaaaatgaataaaggagcacacaggtggtaagtagataaaacagtgaatggaaattttgctttcaagaaatttgactgtaaaagagaaagctgctggaggagaacctcactcagttcaaggaagtttgtctattttgttattttgggtttttttttttgtttcttaaaatgtatgactccatatttttgtttattattaatattaggcgggagagcctagagcaagtttaactgctgatgggaaggagcgattggtgggagagaggctgaagggaagaaaggaagtacagaacactgagtgatgggaggggaggcttactgagctgggtgggaggactagcctgggagcagggaggaccaactctgcccagagggaagagggcaggaggagaggagagtataaatgcagatggagactgggtacagtggctcatgcctgtaatcccagcactttgggaggctgaggcgggcaggtcacttgaaatcaagagttcaagactaacctggccaacatgtcaaaaccccgtctctactaaaaatacaaaaattagccagttgtggtaacgcatgtctataatcccagctactcaggaggctgaggcaggagaatcacatgaacccgggaggtggagattacagtgagccgagatggcaccactgcactccagcctgggcaacggagtgagactccatctctaaataaataaataagtaaataaatgcagatggatgggagtctggggcagggggctgcaggggatttcatctaaagactttccctttttcgggaaccaggtggtgaagccataagggcaaggctgggaatggggacttgagggtcaaaggggtttcaaatacaatgaagaaagccaaccaggccaggcgcggtggctcacgcctgtaatcctagcactttgggaggctgaggcaggcatatcacctaaggttgggagtttgagaccagcctgaccaacatggagaaaccccgtctctactaaaaatacaaaaattagccaggtgtggtggtgtatgcctgtaatcccagctacttgggaggctgaggcaggagaattgcttgaacccaggagacggaggttgcagtgagccgagatcacgccattacactccagcctgggcaataagagtgaaactccatctgaaaaaaaaaaaaaaaaaagccacccaccactggcaggccagtggcattggagaccagtgggacaagagggccaaggatgtgagagcagttggagggatagacacaggggttgcgggggagggtgctaggaggaagtagagataagagaaggttgatgggaaggaataaatcaagtattggctctggaaaggcaggtgaggattaagatgcctagggtcagtgagaagagggtatatgagatttctcaggaggctgcagtctaattgtggcagtgggattggagctgaagagggcatctctcacctctctatcaactccactgaccatctagtcccttgcccagagactaggggtaggcttggtctcctgtccctgcccttctttccctctagaggccttgtctctgagcagtgaagaggaaaccggagcatccctccctgccagtgtccggttaccaagttttgggggcgggccatctggtgactgtgacaggagccccagcgccctggccagctcagtccattcctggagaagaacctgatgcagcgattcctgcagctcccgggggccgtggtgaggcctggggtcagaggggcctgcggagctgatcaagaggctgctagccctgtgctggctcccgaaggtgggcccccactccggtaccaggccttggagcctgaggagcttcggtggctgcaggcccaggaggaagacacgaccccagaagcatctctggaaggaccttgcccagaggccagccagagccagagccagccactacggtatagaggaacccacaggaaccccctacccacacagccaggaaggccagggatgggcagttgcactctcagcccagacctcttccggtcccacctcctctgatggaggcttaggctggcatttagggtccaggctgggcggagaaggtggtcaggggcaccgtatgggggctgagggtatgagtgaggagagatgaggggcttaactccctggaggctctgaggggaggaggatagtaaaatatttgagggttgaggtcccaccttgacctctttctccccacaggcccccactggagtgggctctggacgaggtttggggacaggatacagcacagacagggtttggccagccactgcctgccagtggactggaacttaggtggtaagaggtgacagcgaggtgtatatcaagggaggtgagcatgactgacccccagtgccatgccaggccccctggctggctccagccacccccagaagagtcccttaggctaggtcagactaggggtcaggtcagagtgagtgcagcagcgtaaggggatctgactatgggagataatgtttcatggccttagggtgttgtgccttagtccctgcctctgcctcttgggaacagaagttggtgggagtgaggacgagaggcccagggcggtctcacctcaggtggtggctgcggtctgtgtcagtgcatattctgtgtcagtgcatattcgacagtcaatcttacctgtgctggctgctttaggcccagtggtcctgccccctttcattccccttctcctgcaggggcctggaatgtactcactaggctgggtggggaggatgccctggggtgtgtgcatttgacaggcgcatgtggcatttgtgggtgtggtgaggaagggaatacccagagttaaaggagattgggcaaacttggccctccttccacggaagcccagggaaaagccatcccagggtgactcctcagaagatcagaggacccttggggctggatatatttgatcttagaagcctacatttatcatcaaaaatctcaactaggagtccactgaccattttggtgaatgagactggagaggccaagtttggtccaagttatctgtgtattagatgtgatgcggcatgtgtgtgtgtgtgtagggggacgtgtgtggggtgtgtgtgtctctatgagggtgtgggggagcggggagaggtcttgtgatatatgtctgtaggggacatgtatgggatatgtgtgtctataagagggtgtgggagagtggggagaggtctcctggtggtatatgtctggggggtttgtaggtgtgtaggtgagttgtgtgggtggtttatgtgtgtagagtttttctgtgggaggtgtctgtatgtgggggagtgtgtttctctgggcgttgtgtaggcaggattttgtgggtgtgcgtgggtttatgtatggattctactagtgtctgcgggacctgtaggtatgtttgtatgagctgtccgtgaggtgtaggtatgtcgggggacatgggagtgtctgaggtatatgtgggtggtatcaatgtgtagttgtctgtggggtgtgcgtatgaaggatcctgacgtggagtgttgtgcattcatatctcagggaagctggtgcccagctctgtcatttttcctaggccctcggtgctgcccacgcctacccagctcaatggtctgtacctatgaccatgcccctggtgtcctgagctcagcctcctacccactaagaaactcaacagtctggtctgtgtttggcagggtaagagggtgattgtcttctggccctggcctgaccctggaagagtagaaggtgtcctctgatttggggggcatccccccaggtgagggagtttcagataacatgatggggctggatattttcttctgtcctcacatgacagatagcgagggcctcagataatgctggaaggcatcatctttctattttgctttccatcaaaaatctctttgggaaagacagtttctaacattcttgggatagtgacttcttagtgcccctcttcttgtctgacgtcaggtactcacgcatttctgcagccctgtgactaagttgcgtgttctgtctggttcttctcttcctctcagcattcatcacttgtttctcagcattagcagcagtcatttgccactttatgattgttatcatgctctttcctctcctaacagtgctatccccaatttctgattttctgtcatttctaaatgttgcatgtctgtgactaactttgcacacattgattttttttttattttttatttttgagatggagtctcgttctgttgcccaggctggagtgcagtggcgcgatcttggctcactgcaagctccacctcctgggttcacgccattctcctgcctcagcctactgagtagctaggactacagacgcccgccaccacacccggctaattttttttaaattttttagtagagacggggtttcaccatgttagccaggatggtctcgatctcctggccttgtgatccgcctgccttggcctcccaaagtgctgggattacaggcgtgagccaccgtgcccggcctgatttttaatttttatcactgtgatatttctcaagctgggttcttgtgcctgggtcaaagctgtgggttatcagagtgtcatctgggaaattagtgtgtgtgagtccccacacacagctgctcaccacattttggaattgtcttggcaacatatgagtgcatcagtttcacacaattctatcagctatatatagacacatttttttcatgggtttattaacaattctctgatcacttcgtgatcaccagttctgcatcctctgagtatggttagccacattgttcactgcacaagggcatctggccaaggaataccagcccatgctccacacacagaatggggagcaacagctcagggctgtgtctatctgtaggggcatgcagattgaaaatgggcttgtagcagccctgacagtgaatgctgcaaagagaccttatacatgtatatcagttccttttttaaatttttttgagatggagtctcactctgtcacccaggctggagtgcagtggcgcgatctcggctcactgcaatctccgcctcctgggttcaagcgattctcgttcctcagcctcctgagtagctgggattacaggtgtgtgccaccatgcccggctaatttttgtaattttagtagggatggggtttcaccatgttggccaggctaatctcgaactcctgaccttaagtgatctgcccaccttggcctccaaaagtgctggaattacaagcgtgagccaccacacctggcctctatttcgaatattaaactttaatttaccatatcccaaatatttttccttttgttgctattatgggctgaattgtgtccctccaaaatgcatatgttgaagttctagcccccagtacctcagaatgttacctttgaggtgattaagttaaaatgaggttattaaggggggccctaatccaatatgactgatttctttataagaagaggaaatttggatataggcacgcagaaggaagaccatgtgaagacagagaagatggttgtaagagacagaaaaacccaaagtgtgtttctcctactctcatacacaccgctcaccagagagtgcttcacctctggccacaaaaatgggtggagatttctccccaccaacaacctgttctccagcagacactaactgggtgttctctaattcaagtcaatctagtgttagattttttaggttaagggctcagtgccacaagactgctctctgcttcagatgccaattccaagtggtaagttgtcagctatacttctgaccaactggctataaatcaggggttcccatgccaccctccttgggttcaactctgtgagtggctcacagaactcagggaaactttagttatatttacccatttattataaagggtagagacaaacaccagatgaagagatgcatagggagaggtatggaaggaggggtgcagagctcccatgccctctccaggcaccacaccctccaggcaccttcacatgttccacagtctggaagctctcgaaaccctatcctcttgggtttttatgaaggcttcatgattgatcgcatctttggccatgtgatcaactcaaccatcagccccactccccattccccagaggtcaaatagtgggattgaaagtttcaaccctcagctgggcacagcagctcacgcctataatcccagcacttttggaggccaaggcgggtggatcacttgaggtcaggagttcgagaccagcctgaccaacatgatgaaacccatctctattaaaaatacaaaaatttgccaggtgtggtggtgggcaactgtagtcccagctatttggaaggctgaggcaggagaattgcttcaacccagaaggtggaggctgcagtgagccgagattgcctcactgcaccactccagcctgggcgacagagcaagactcagtgtcaaaaaaaaaaaaaaaaaaagaaagaaagaaaaaaagttccaaccatctgataacaaaagatgcttctatcacccaggaaattccaagggatttccatgtcagttgttcctctcactcaggaagttataaaggtcttaggatctctgcgtgaggaactgggtggaagaccaaatattagaacagaagttctcctagcatccctattgtcaagagttttaggagctctgtctcagaaatggggtatagagaccaaatatatatttctttacaatatcacaagaatcatctacaagccaaagaaagaggctatagaagaaaccaaccctgctgacactttaatctcagccttccagcctccagaactgtgagcaaataaatttatgttgtttaagccaccatctgtagtacttcttgtttttttttttttttagagacaggttcttgctctgttgcctaggctggagtgcagtagcacaatcatagctcactgcagcctccaacatcttggtgcaagcgatcctcccacttcagcctcctgagtagctgtgactacaggcatgtgccaccatgcctggctaattttttttatttttgtagaaacaggatctgactatgttgtccaggctggtcccaactcctgagctcaagcaatccttctgcctcagtctcccaaagtgctgggattacaagtgtgagccaccatgcctggcctgtggttctttgttatggtggttctaggaagctagtatagttgccttatttttctcataaatttagtttttagataccaaagtttaaaaattaaacctaggcctggcacagtggctcacacttgtaatcccagcactttgggaggccgaaggaggcaaatcacttgagtccaggagtttgagaccagcctggtcaacatggcgaaaccccaactctactaaaaatacaaaaaatttgccaggcatggtggtgcacacctgtaatctcagctatttaggaggctgaggcatgagaatcacttgaacccaggaggttgaggctgcagtgagccgagattgcgccactgcactccagcctgggcaacagagcgagacttcgtctcaaacagaaaaacgaaaaaaaggcctgggcgcagtggctcacacctgtaatcccagcactttgggaggctgaggtgggcggatcaactgaggtcgggagtttgagaccagcctgaccaacatggagaaacctcatctctactaaaaatacaaaaattagctgggcatggtggcgcatgcctgtaatcccagctattctggaggctgaggcaggagaattgcttgaacccaggaggtggaggttgcagtgagctgagatggcaccattgcactccagcctgggcaacaagaacgaaactctgtctcaaaaaacaaaaacgtaccaattaaacctagccatattgttgctgctaataattttatgaccttaataaaatcttcccttccttcttttgtatttaaaaataattaactgttaagcaaatgcgggatttattttggggtgaaatatgtatacaagttaaattatttgctgctggccaggtgtggtggctcacacctgtaatctcagcgctttgggaggatgaggcgggaagatcacttgaggtcaggagtttgagaccagcctgaccaacatggtgaaaccctgtctctactaaaaatacaaaaattacccgagcgtggtggtgcatgcctgtaatcccagctacttgggaggctgaggcaggagaatcacttgaacccaggaggcagaggtttcagtgacccgagatcgtgccattgcactccagcctgggcaatgagagcaaaattccatctaaaaaaaaaaaaagtgctgcaaagcagttgtcccaatagcatttatttaagtggggcgggggcgggggggtgggggcggggggagattcttattggttcgtaatttatcaagttagaccttttatgaaattccccccatgacctttgaccttctgtttttaacctggtaccaaacagcttttatcatcgtctcgtggtgtttatgttttgaagtccaatagggtgagttgtctatgattgtttccttcttttcccaaaaatattctttggagttcttacctactgattttttttttccagatgaattttgctgtcacttaagtttgacaaaatgttccctttgaaatttcaaatttttgaaatgaagtatgagatctaaaaaaaaaaagaaacctgtgtattggctcagcattacccttattcctctcagccaagtgcaagggatcacttactcaaatctttattcatcccactagagtttaatgacttccttgaatggctgttcaatgttcagtgacaggtctggcttttgttgtgaggccatctatggagtctctgggacccttccagtccctggaatcagtttggtctgagaggtcaggacttggaaacatactggaggcagggcaagggcaccctgctcttgttttggcatctacctcttttccgctggtccttcttatccatccaactagtccttttccctgagccaggtccatactttcccaccccaaacccttcctcttgtttcctggctctctgtttctggctacattcatttcctacactcctgtatcaaaagtaccacaattgcttctcgttcccacagtgcagtgcggctgagcgcctcagagcccgcggggacgctgcggggggattgcggggagggggcgttgggaggtgccgatgttgggctgggcggatgagcgcatctgcgtggtgagccttccaacgtgcgcgagaaggacgtggaagaccttttctacaagtacggccggatccgcaagatcaagcttaagaatgggcactgccttgtgcccttcgccttggtgcgctttgaggacccccgagatgcagaggatgctatttatggaagaaatagttatgattatggccagtgtcggcttcgtgtggagttctccaggacttacgaagtcggggtgggtggccccgtggtgggaggaatgggccttctgcaagaagatctgatttccgagttcttgtttcaggacttcctcaggcagctggcaggacctgaaggatcacatgcgagaagttggggatgtctgttatgccgatgtgcagaaggacggtgtggggatggttgagtatctcagaaaagaagacatggaatatgccctgcataaattggatgacactaaattccactctcatgatagtgaaacttcctacatctgagtttatcctgagagaagcaccagctatggctactcacagtctcggtttgggtcaaggggccgtgactctccatactaaagccggggttccccacaccacttctctcctttcaggccctactgagacaggtgatgggaattttttctttattttttaggttaactgagctgctttgtgctcagaatctgcattccagattgaggatttagcgtcttaggaaattattttaattttttttttttaaagaagaaaaaaaaactacatactttctaccagggccatattagcagtgaaacattttaaactgcagaaattgtggttttggttcagaaacaagttgtatatttttcactcctgaatatgggtaaaaaatcagttccgtctttgtgggttgctctgctatggagatcaacagttactgtgactgagttggcccattctgcttaaaaatatgttttaaacgtttaagaaaaatgctcatcatcactggccatcagagaaatgcaaatcaaaaccacaatgaggtaccatctcacaccagttagaatggcaatcattaaaagtcaggaaacaacaggtgctggagaggatgtggagaaatagaaacatttttacactgttggtgggagtgtaaactagttcacccattgtggaagacagtgtggcgattcctcaaggatctagaactagaaataccatttgacccagtgatcccgttattgggtatatacccaaaggattgtaaatcattctactataaagacacatgcacacgtatgtttattgcagcactgttcacaatagcaaagacttggaaccaacccaaatgtccatcagtgatagactggattaagaacatgtggcatggctgggtgcggtggctcatgcctgtaatcccagcgtggctcatgcctgtaatcccagcactttgggaggccaagacgggtagatcacgaggtcaggagatcgagaccatcctggctaacacggtgaaaccccgtctctactaaaaatacaaacaattagctgggcgtggtggtggcgggtacctgtagtcccagctactcggtaggctgaggcaggagaatggcatgaacccaggaggtggagcttgcagtgagccgagattgcgccactgcactccagcctgggcgacagagcgagactccatctcacaaaaaaaaaaaaaaaaaaaaaaaaaaagaagaagaaaatgtggcacatatacaccatggaatactatgcaaccataaaaaaggatgagttcgtgtcctttgtagggacatggatgaagctggaaaccatcattctgagcaaactactgcaaggacagaaaaccaaacactgcaggttctcactcataggtgggaattgaacaatgagaacacttgaacacggggtggggaacatcacacactggggcctgttgtggcgttgggggaggagggagggatagcattaggaggaatacctaatgtaaatgacgaattaatgggtgcagcacaccaacatggcacatgtatacatatgtaacaaagctgcacgttgtgcacatgtaccctagaacttaaaagtataattaaaaaaaaaaagtttagtaattgaaaaaaaaaagtacaacaattgggttggttggaacagcagaaatgaattgtctcacagctctggaggccaaaagtctgaactcaaggtgtcggcaggaccatgctccctctgaaacccatagggaaatccttctttgccccttctagcttctggttgtttgctggcagtctctggcattccctggcttgtagacgcatctttccaatcgtctgccttcacatggtagtctccctgtgtctgtctctttaagtggctgtcttttgttttttgtgtttttttaatttcaatttaatctattttttgtagacacattgtttcaccatgttgccaggctggtctcgaactccagggctcaagtgatcctcccgtctcagcttcccaaagtgctgggattacaggcgtgagccgccacacccagcccacatggctgtcttcttatgggaaaccagacatgggattagagacccactctattagagtaggattgcatttaactaattacatctgcaacaactctatttccaaataaggttacattctgaggtactaggggttaagacttaaatatatcctttttaggaaggacacagttcaacccacaatattagctggccacatgtttcccctgatctgtactttacttgttccccctggctctggtccctcctcgggtcaggtcctgcctgagcctcccctggccatgtcccttctttgtgcctggaccctcctgattaataccccatccccacccttgtgccctcagctgacttcttgtacctcccaccaggcatgatgacctgaaggagatgctggacaccaacaaggattctctcaagctggaggccatgaagaggattgtggcggtaagaggggaaggaggaggcctccctccgggcggggcctgggtggccaagagcagctctccttagctccttgtagaccttccctctagttagtgctgtgcctctcgctttgtccctcttcccctaccttgaccccaccacccagatgattgcccgaggaaagaatgcttcagacctgtttcccgcggtggtgaagaacgtggcctgtaagaacatagaggtgagcactacctggtgagggattgcttgtccccacctcccccaggaccacactcaagcttggggtgaggaaggaaatgatttagcccctgggggcccgacctgctgagaaatgtctctgagccaggagaagacactgtctccatgtccctgaactggatgtggatcaaggtaaaggacccggatacactcaggggtgctctcccccactgggagagtttgtccccatggaccgcagctggctggggagatgacatcccaggggtaggggggtgggcacaggtgcctgctgagaagcgttctgctgagaaacgtgctctccccaaggtgaagaagcttgtctatgtgtacctggtacgctacgctgaggagcagcaagacctggccctgctgtccatctccaccttccaacgtggcctaaaggtcaggggtctcagtttgcctcccagggcctgggcctcgttggcgctgtatcggaggagtaggcctggggagaggccatgagcatgggagcgggctctgcagaccccttcctacctgcctaaaattgggagggtcacagtcagaagaggccagccagaccctcagagagtggaagctgggctcagaaggggcgtaagagatgaagtgggtacccagggcccctgtctctcttcccaggagcctgtggtaatggctgcttctagtatgaaccacttgagcccccggagagtggagagtctctagcaatggagaacccctcaaccctcacccccctttgtgtaaaggtgtgaattgtggtccacagccaggtagatttcaacctttagcagtggcctgaatcccccacaccattctcaccttttgtttcattttgcccaaggcctctagttggatttacatatgttaggtgcatgtataagtctcccccctaagggcttttctggttagtctaagacatcttgagggtaaagacagccatttcaaggccattctctccatattggatttttcagctctgattacaaccattaactcctctatttttgcatacctttatttatttatttatttatgagacaggttctcactgtgttgcccaggctggagtgcagtggtgcaatcatggctcactggagcctcgacttccctgagctcaggtgattctcccacctctgtctcctgagtagctgcgactactcagcctgcatcaccatgctcggctaatttttttgtagtttttgtagagatggggtttcaccctgttgcctatgctggtcttggactcctgggctcaagtggcctcagcttcccaaagtgctgggattacagggatgagctaatactcctagcctggatacttttagttcaaatttctgtgagagagattgtgaaaggtccagctcatcttttcatatccagaagttctgtaggttgctgggtagacaggattgctgctcaaatccagggcccaccccttgtccaatctgctatggccagcaagaggggttgacagtcggcttctttggggtgagagtagaaagcatggtcacttgaatatacaattcattcatttagtaaatacttgggtgtctctatgccacacattgtgctagatttctttttataagtcaaaaccatggaatccgtcttagattggcaagtaatcttttggtttgagtaagggttaagtataaaaactaatctgaaattgttgtacagattttcacctatagtctctaccaactgaccctgtcccccttttagaaaaccagagctcatttagttcaactcaatgtgataatttctttctgcaaagtgccaaatagtattttaggttttgtaggccttatagtctcaactatgcaactactcaattttgcccttatggtgcaaatgcagccattgacaagtgggcgtggccgtgttccaataaatctatataaaaaacaggcaatagacagattttatccaagggctgtagcatgccagcctttgctctagaacatgtctaacaggtcatcttttctgatagggacctcactccttcataaggcaacttgctccatctcaagacaactaccactatttggggtgttttttaaaccattctcttttgttgaaacctccacaactataatttttaaaaattgatttcaggctgggtgtggtggctcatgcctgtaatcccagcactttgggaggccgaagcaggcaaatcacaaggtcaggagttcaagaccagcctggccaacatggtgaaactccatctctactaaaaatacaaaaaattagcttggcatggtggcgggtgcccataatcccagctactcaggaggctgacgcaggagaatggcttgaacccgggaggcagaggttgcaatgagccgagaacgtgccactgcagtccagcccaggcgacagtgtgagatccatctcaaaaaaaaaaaaaattgatttcaggctgtactgcattatgactgcacctgtgaatagccactgtactccagcctgggcaacatagggagaccctgtatctaaaaaataaaataaaatttactacaggttcacaaaaggcataaagaataatataatgaatatccataagaaatgacacatttctcaaatagccaaagcctcctatatatcttctcttgtttatcattcataggtatgtatttattcctgtgctagtaatttgcatattgttaagcaatataaaatgttttgtaaatggtgtcatcgtactacatatgtattcctttaaaacttgttttcttttttgttgtcactggcttttggtctctcctgcatgttggaaccaatcatttcaatccagccttctcccttctttcaatcctagcccaggctagggccgtgttcactttcttaggagatccctcatggaatcaaacctctgactggcaagcagataatccaggtctccctacatcctgtctttgtacagttggtcccttgaaccccctatgaaaccctactctatttcattttatcagtttagcacagggtccaaaccagggtgattctgaatcttaattatgtccctcctgattttgtgtcttctttcaagatactgataagctatttggaccagggcaaaagactgaggcatagcatgtttccaggttgacactgatctgttaataaaccttctccaagtatatttcaccacgttgtagacccacctgactgtacagacagctggcatttttctatcttgttaggaaggatcttattcaatagcaataaataaataaataaataacacctttcatgtgcaaagggttgtgggtgacacagagataaaacagatgtgaattctgctcttaaaaatgcttggctattaggtgaaacaaaaggcctacctaaaaaatagcaatgcaggaaatgctatgagacttccacaaacatatcactgaaatcaagatactaatatccaccggcctagttaccccatcaaaaaggaaaacacattttttttgataactttctgtgaatctataatcatttcccaaataaaatgctcacacacaaaaaaggaaaacaggtttaagcagatgatgtgactatttgtctctaagaaaacagagactccttccttttcaataaatgtttctaacccatctgtttaaaagtcaattccagaattttgtcaggaattagcatcaattttacctgcaattgtgaggatcttgtcttgtctttttccatttcagaaagtcagggtaatatctacccttctttagtgttctattcccgtcattctctaagagtaatagtacaggcacacctcattgtattgcactttgcagatattgccagatattgcactttttacaaattgagggtttgtggcaaccctacatcaatcaagtctatcagtgccatttttccaacagtatgtgctcacattgtgcctctgtcacattctggtaattctcacaatattccaaactttttaatgattattatatgttatggtgatcagtgatctttgatgttactattgtaattgttttggggtgccacaaaccatgctcagacatgaaagtgaaattaatcaataaatgttgtgtgtgttctgactgttcccccatctccttcaccttgggcctcttcattccctgagacacaacaatattgaaattagatcaattaataaccctacaatggcctctaagtgttcaagtgaaaggaggaaccacacatctctcactttaaatcaaaagctagaaatggttaggcttagtgaggaaggtatgttaaaagctgtgataggctgaaagctaggccacttgctccaaacatttagccaagttgtgaatgcaaagtaaaagttcttgaaggaaattaaaagtgctactccaggctgggcgtggtggctcacacctgtaatcccagcactttgggaggccgaggcaggaggatcacttgagaccaggggttcaagaccgtctctataaaaaatttttttaagttagcctgatgtggtggtacgcacctgtagtcttagctacttgggaggctgaggtgggaggatcacttgaacccagaagtttgaggtgcttctccagtaaacacatgaatgataaagaaagcaagacaggattattgctgatataggaaaatttaagtggtctggatagacgatcaaaccagctaccacattcccttaagccaaagcctaattcataggcaggtcttaaatctctccaattctatgatggctgagagaggtgaggaagctacagaagaaaagacggaagctagtggaggttggttcatgaagtttaagtacagaagccatctccataacaaaaaaatgcaaggtgaagcaaaagtgctgatggagaagctgcagcaagttgtccagaagatctagctaagatcattgatagatgtgactatgttcaacaagagatgctcaatgtaaatgaaacagcctcttactggaagaagatgccatctagcactttcctacctagagagaagtcaatgcctggctttaaaaaacaggctggctcttgttaggggccaatgcagctagtgactttaagttgaggccagtgctcaatgaccattctgaaaatcctggggtccttaagaattatggcagatctcctctgcctgtgctctataaatggaacaacagtgccatgacagcacatctgtttgcagttatggtttactgaattttttaagcccactgttgatacctaccgcttaaagattcctttcataatattactgctcattgacaatgcatttgttcactcaagagctctgatggagaggtacaaggagattaatgatttcatgcctgctaacacaaaatcagttctgcagcctatggatcaatgagtaattttgacttttaagtcttattatttaagaaatacatctcgtaaggctagagctgccatagatagtgattcctctcatggatctggacaaagtaaattgaaaaccttctggaaaggtttatagaaaccttctggaaaggtttaccattatagatgccattaggaacattcatgattcatgggaggaggtcaaaatattaacattaacaggagtttggaagaagttgattctaaactccatggatgactttgaggggttcactacttcagtggaggaagtaactacatatgtggtggaattctacctagaagtagaagtagaattaaaagtggagcctgaagatgtgactgaattgctgcaatctcatgataaaacttgaatggatgaggacttgcttcttatgagtgaacaaagaaagtcctttcttaaaatggaatctgccgggtgcagtggctcacgcctgtaatcccagcattttgggtggccgaggtgggtggatcacgaggtcaggagatcgagaccatcctggctaacacagtgaaaccccgtctctactaaaaacagaaaaattagccaggcatggtggcgggcacctgtagtcccagctactcgggaggctgaggcaggagaatggcgtgaacctgggaggtggagcttgcagtgacccgagatctcgccactgcattccagcctgggcgacagagcgagactccgttacaaaaaaaaaaaaaaaaaaaaaaaaaaaaactcctggtgcagatgctgtgaacattgttgaaatgacaacaaaggatttagaatattacataaacttagttgataaagcagaggcagagtttaagaggactgacttcaattttttttttttttgtagagactggggtctccctatgttgcccaggctggtcttgaactcctaggctcaagcaatcctcctacctcagcctcccaaagtgttgggattacaggcacaagccatcacgcccagcctacattgtttttttaaagacataatgctattgcatgcttagtagactacagtatattgtaaacataactttttttttttttttggagataggatctcactctgttgctcagtctggagtgcagtggcatgaacatatgtagctcacttcagcctccaactccctgggctcaagtgattctcccacttcagcttcccaagcagctgtaactataagcataacttgtatgcaccaggaaacaaaaaatttatgtgactcgttttagtgcgatatttgctttattgttgaggtctagaatcaaacccacaatatctccgaggtatgcctgtaatatatagctgctgctgctgatagtgggaagacagtcctaagccccatgatcacaatacagtgtaaggaatgcttttatacgttctgtataggatgcagtaggaataaagaagaagggcttggggccgggcgtggtggctcacgtctgtaatcccagtactttgggaggccgaggtgggcggatcacttgcggccaggagttcgagaccagcctggccaacacggcgaaacctaatctctactaaaaatacaaaaaattagctgggtgtggtggtgcgcgcctgtagtcccagctacttgggaggctgaggcaggagaatcgcttgaacccaggaggtggaggttgcagtgagccgagattgcaccaccgcactccagcctggcgacagagcgagactccatctcaaaaaaaaaaaaaaaaaaaaaaaggaagggcctacacccctattttgttttaaacactgtggaagaacagcagcttttgcaatgatttctgggagaaaggagtgtaaggttgaactccggaagggagaccagcttgcatctgctgggcggtcacctcaggcattaaaacaggcacctccaaaaaaacccttacaaggaacaggaagtgtttcaggtgtttcagcaattttaggtgttctgaaagtttttcagtgtttctggaagtgaagctacccattgcaacacctgttcaggtgtcagatttctgcaaccagagccaaaattaagtgtcccccagatacccatcactggcacaccatccaggctccagtcaagcggcagggaagcaagagctagtggtcgctggggacagtgacttccaaaggtgtggcctccccccatcagggcacctggtgccctttcatagctctgcctccacctctgcctttaggatcccaaccagctgattcgtgccagtgccctccgtgtcctctctagcatccgtgtgcccatcatagtgcccatcatgatgctagctatcaaggaagccgcctcggacatgtcaccctatgtgcggaaaacagctgcccacgccatccctaaactctacaggtatgccccagccctgtcccacgctccccaggaggctggttcctaagttctcaacccacccctggcctttcctaagtcttgcctgctgcttctcagagggtttgaggagggtagtttgggggactgacagagatggaggagaacaataaggctggggtgcaggaggtgagcatggcttggacagatattgggaaggctggggctgagagtggcaaattcccctcaccgatttctccctcagtttggactctgaccagaaggatcagctgatagaagtcattgagaagcttctggctgacaagaccacggtgcgtgtataggggcgctccgggaggggtggtgaccggcagccggccttccacccttcgcgttcaccctctcgtctttgttctttccccagctggtggcgggcagtgtggtgatggcctttgaggaggtctgcccggagcgcatcgacctgattcacaaaaactaccggaaactctgtaacctgctgatcgacgtggaggagtggggccaggtggtcatcatcagcatgctcacccgctacgcccgcacgcagttcctgagccccacccagaacgtaagtgggcccagcccaggcagagcgggccgaagtgtgtcccggggaggcgcccacagacccgtcggtctccccgtccaggaatccctactagaggagaacgcggaaaaagccttctacggctcagaggaggacgaggccaagggcgcggggtctgaggagacggccgccgcggccgccccctcccgaaagccctatgtcatggaccccgaccaccggctgctgctgcgcaacaccaaacccctgctgcagagccgcagcgccgcggtggtgatggcggtggcgcagctctacttccacctggcgcccaaggcggaagtgggcgtcatcgccaaggcgctggtgcgcctgctgcgcagccacaggtgcgctccgcccccagccccgccccctccctcgcctcctgccccgccccacgggctgcccggctccgccccctcacgcccaccagccgcttccacctctgcccacccgctccacactgaccgtagtcctgccctccgcactggtcctctccccgcaacgacttgccccaccttttcccctcatccgctgacccttgccccaaccgaggggcccggggtgctctgacccgtcctctccgcagtgaggtgcagtacgttgtgctccagaacgtggccaccatgtccatcaagcgccgggtgagcctgcgacggcgggctgtcctcgctgtccgagggccgcttctgcgggcactggaggcgttgtcggggctgggaccggggccggggaaagggaagatggaggaataccctggctgtgcagaggatggggcaggggaggctccaaatacagatagggagcagggcctggatcctgaggggccgctgaggggatgtccagtggaaaaagagctagtcagatctgagatggacgagggaagacttgaggagtggagggcagtggtgaggaggcaaggatcctgggcgctgggtcaggataggaggggtgtctctgggcagcgaggcaggcctggggcttcggtggagctccctagctgcctctcttgtgccagggtatgtttgagccctacctgaagagcttctacatcaggtccaccgaccccacccagattaagatcctgaaggtgagtgagggacagaagtgcatgtgcttcccagccctccccaccccatgtacccactcaaataactcacagtggcccccctggtgcctgcctattcctggggctgagcccaggagcccatgactgccccagctggagctgtttgttcagggagctgggctaaggagggtcagggggagaagggaactgctctttgcctagtacctggtatacacctgctactcttcataaatgaagtaacctgatatcacctcataataatcccaggatgtgtacattatattccttttataaaaatatagactctggccaggcacagtggctcacgcctaatcccagcactttgggaggccgagacaggcagatcgcctgaggtcaggagttcaagaccagcctggccaacatagcaaaacctcgtctcaacgaaaaatacaaaaattagccaggcgtggtggcaggtgcctgtaatcccagctactcgagaggctgaggctagagaattgcctgaacctgggagacagaggttgcagtgagctgagattgtgccattgcactccagcctgggtgacaagagcgaaactccatctcaatctaagaaaaagaaaaaaagactctgggaggtaactgccccaggtcacataattctgctgactccaaggttcacacttttctctcccacccacagtgttatggcccccacacacctgccccctcaggctctcctgcaaacattcacggacaaggaaagtggcgggagcccatacctccatttgattcctgctctgctgcctcattattgagtgatttccttcagcaacagttaatcttcctaacccttgtgaacatccactatgttctaggggtacatgatgagcaaactaatcagggaccctgcctttgtggagcttacagatgtggggaggaggagacattaagcagttaatcacaaggcaaatgtaaaagtccacttacaaaatatggaagaaagtgtggagagctataagggcataaaatagggagacctcatctagtctggtgccagggaagttttcccggaggatatgagacttgagctgaagcctgagagatgaacatgaattatgcagggacagaaatgggaagaactgctccacgcagaggaaacagcatctgcgaagaccctgggttaggaagtggagtgggattggggcctggaagacaagggggacagtgatgggagatgggaggtagacagcaagcagatcattcagggacttacagaccatggtgaatacgatggtctccatcctgaaagcaataggaagctttaagttttcaatgcagtagggaggtgacatggtcatactgtaagcatactgtgtagggaatccacttaagaggcaaactggtcctcttgctttttagacaagtttcataacctgtcaattccctcatcagtgtgaggatgatgcagggctgtcatgaggattgttttctggtctatgaagtgtatttggaatgaaagcacagaaagtccactggccaacccacccattttctgcctctccaaccctccctgcagctggaagtgctgaccaacctggccaatgagaccaacattcctactgtcctacgggaattccaggtacaggccagctcccagccagaagggcctgggagaggggcccatcagatccttgtgccctggtgggtaaacctcctcttatgagcccaaggctggagaaactattatcttacattcccgttccaatgtgtttggctggctttgggccaaggaatcactggattgggggtggagttgtcaccccctttcccaagtcttagtcaccggcatgataagccataaaatgaaaggccacagccttcttgaaggtcaccctcaagcctgcagagtcactgagggatttctttgtcatatcccacagacctatattcgcagcatggacaaggactttgtggcagccacaatccaggccattggacgctgtgcaactaacatcggccgagtccgtgacacctgcctcaatggcctggtgcagctgctgtccaaccgtgatggtcagtgtttccctgagtgtctaaccgtgatgatcagagggtgtctgcctgcaggtctgactctgctggccactggatatccaccagtctgcctagacacaatgtgtatccattggtctgtctgtcttgatcagggcccaagtgttcctacacctctgagggctgctagagaactgaagggggttgagagaaagagccaagggcctggggcactgcaggtgtgtctgtccacctgagtgtggccatctgactgtcttggggtccacacactcatttttgttctgtagagcttgtggttgcagagtcagtggtcgtcattaagaaattgctacagatgcagccagcacaacatggagagatcatcaaacacttggcaaagcttacagacaacatccaggtgagggagaagccatattttcactccccacttcaaggtcctccccatgatttcaagactgtataattacatatgctagccttatcaaaagtaacttccaaaccttaggtcttcaggtggaaggagcagagacactggaccatgtgaccctgaccttgttacccctgatttgctttccctttggagaccctcaatgagcacgatggactttactactactcttgttttctctctaaagctctagccaaccatggttgagtgacaaatcttgtgtttttctatcgcactgctaagctgaaacatctaaacaaggcattcccaaagattctggagagtaacatggaaataaagtactgagggtacaatgaatccagaaaatcaatcttttacatcatgactgacttagggtcttgaaagctctatgctaatgaagccctagggaagaggggaaatgctgtctaggaaatgtctaccttttaacctctctctatctcaccacccccaactcccatttccagagaacccataatacaacaggccagcacagatgaggagtgctgtttccctggaagtccacaatcctacccacccactttcccgtatttacccatcttcactcctctcccacaaccacaggtgcccatggcccgagccagcatcctgtggctcatcggagagtactgtgagcatgtccccaggattgcacctgatgtcttaagaaaaatggccaagtcattcacagcagaggaggatattgtcaagctgcaggtcatcaacctggcagccaagctctacctgaccaactctaaacaggtaaagattaagagatgaccccccagatactctggtccccagaaactccctagacagtattcttttggccctccctaggcagggctgaactctagctcctattttggaaaagaagaatcagggaaggtggctggtctgcccacataaccaatgctaccccagtgcccacaaagaccttgtagtgctggtggtcactgttgaagagactctcctatgaagctgtgacctccagtctgctagtacaagagtcctgtctgccaccttggaactctggggctgtgaagaaccacagttgattgggataagggaagggcccaacagtggcaggtactgatgggagaacatgcatcccagatgtggtctgtgcttctttccaaagcttgacaatgcttggccagtctgtgccaaagataagggggtgagtctctgcttgggcttgggtggtgctggtggccactgtcattcccaaggtgaaaggttataagagatacacagccaaggatgaggctcaactaagttgtagtatcagggtgttcagagcctcctagctgtctggcatctcctgagatggttccaggagattctcctaaaatgaagcataatgtgctgagcttttcaaggtgtcagggacatcaaacaccatgacgatttccacactctcccactcagttaagcaggacagggattggcaaactactgcccataggctgaatttggcctattcctgtttttgtaataaagttttgttggaacacagccctgctcattcatttacaaattacctatggctgcttttgtgctacaacagcagggttaactagttgcaacagactgtattgcccacaaagcctagaatagttattctctggcccttttataaaaagactctgccaatccttgaagcaaaacctctggctaggtggctggggtctacagatttatagcagggatatcccctggagactgtagcatccctgccatgtccactgtgcgtgggagtctttggatggtggcacttatctttttcagtggcttctttgatccattgtggccagagtgagccccagaggctcaaggtgaggtaggcagggccaccaagtgctgtgactgtaatcaggagtcaaaggacagcagcaacatgtggaggcaactgagtctgtataattaaatatgctagccttatcaaaagtaacttccaaaccttaggtcttcaggtggaaggaggagagacactggaccatgtgaccctgagcttgttatcagtgttgtgggcaaagcagattggagagagagaagttagagggggagagagagaagttagagggagaaagagcaccatggggaagcgttcaatcgttgaaaaaatatttgtatacttcctttgttcaggtgggaggaaggagcaagtgggaggaatgtttgaaaagatgaagcagcctgggtggggagccacccaggtaggtgggagtcttgacatgctcagcaatgagccagagtcctaaaccccaggatggtgaggttggcatgttttcataagcctgggcctgtccacatgtcatttcccccaagttgtcactgtgagctacatgtgcatttgttcatttatttaacatatatgtaggtgggagtctgacatgctcagcactgagccagagtcctaaaccccaggatggtgaggttggcatgttttcataagcctgggcctgtccacatgtcatttcccccaagttgttactgtgagctacatgtgcatttgttcatttatttaacatgtaggcctactatttgcctggtactgtgctgcgtcctgaggatatgacaatgagtgagacacatttacaggtctccagatactcacagccaagtaggagaaacaggacaaaaataaacattttaaacacagcagtaacagctgtcatcagggttggcacagcgagctgtgggtatatacagctgaaccctcccctaggaatgacccctgtcagggaacccagagtaggctgttcaggcaaatggacactcacctccagggcgcccttcacctgcaagtgagtttttgcaggccccttagaatggttatttgattcaataaagatttttgtcctccctttctttctcctttcttcccagcctcttctgggagtggtaaagaagggggagtccttggggtactaggagggaggtggtttggatgcgcacatgaccatgcttgcaaaacagtagtgatgcttcccatcctgggaccatgagtggcaatctgcccagctaaaaggccacagtaatctcagtcattctctccaatttggacatgggcccacggcatgccagatcctggcccaggatgaggccaaggaaatgaccaagatgaggcctctgccctgctattgatcagcagataatcagatactagaccagaggccacaaaggcataacatgcaggtggcgggggatgggggggttggtaatcaaagtggctattacatccacctggatatagaccctggggaaactgcctagcaggttagtttgcttttatgtgtcaggtgagatgtgtggcaggagggtctgccaggggcacagtgggatctacaaccctcccatgtgaccgcctttacagtgaatagaagattctgacaaattttgcagaattgcttttaaaaacgtaaactttttttaatatgctaaaggtaatacatgcttatcatagaacatttggaaaactcagaaaattataagtttaaactattaataagtccaccatttagaagaccaccattaattatatatttccttattttttattcctatatatagtcattcagaagttgtacttttgtctattgtccaatattttaaacttttctgcttcttttcaatgctttcatatttaatacttttttttccccattcacatttcaattaaacttttcacttagaattttctccaggctgggttcagtggctcacacctgtaatcccagcactttgggagcccaaggtgggtgggtcatttgaggtcatgaattcaagaccagcctgaccaacatggcaaaaccctgtctctactaaaagtacaaaaaaattagctgggtgtggtggtgcgctgaaatctcagctacttgggaggctgtggcaggagaattgcttgaacccaggaggtggaggttacagtgagctgagatggtaccaccacactccagcctgggccacagagcaagatccatctcaaaaataaataaaaattaaaaagaatttcctccaaatttttttctactttcacatttttaaatcaattgtattagttttctgctacataataaattactataaatttggtggcttcaaacaacacacgtttattttctcagtgtctatgggtcgagaattcaggtatggcttagttggatcttatgcaaggctacaactgaggtgtcagccaaggctgagtttttatctggaggctgtactggggaaaggtccacttccaagtcacatggtgccacgatccacttccttgcagttgtaggattgtggccctggcttcttgctggctgtcagctgggggctgcccttgccttctagaggccgtccttagctcattgccataggggcctcccaacacggatgcttaatttctccaaagccacaagggagaaagtctctagagccagtctgctagcaagaccgtcttctttttattttttaatttttatgggtacatagtaggtgtatatatttatggggtatgtgagatattttgatacaggcatataatgcataacaatcacatcagggaatggggtatccatcctctcaagcatttatcttttgtgttacaaacaatcaaattacactctcttagttatttataaatgtataataaattattgttgactgtagtcaccctgttgtgctgtcaaatactagatcttacacattctatctaactataattttgtacccattaactatccccacttcccccacccactacccttctcagcctctggtaaccattattctactctccaactccatgagctcaattcttttaatttttagccctcacaaataagtgagaacatgtgaagtttgtttttctgtgcttggcttatttcacttaaaataatgacctctagttctatccatgttgttgcaaatgacaggatctcattcttttttattctttttttatagtactgcattgtgcatatgtaccgtattttctttatctatttgtctgttgatagacacttaagttgctttcaaatcttggctatggtgaacagtgctgcaataaacgtaggtgtgcagatataacttcaatatgttgatttccttacttttgggtatatacatagcattgggattgctggatcatatggtagcactatttttagtttttgtttgtttgtttgagatggagtcttgcactgtcacccaggctggagtgcaatggcatgatctcagctcactgcaacctccgcctcccaggttcaaacgattctcctgcctcagcctcctgagtagctgggattacaggcgcccgccaccaagtctggctaattttcatatttttagtagagatggggtttcaccatgttggccaggctggtcttgaactcctggccgcaagtgatctgcccgactcggcctcccaaagtgctgggattacaggcgtgagccactgcacctggcctatttgtagtgtttttttttgagatggtgtttcactcttttttcccaggctggagtgcaatggcgtgatcttgcctcactgcaacctctgcctcctgggtgcaagtgattcttcttctgcctcagcctcccaagtagctgagattacaggtgcctgccaccacgcctagctaattttttgtatttttagtagagacagggtttcaccatgttggccaggatggtcttgatctcttgacctcgcgatccacccacctcggcctcccaaagtgctgggattacaggtgtgagccaccgtgcccggcctatgtttagttttttaaggaacctccaaactgttctccagacatttccactaacagtgtacaagggttgccttttctccatgttcttgtcagcatttgttattgcctatcttttggatataagcctacttggggtgagatgatatatctttttttgttttgttttgttttttgagacggagtcttgctctgtcacccaggctggagtgtgcagtggtgcgatcttggctcactgcaacctctgcctctgtggttcaagtgattctcctgcctcagcctcctgagtagctgggactacaggcgtgcgtcaccacgccccgttaatttctgtacttttagtaaagatggggtttcgctgtgttggtcaggctggtctcaactcctgatctcaggtgatccgcctgcctcagcctcccaaagtactgggattacaggcatgagccacccgtgcctggcctttcattgtagttttgatttgcatttctctgatgctcaatgatgttgatcaccttttcatatacgtgtttgctatctgtatgtcttcttttgagaaatgtctattcagctcttttgcccatttttaaattggattattgaatttttttttcctattgagttatttgatctccttacgtattctggttattaatcccttgtcagatgggtagtttgcaaattttttcctcctattctgtggcttgtctctttgttgattcctttgctgtgcagaacctttgtaacttgatgtgatcccatttgtctacttttgctttggttgcccgtgcttgtggggtatcactcaagaaatctttgcccagtacaatgtcctggagaatttctctaatgttttcttttattagtttcatagtttgaagtgttagatttaagtttttaatccactatgatttgatttttgcatatggtgagagataggggtctggttttattgttctgcatgtggatatcccgttttcccagcgccatttattgaagagactctcctttccctaatgtatgttcttgatacctttgtcaaaaatgaattcacggccaggcgtggtggctcatgcctgtaatcccagcatcttgggaggccgaggctggtggatcacctgaagtcaggagttcaagagcagcctggccagcatggcgaaaccctgtctctactaaaaatacaaaaattagctgagcgtggtggcgggtgcctgtaatcccagctacttgggaggctgaggcaggagaattgcttgaacccgggaggcggaggttgcagtgagccaagatcgcgccactgcactccagcctaggggacaagagcgagacttcatcttcgtccccccccgccaaaaaaaaaaaagccactgatttttttttttttttttttttttggagacggagttttgctcttgttgcccaggctggagtgcaatgggtttttttttttttttttttttgagatggagttctcactctgttgcccaggctctggactgcagtgacgcgatctccactcaccacaacctctgcctcccgggttcaagcaattctcctgcctcagcctcccgagtagctgggattacaggcatgcaccaccatgcccagctaattttgtatttttagtagagacagggtttctccatgttggtcagactggtctcgaactcctgacctcaggtattctgcctgcctcggcctcccaaagtgcttgctaggattacaggtgtgagccactgtgcctggacaatgctactgattttttttttttttgaaacggagtcttgctctgtcaccaggctggagtgcagtggcgccatcttggctcactgcaaccttcacctcccgggttcaagcggttctcctgcctcagcctcctgagtagctcggactacaggtgtgcatcaccacatccagctaatttttgtatttttagtagagacaggatttcatcatgttggccacgatggtctcaatctcttgatctcacgatctgcctgcctcggcctcccaaagtgctgggattacaggcatcagccaccgcacctggccaatgctactgatttttatgtggattttgtatcctgcgactttactgaatttattagttctaatagttttttggtggaatccttaagattttttaaatataagatcatatcatctgcaaacaaggataatttgaattcttttccaatttggataccctttatttctttctcctgtctgattgctctagatagaacttccaatacagagtcttcttaataaaacataatcataggatcatatatagtcatataccacctttgccatatcctgttggttagaagcaagtctcaggttttgcccatacccaaggtgagggattgcacaaaggcatgaacaccaggaggcagctactggtggggaagaccttagaatctgtctgccacatccatctagagcttaaacttactcatgtgtaatgtgtgaattgaggatatatttcaattttttttaacagccagttttctaagcatgattagcaggcatctgcaaggtagcatgtatgttggcataggttatggaaaggaagtcagtgtttcctgcttaaaattcctctctgacaactggagcctgttggtgagggggagccttgttctgttcttggcacactggagtgtatctcagaggccttcttgaacagcctgtaattcctgcacatcctggctagatgaggtgggggtcttggtggtgcacacaggatgccacaatccacagggaatggccccttggggtggagaagggtaatgaattattataggcaaatcctgcagtgttgaggtggtgggccagccccttcctgtgttggttgttaacatgcagttaaggctgtggacagatggatccaaataccaaacagttctttctagaactaggcaaggacttgaaggagggagtctgtgatcagccagctgggaaatctgtggaggaagacattgtccaaaccaaaagagggatcagcagcctcttgataattgactatgttggtaagggcatccactagccctggccatttagatggtgtctggccaagagaggggcaggttggtgatgaaatctgttgtgatggcatcttattttcatatttttaagtctattctattagcggtgcatgggattgggattgcttatctgtgactataacagtatcgcaggtgctgctttgctggaagggactgagctgaagagggcctgtgggccagattggaggtaggaatgtggaatcatagtggctctctagagtggtgtggggcaattctgccaaagcagctgctcagactctgggtcagcatctgaggggctttgccccttatggacatctgcttgatgtccctgccagattagctgggttaaccatgtccaaggctacacgtaacagtatgtcaccataaacctcaggaagaacagagtcagttccaggctccctcctgccggcccctgatgcccttgggcattctgcttgttgaccacttggtggttttgatcttggtcacaagtgatggaaacatggagacctgggccagggcaggctccttatgtcagcaggtaggcagtgaagggaagcagatggggtgcagctccagcagatgcaggcctaggtgcagtactgatgggctccttggcctgggaaaagccccttaatgatcctgcttcttttctgtaaaatgggggcaataatgcctacttctcagaaggcttggggagattagatgagctagtgtggagcacctagcacagagttggtgccagaaggcacttgataagtgatggctgctaccgctgttgccatgttaaggcaggttagattaggccaagatcatggcagaaatggagatattttaggtctgcagttgtagcttccctgactgcagactgtgaaccctacatgaccttggcaaatgcatgggcagctgcagtttgccctgatgtcattagaagcttccagggaaggataaagacctctgagacccctgggctgctcagaatctactaaatgggtggatagggcatgagggtggcccctgccaaagggacccctgtttatctgccctgtctttttgttgtctaattccccctgggtggtggagcctggaaactgtgaggtccagcagagcattccatacttccacataccctgctgccctagagtaaagaggctggacaggcctggagtggtagggaccacaaatctagggaagaatggagtccagagccaggagtggggaaagtccaaaaggaaaacctcttttgttggcccaaggcagttgtcaaagttgggatcatcaggaggcatgtccagagagatgagagaaaattctgagcccagaacaagggcaggtggggagggacagctgggtggaagcgccggtcctaagcagggagaggagacgttctgcctgaaagtgtcggcttaaagaatctgtttctgagcctcctgtgtccccatccccccgtcagctgacccacctcttcctgttcctccagaccaagctgctgacccagtatgtgctgagtctggccaaatatgaccagaactatgatattcgcgaccgggcgcgcttcacccggcagctcatcgtcccttccgagcagggtggggccctcagccgccatgccaagaagctcttcctggcacccaaaccagctccagtcttggagtcatccttcaaaggtgggagctgaaatcaagggtaaccttcctaggggaatggaaaggaactggccagagtctctgccccagaccttcctgaggcccctagccaggcaccaggcttctgtggacagtcctgctccctggctcactccttttgtccctcctgtggcaccaggaattactctttcaccctcccataaccactgccagcatcatctcacctgagggtctgccttcctggccaggatggacttgtgcctcctctcctctcaggctcccttttccatctccctccctgagcagacactaggctttggaatacataccaagatcttaaataccaaggacccaggaaggcagaaagcaaaacaacacacaaaggagaggtgtatatttttataaaggtcctgagaaagcagttgcctgcattctgtgagcttagtcactacagtcagtccaaatcccaggccccagggcttcagccttgcctctgttcctgggcttggcccttaaggcctcttttcccaagacaacggccttgagatgggcctgggagggaagggtcctcccgctgcttctccgggccccaggagtggaagccaggaacctacacagaagagagcctccttcacaaagctcagttcttctgggtatcttttcgttctttttctcttccctggacctcacgaatggggagattctgagggtgggcacagctttgaaattctcccaggaagaaggcaacagtccctttctccccgacaccatcctcactcacaggcctgtgctgccctcctccagcagtgcctcaactctgatccagacttctacacactcatgctctgactgttcatccctccctgctgagtccagagcctgactagacgtgcatgctgagcagacaggtcggcagcatctgtgggcccagagtctcctcctgcccacctctgtaggctgcctttccctggccctcagtccctgctctggcctggccagacagccttttcttccagcatgtgggcctaaaggtgcagtcagggtggaagagccattagggcacacatccatctccttcccctacccacctgggaagtcccaaccagaatcaccacccagccccacctggaaaacagctcccagagctttccctcactgctgctacctgcctgacctctaaacctatccctagaccgggaccacttccagctgggctcactgtcccacctgcttaatgccaaggccacaggctaccaggagctcccagactggccggaggaagccccagacccatctgtgcgcaacgtggaggtcagcggggtggagggttgaagtgtgtgtgtgtgtgtgtgtgtgtgtgtgtgtgtgtgtgtgtgtgtgtgtgtgtgtgttggtgggggcagacagtagggagccctggcagtgccggcccagccctcctaacaccctcccccacacacacaggaagaagatctctcccttattgagactcacgtgggcctgttgggcgaatacactgaggtcccaccttcgtgtgacgtgtgctctctcccctgccctgtctgtgtccctcttcttcccctgtgtgttgtgctcctgggccttcccatactctgtttccaccttggtttggcagtgctcctctgtgagcagcattccctcccctccatggacagtgcccctttcttcctcctctgttattccctttgtgggacagaccaggtagggcctcacaaagaggtggaataaagggtaagggcttgtgcctgcctgccttctccccaaccatgatgaaatgaccctgcaccctacccccatctccaggtacctgaatggaccaagtgctcaaatcgggagaagagaaaggagaaggaaaaacccttctactcggactctgagggggagtcaggccccacggagtccgcagacagtggtgagcagatggcagagctggggtcctctgtgctctgcccatgcatctgtgtgactgactatatgaggggtatatgtatatggttgtgtgtctaggggtgtgcacctgcttgtgaattgtttgtgcacctgagggattcatgttccaggtgtgtgtgcttgtgcaggtttctatccatggagtccatctgtgtttctgtcagttccagctggcatgtagggctgggggcaggtcagagaggtttgagggttcagtactgaatgtgaaggtggaacccaggtgtctgctccagacccaaggaggcctgcatatgagggaggaggcctcatattgttcctccacagaccctgagtctgagagtgaatcggacagtaagagcagcagtgagagcggctctggggagtccagcagtgagtccgacaatgaagaccaggatgaggatgaggagaaagggagaggcagtgagaggtgagaagggagctagccagatggctggtggggttcagggggctttcctggaaagagggctagcattgagctttagccagtctcctaagagcccctgagcccctcgtgagctgggtggggctgtcagctcacatgacgcctactttcgctggctgcaggagatctctgaggcctcatgggctggtgtggagaagcaaccagagtcctagagcctgagctggcacaagctggcttcaagctctcacggggtccctgctataggacctcaggtgtgaaccctcctggctcaggctccccacaccactccagcttttcagcatttctcctgcttctgtgaagcaaggagggagtgtccaggccaggcctgagccaacctttcccactccttcagtgaacagagtgaggaggatggtaagaggaagacaaagaagaaggtgccagagagaaaaggagaagcgtcatcctctgatgagggcagcgattccagcagtagctcatcagagtccgagatgacatcggagtccgaggaggagcagttagaacctgcctcctggagcaggaaaacagtgagagccttggggcagagtcagggtgtgctcatgggccagggccctccccaacctctgggccaggcccagacatctatctccctaccatccagaacagaacatgacatcttctacccaacccagaacatgccaaggtgctccccttccccacacccacatcccatttttctctttcagcctcccagcagcaaaagtgctcctgcaaccaaggagatctccctgcttgatctagaggattgtgagtttgggtggtaaaagtcacaggggaaaggaggcctggggagcatgaattagaacagcccatagggactctggatcgggttcctcaggtcttgtgggagcaggggagcagacagaacatatcttcaggcctgagagggcagcagggctgacctccccaggtctggggttgaggtctaggaatgggtattttgcgagagcctccaggcagccatgtgccccgctgtccatggtgctgaaatgcgtgctccttgatccctaggctccctgctcaacccaagccacctccactttgcctcctcatagtcttatctactcccacagtcacccctcccagtgtccagcctgtgtctcccccagcaattgtgtctaccagtctggctgctgacctggagggcctgacactcacagactccaccctggtaccgtcggtgagtgggatggaggaggggaccgggctggggcagggacacatccctgtgctgcatcctatggtgtggatgtgtgtggggggtgggtgtgatggaggatgtgatagctttgagtcccagctgctggatggccctaggggacaatgctgggacaggctctctccatcttgctcagttctgtccttccctacccctccactctagcttctgagtccagtatcgggtgttgggcggcaggagctgctgcaccgggtagctggcgaggggctggctgtggactacaccttcagccgccaacctttctccggggatccccacatggtgtccgtgcacatccacttctccaacagctctgatacccccatcaagggcctgcatgtgggcactcccaaactgcctgctggcatcagcatccaagaatttcccgaaattggtgcgaagggctttggatggggtggaggaggaggctcctgggcagagtcagtctttctgtggttgctgataccctccttgtgccaggccaggggccaagctataggggcacagagatagcatctaacatgatcaacactctggtggacaagacagatgatgaaataagcaagttcacatcagggcgggaggtgcttgcagcagcagatttgggccttggttgtttcaggactaacttaaatgtggtgagggtgagtgggggaaagggtgcttagagttcaggaggaaaccgggaacagtctccagcagccaagaaagccaagattctgtagagggctggtcagctgtgacagtggagaggagagtagggctaggctgggttctagacctatcaggtgatggtggccctccctctccccttcactgccttataccacttcagagtccctggcacctggagaatctgccactgctgtaatgggcattaatttctgtgactcaacccaggcagccaacttccagctgtggtatgtgcccaactcgaggtgggggtgagaggatgggctggaaagggacagggtaacaatgaactggaaatggaggtggtgcttagtggggatacatcatgattgggtgggtctggaagccatctcaggccctcattcctgacctcactctttcactgcctccaagctgtgcctctacacagggtgggaagtgaggggagagatgacagccttaattcttctccgtttcctcccacccctcccagcacccagacccgacagttctacgtctccattcagccacctgttggggagctgatggcccctgtgttcatgagtgaaaatgagtttaagaaggaacagggtgagtgctccctgggagtgggcagagagggaagtatagaagctgactccagaatgtccagcttggatggtagggagaatggtggtgtccttcatctagaccaggggtcagcaaactttctgtaacgggccaaagataaatgttttaggctttgagaatcatgtggtctctgttgcagttacaacacgactgtggctgttgaaacatagaaacatccacagacagtatgtaaatgaacgagtatggctgtgttccaagaaatttccatttatatttatagatactgaagtttaaatttcatgtaattttcatgtgtcatgaaatattaatcttttgattgctcccccaacacttaaaaaatattaaaaacattgtgggccatataggtggtgggctggatttggtctggaggctgtaatttgcaaaacctctggcctagaagaaagaagagtggcttgggcaagggaggagggaagatcatggttagttttggataagctgattttgaaatgcatttgggaaattcaggaggagctatttagtatgcaactgaaaatatgggtctatgcccaggaaacactttgaagctggagtcatgaacatagaggtggtaatggaagctgtgaatatgaatgagatcactctgggaggtgggagaaaataggaaggccaaggacagaaccttgggggaaaacctgaattctgcagaagaaagaggaggggagggataagagaaggagcacagggagaggtgggaggagaaccaggagagacaacaaggcagaaggtgtctgcaaaccacagttacctaagaccttcagagtcagcatataaaaggctactgccaacctgagggagagagggtcattgctaaaggagggacagaggccaactgcagtgggttgagggagaccacggctcaagtacatgcagtcctctttggaggactttagccatgaatgaggagggagacagggcattggcacgatgaaggatctcacttctggaaaggattttttggagacggggacacttgaacatgaacagattgaaggaacaaaaacaagaaaatgttattagtcatgaatgaaggggatagaagaaacaggagagggatgtcagtttctaaaaggaggtgaagaataggggaagcagtggagggaggaaagaggctgaagagaagactgctggtgtgcaggagagcagacggaggagctcccatggggggcctggatcatgtgagtggagagaagtcagccttgcagaatgaggagttctgggggtgctgtgaaggtttggaggcttcaggagccctggctaggtctggagctgctactgcagaggtacaattaaaaatgtacctgtgaatgctgcatgtgactactggattctggctgagagatcacagcagccacctgtgatctttttgtgagggcttagcttccaggagctgagtgggagttgaatgtgggttggagggccccccaggaaagatcaaagggtgtgaggttcaggatgggcgaacctcttaagaactgactggccactctcaaggggctggtagcccagatgtctgatggaggaagcgccaaatcagtctttggtaacaacatggataaaggcctgggtgggaggggtagagaggctgacaaaggcttcctgagggagggcccagtctgagagggaagtaccttctccccaagactgatgatttaaattctgacctgccctttgcatgataccttcccagcctgggagaacttgttgctcagtaagcagacccaggtgctggcctctgtacccaccatggcctctgccctcatcacgacctctacccccaggaaagctgatgggcatgaatgagatcacagagaaactcatgctgccagacacctgtcggagtgaccacattgtggtgcagaaagtgactgccactgccaacctgggtcgtgttccttgtgggacatctgatgagtacaggtactaggccaccagtagaggggaaatgatgagcatgggggccctggtttgaaggaggagccccagctgctgatccccttccaaacacagtcacccttagcagctcttcctcaccccttctattcccacctcaggtttgcagggaggacactgactggtggaagcctcgttctgctgaccctggatgcccggccagctggagctgcccagctgactgtcaacagcgagaaaatggtgattggcaccatgctggtaaaggatgtgatacaggctctgacccagtgacttccaaatgctgtgacctgtttggctcccatctatacctccccatg

SEQ ID NO: 15433 - DNA, 50595 bp, Homo sapiens; identical to SEQ ID NO: 15419

SEQ ID NO: 15434 - DNA, 50530 bp, Homo sapiens
gcacactgcagcctctgctgaacccctgccgcgccgccgccttcgccagcccggaccggaccggcccgccttcccttcctccgctccagccggcctccggccccgcaacctcctcctcggcgaagtctccctggccgccccatgtcggccgcccccgcctacagcgaagacaagggcggctccgctggccccggggagcccgagtacggccacgaccccgcgagcggcggcatcttctcctccgactacaagcggtgagggagcccgccaggaagctcgcgggagggttggggccggggaccgggcgaggcgcgcgggcaccatggacagcgcccggccccagcgccggccccgccccggccgcgccgaccggaagcccgcccggccccctcctgcggcctggagccccggcccagcgcgggcagcgctggcaccccggctccaggggccggcctaggacgcggaggggggcagataggggctggcgggggatgggccagctcagtttcgagaggagaaaccctccggttccaggtgtttctccggtttgcggcgttgcgttaggggttcccttcctttttcgtgctaggcgggttggcttcccaaaaatgtgggggaggggtctgagtcagcgaacttgagcttgagcctggggcctcttcaggaaggcgggccctggatgtacttgcacagcctcccagcttggccctgctgcaaattcatttcccctccctctggtccccatctccatctgaccctcacatccctgctcctggcattgcccctgtagttcagctccaccttcacaccctcccccacctttgattcgttcgtttgtttcttcatttgtttattcgtaaattctgcaacaagcatttatgaaaagccaactgtgtcgagtcctgaactagtcacggaatacaactgtgaacatgagacccttcttgtcctcacgatgctctagaggggagcacagatgaagaagcagtcagggacagtcgagtgtaatgggggcagtgggagcagggagaggacctagtctctggcgccggagagaaggaagacaggagcgtgaggtatgttccaggcagaggaaagggctttcaggaaggttgagagccaggccacaatctgtgtgagccactggactgaccagaaaagagggtggggaggactcctgaaggattctaagcaggcgacataatcagatttatattttagaaggacgtcaggctgctgcattgtggagaagagattggaggtgggccagattgaacaagagacaagggaggtgggtcttgaagttcacaggcctggcatgattgtggcctagaccaggggagaggcagaagatttgaggctgtggaagaggtggaagcctcagacctgatgattaattggatattgggtgggggtttagagggacagggggagaagatgaggattttcacgcacgtccatgtgaagagaccaccaaacaggctttgaacaataaagctttttaatcacttgggtgcaggccagctgagtccgaaaaaagagtcagcgaagggaaatggggtgggaccgttttacaggatttgggtaggtagtggaaaattacagtcaaagggggttgttctctggcggtggggggacacaaggtgctcagtgggggagcttttgagccaggatgagccaggagaaggaatttcacaagataatgtcatcagttaaggcaggcacaggccattttcactcttcagttacttcaggccatctggatgtatacgtgcaggtcacaggggatatcatggcttagcttgggctcagaggcctgacattcctgtcttcttttattaataagaaaaataacataaaatagtgttgaagtgttggggcagcaaacattttggcggggggtggtatggagagatactgcttctccatagccttgaagggctgcttcgagcgggattggggtggcgtgggaacctagagtgggagagattaagctgaaggcagattctgtggtaagggatgatattgtggggttgttagaagaaacatttgttgtataggattattggtgatggcctggatacggttttgtatgaattgaaaaactaaatggaataagagaaggagaaaaacaggtattaaaggactaagaattgggaggacccaggacatccaattagagagtgcccaaggaggttcagcatagccctgccagcaaagattatttatttactttaagagggagttaagactggcagtttggggatagcaccaggagatatcagctgtaatggtttggagaaacagtgtaaaccggcagtgtaaacaagagcagggcatgtatgagtagttgagtatggtgaataggagtatgactagtcagaagatagtagggatgacaagttttctggggcacagtccaagttggtctggtgtctggaatgagactggggcctaataaaaaggagcatctatacaggagcttgaatgggctgtaccctgcagcattccgaggacaggcccaaattctgagaagggcaagtggtaaaagtattgtcagtcctttttaagttggtggctgagcttggtgaggtgtgtttttaaaagaccattagtccgttctaccttttctgaagattgaggatggtaaggggtatgaaggtttcactgaataccaggagcctgagaaactgcttgggtgatttgaccagtaaaggctggtctgttattggactatatagaggcgggaaggccaaactgaggaattatgtctgacagaagggaagaaatgaccgcagtggccttctcagaccctgtgggaaaggcctctacccatccagtgaaagtatctacccagaccaagacgtattttagtttcctgactcggggcatgtgagtaaagtcaatttgccagtcctgggcagaggcaaatccccaggcttgatgtgtagggaagggagggggcctgaacaatccctgaggagtagtagaatagcagatggaacactgagaagtgatttccttgaggatagatttccacaatggaaaggaaatgagaggttctaagaggcaggctagcggcttgtaacctacatggaagaggttatgaaatgacgaaagaatagaatgggcctgtgaggctagaaggagatattttccttggtctgagaaccatttgccttgtgtgggaagagattcataggtgtaagtttcattgggggagtaggtaggagtgactgatgagaaggagaaaaactggccatgagggacagaagttggaatgctagctgcttttttagctaccttatcagcataagtgttgccctgagcgatgggatctgatgccttttgatggcccttgcagtgaatgactccagcttcctttggaagtaaagcggccttgagaagagtttttattaaagaggaattaatgatggaggacccttgtgtaatgaggaaagctttttgcccatataacagcatggaggtacaggatatggaaggcatatttagagtcagtataaatattgacacatagtccttttgcaagactgagggctcgagttaaggcaatgagttaagctttctgagaggtagtggaggggggcagaaagtatatgcgtcaggtgtgaggaagaaaatagattttggaagttatgagaactgtagagagtgagttgagcatagtttgtgattttgagggcctctgaaagtattaaagcagcggcagccgctgcacgcagacatgagggctaggccaaaacagtaaggtcaagttgttcggacagaaaggctacagggcgtggtcccagctcttgtgtaagaattccaaccgcacagccctgcactttggctgtgtgtgatgaaaaagggttgggatgaattagggagacctagtgtgagagcagcttctacggctgtttttaaggaatggaaaggagtggcaaaaggatttaggatctgtggggtcagctaggtttgcttttgtgagtttatataatggtttagtcaggatggtaaaactaggtatccaaaggtggaagtacctaaccatcccttgaaaggaaaggagttgttgctttgtagaagggattggggttcgggagattagccggacatgatcagcagggagagcacgtgtgttttcatgagaactatgccaagataggtaatggatgaggaagaaatttgggcttgactgaagtaatgggggctgtccgtgaagccttgcggcagtacagcctaggtagtttgctgagcctgatgggtgtcagggacagtccaagtgaaagcgaagagaggctgagatgaagggtgcaaatgaatagtaaagaaagcatgtttgaaatccagaagagaatgatgggttgtggaggggttgtggagggaggtattgaggaggagagtatatgagtttggcaccacggggtggataggcaaaacaatttggctgacaaggcacagatcctgaactaattgtaagacttgtctggtttttgaacaggtaaaatgggggaattgtaaggagagtttataggctttaaaaggccatgctgtaacaggcgagtgataacaggctttaatccttttaaagcctgctgggggatgggatattgacattgagcacggtaagggtgattaggttttaatgggatggtaaggggtgcatgatcagtcgccaaggagggaatagaggtgtcctatacttgaggattaaggtggggagatacaaggggaggatgtgaaggaggctttgaactgggggaaaaggtggcaatgaggtgtggctgtagcctaggaatagtcagggaagcagataatttaaagtgtctcggcctaataagggaactgcgcaggtggggataactgaaaaggagtgcataaaagagtattgtccaagttggcctcagagttggggagttttgagaggtttagaagcctggccatcaatacccacaacagttatggaggcaaaggaaacaggcctttgaaaagaaggtaatgtggagttggtagcctccgtattgattaagaaggggacggacttaccctccactgtaagagttacccaaagcatctgtgatggtccaggaagcttccaaggcgattgggcagtgtcagtcttcagctgctaagccgagaagatttgggaaggagtcagtcaggcagccttgggccagagttccaggggctctgggagtggctgccaggtgagttggacagtccgatttccagtggggttccacacagatgggacaaggcttaggaagaatcctgggctgtgggcattccttggcccagtggccagatttctggcacttgaagcaagatcctgatggagaaggtcctgtaggaatgcttgactgctgcagcttaggcattttgaagttcttgtgtactggagatgtggctggggtttctctcacagtggaggcaaggaactacaactcagaaatacattgctacttggctgcctttactctattattgtacaccttgaaggcgaggttaattaagtcctgttatggggtttgagggccggaatttaatttttggagttttatttaatgttgggagtggattgggtaataaaatgtatattgagaataagactgccttttgaccttttagggtctagggctgtaaagcgtctcagggttgctgcccaacgagccatgaactgggctgggtttttatatttgatgaaaaagagcctaaatactaactgatttggcagaggtcggataaaggaaaaggagcgttaaccttgactatgcctttagctccagccacctctttaagaggaaattgttgggcaggttggggagggctagtcgcagaacaaaactgtaagccggactgggtgtggggagaggaggtgatagaaggattatagggtggaggagcagaagctgagaaagaattggagtctgattcagcctggtggggagtgacctgaggagcattctggggattaggtgagaggtcagatgggtcggtagaaaaggaagattggaagattgaaaagacgcagcgacgcttggggttgggactgaggggacaggcgggagggaaagaaggaggatttgggatgagtcgcattgggaacagagactagggagggaccgatgtgtaaaagaatgcctggacatcaggcacctcagactgtttgcccattttacaacaagaattatctagatcttgtaggatggaaaaatcgaaagtgccgttttctggctatttggaaccattgttgagtttgtattggggttaagcggcattgcaaagaaaataaggcatttaggttttaggtcaggtgtgagttgaagaggttttaagttcttgagaacacaggctaagagagaagaaggaggaatggagggtggaatgttgcccacagtgaaggaggcaagcccagagaaaagagagggtagagacacggagagaaggggtggggggtgctttgccccccaggaaagtggagagaaaagagagggtagagacacagagagaaggagtcgggggtgcttgtcccccaggaacgtggagagaaaagagagggtagaaacatggagagaaggggtggggggtacttgccccccaaaaagtggtgtttgccactaagggtgaaagatcaaggcaggcatcctcgcggtgatcagacaactctgaaacgtgggtgaataatcaagcaggcgtccccgcagtgattaaacaccaagggaagactgtcttcctgagtccgtgatcggcgccggagttttgggttcacagataaaatgcatttcctgtctctaccagaaaaggaaaggaaccgaaattaagagaagggagagattgaaagatggcaccaagattgaaaggagaaagaggttgagggatagtgagagaggttggagaagagagtaaaaagaggccgcttacctgatttaaaattggtgagatgttcctcaggctggttggtctgaggacccgaggtcattaggtggatctttatcatgaagcaaagagcaggaggacaggggattgatcttccaagggtggtcccccgatccgagtcatggcaccaaatttcacgcacgtccatgtgaagagaccacccaacaggctttgtgtgagcaataaagctttttaatcacctggttgcaggccggctgagtctgaaaaaagagtcaacgaaaggagataggggtggggccattttataggatttgggtaggtagtggacaattacagtcaaaggggggtgttccttggtgggcaggggcgggggacacaaggtgctcagtgggggagcttttgagccaggatgagccaggagaaggaatttcacaaggtaatgtcatcagttaaggcaggaacaggccattttcacttcttttgtgattcttcaattacttcaggccatctggatatatacgtgcaggtcacaggggatatgatggtttagcttgggctcagaggcctgacaaggatgttactcaggttactagttcctgcaactggatggatgatggtgttattcagtgtaattggaaataaagatgttacaagcaaatttgtggaaaattaatgttgagcccagctttggacatattgagattgtaaactctgagggacatattaccctattaggtagctggatattacgatttgggttccaggagagagattagggaattattaacatatgtatgttaattaaagccacagaagtgaagataactcagggaggaggtataaaatgagttcagacactgcacaagtctgaaccctgaagacaccaacattagaagtgaccagagaacagtggaaagtgtttcaaggtacccaagaggtgaactaaaggctgaaagaaaacaatgtaatttcaagaaggagggagtggtcagtagtttcaatgcccattaaggtcaaatcaaacaaggaaaaaaatcatgaccattggttgacaaagaagagctcaattcctttctactctattccccacctcctgccctgggagataaattctggcaaagtaaggagaacaggagctagattatttctttcccagcattctgttgtggatgatttaaaacatacagaaaaatgaaatgaataatacaatgaacacatgtatatcatccatctagattcaactgtcattgacatcgtaccttatttgctttatctaaccatctattcgtatactttttttggttgaaccatgttaagttgcagagatcatgacccttcaaccccacattctaagtcgacatctaaagccagattaaaatgaataaaggagcacacaggtggtaagtagataaaacagtgaatggaaattttgctttcaagaaatttgactgtaaaagagaaagctgctggaggagaacctcactcagttcaaggaagtttgtctattttgttattttgggtttttttttttgtttcttaaaatgtatgactccatatttttgtttattattaatattaggcgggagagcctagagcaagtttaactgctgatgggaaggagcgattggtgggagagaggctgaagggaagaaaggaagtacagaacactgagtgatgggaggggaggcttactgagctgggtgggaggactagcctgggagcagggaggaccaactctgcccagagggaagagggcaggaggagaggagagtataaatgcagatggagactgggtacagtggctcatgcctgtaatcccagcactttgggaggctgaggcgggcaggtcacttgaaatcaagagttcaagactaacctggccaacatgtcaaaaccccgtctctactaaaaatacaaaaattagccagttgtggtaacgcatgtctataatcccagctactcaggaggctgaggcaggagaatcacatgaacccgggaggtggagattacagtgagccgagatggcaccactgcactccagcctgggcaacggagtgagactccatctctaaataaataaataagtaaataaatgcagatggatgggagtctggggcagggggctgcaggggatttcatctaaagactttccctttttcgggaaccaggtggtgaagccataagggcaaggctgggaatggggacttgagggtcaaaggggtttcaaatacaatgaagaaagccaaccaggccaggcgcggtggctcacgcctgtaatcctagcactttgggaggctgaggcaggcatatcacctaaggttgggagtttgagaccagcctgaccaacatggagaaaccccgtctctactaaaaatacaaaaattagccaggtgtggtggtgtatgcctgtaatcccagctacttgggaggctgaggcaggagaattgcttgaacccaggagacggaggttgcagtgagccgagatcacgccattacactccagcctgggcaataagagtgaaactccatctgaaaaaaaaaaaaaaaaaagccacccaccactggcaggccagtggcattggagaccagtgggacaagagggccaaggatgtgagagcagttggagggatagacacaggggttgcgggggagggtgctaggaggaagtagagataagagaaggttgatgggaaggaataaatcaagtattggctctggaaaggcaggtgaggattaagatgcctagggtcagtgagaagagggtatatgagatttctcaggaggctgcagtctaattgtggcagtgggattggagctgaagagggcatctctcacctctctatcaactccactgaccatctagtcccttgcccagagactaggggtaggcttggtctcctgtccctgcccttctttccctctagaggccttgtctctgagcagtgaagaggaaaccggagcatccctccctgccagtgtccggttaccaagttttgggggcgggccatctggtgactgtgacaggagccccagcgccctggccagctcagtccattcctggagaagaacctgatgcagcgattcctgcagctcccgggggccgtggtgaggcctggggtcagaggggcctgcggagctgatcaagaggctgctagccctgtgctggctcccgaaggtgggcccccactccggtaccaggccttggagcctgaggagcttcggtggctgcaggcccaggaggaagacacgaccccagaagcatctctggaaggaccttgcccagaggccagccagagccagagccagccactacggtatagaggaacccacaggaaccccctacccacacagccaggaaggccagggatgggcagttgcactctcagcccagacctcttccggtcccacctcctctgatggaggcttaggctggcatttagggtccaggctgggcggagaaggtggtcaggggcaccgtatgggggctgagggtatgagtgaggagagatgaggggcttaactccctggaggctctgaggggaggaggatagtaaaatatttgagggttgaggtcccaccttgacctctttctccccacaggcccccactggagtgggctctggacgaggtttggggacaggatacagcacagacagggtttggccagccactgcctgccagtggactggaacttaggtggtaagaggtgacagcgaggtgtatatcaagggaggtgagcatgactgacccccagtgccatgccaggccccctggctggctccagccacccccagaagagtcccttaggctaggtcagactaggggtcaggtcagagtgagtgcagcagcgtaaggggatctgactatgggagataatgtttcatggccttagggtgttgtgccttagtccctgcctctgcctcttgggaacagaagttggtgggagtgaggacgagaggcccagggcggtctcacctcaggtggtggctgcggtctgtgtcagtgcatattctgtgtcagtgcatattcgacagtcaatcttacctgtgctggctgctttaggcccagtggtcctgccccctttcattccccttctcctgcaggggcctggaatgtactcactaggctgggtggggaggatgccctggggtgtgtgcatttgacaggcgcatgtggcatttgtgggtgtggtgaggaagggaatacccagagttaaaggagattgggcaaacttggccctccttccacggaagcccagggaaaagccatcccagggtgactcctcagaagatcagaggacccttggggctggatatatttgatcttagaagcctacatttatcatcaaaaatctcaactaggagtccactgaccattttggtgaatgagactggagaggccaagtttggtccaagttatctgtgtattagatgtgatgcggcatgtgtgtgtgtgtgtagggggacgtgtgtggggtgtgtgtgtctctatgagggtgtgggggagcggggagaggtcttgtgatatatgtctgtaggggacatgtatgggatatgtgtgtctataagagggtgtgggagagtggggagaggtctcctggtggtatatgtctggggggtttgtaggtgtgtaggtgagttgtgtgggtggtttatgtgtgtagagtttttctgtgggaggtgtctgtatgtgggggagtgtgtttctctgggcgttgtgtaggcaggattttgtgggtgtgcgtgggtttatgtatggattctactagtgtctgcgggacctgtaggtatgtttgtatgagctgtccgtgaggtgtaggtatgtcgggggacatgggagtgtctgaggtatatgtgggtggtatcaatgtgtagttgtctgtggggtgtgcgtatgaaggatcctgacgtggagtgttgtgcattcatatctcagggaagctggtgcccagctctgtcatttttcctaggccctcggtgctgcccacgcctacccagctcaatggtctgtacctatgaccatgcccctggtgtcctgagctcagcctcctacccactaagaaactcaacagtctggtctgtgtttggcagggtaagagggtgattgtcttctggccctggcctgaccctggaagagtagaaggtgtcctctgatttggggggcatccccccaggtgagggagtttcagataacatgatggggctggatattttcttctgtcctcacatgacagatagcgagggcctcagataatgctggaaggcatcatctttctattttgctttccatcaaaaatctctttgggaaagacagtttctaacattcttgggatagtgacttcttagtgcccctcttcttgtctgacgtcaggtactcacgcatttctgcagccctgtgactaagttgcgtgttctgtctggttcttctcttcctctcagcattcatcacttgtttctcagcattagcagcagtcatttgccactttatgattgttatcatgctctttcctctcctaacagtgctatccccaatttctgattttctgtcatttctaaatgttgcatgtctgtgactaactttgcacacattgattttttttttattttttatttttgagatggagtctcgttctgttgcccaggctggagtgcagtggcgcgatcttggctcactgcaagctccacctcctgggttcacgccattctcctgcctcagcctactgagtagctaggactacagacgcccgccaccacacccggctaattttttttaaattttttagtagagacggggtttcaccatgttagccaggatggtctcgatctcctggccttgtgatccgcctgccttggcctcccaaagtgctgggattacaggcgtgagccaccgtgcccggcctgatttttaatttttatcactgtgatatttctcaagctgggttcttgtgcctgggtcaaagctgtgggttatcagagtgtcatctgggaaattagtgtgtgtgagtccccacacacagctgctcaccacattttggaattgtcttggcaacatatgagtgcatcagtttcacacaattctatcagctatatatagacacatttttttcatgggtttattaacaattctctgatcacttcgtgatcaccagttctgcatcctctgagtatggttagccacattgttcactgcacaagggcatctggccaaggaataccagcccatgctccacacacagaatggggagcaacagctcagggctgtgtctatctgtaggggcatgcagattgaaaatgggcttgtagcagccctgacagtgaatgctgcaaagagaccttatacatgtatatcagttccttttttaaatttttttgagatggagtctcactctgtcacccaggctggagtgcagtggcgcgatctcggctcactgcaatctccgcctcctgggttcaagcgattctcgttcctcagcctcctgagtagctgggattacaggtgtgtgccaccatgcccggctaatttttgtaattttagtagggatggggtttcaccatgttggccaggctaatctcgaactcctgaccttaagtgatctgcccaccttggcctccaaaagtgctggaattacaagcgtgagccaccacacctggcctctatttcgaatattaaactttaatttaccatatcccaaatatttttccttttgttgctattatgggctgaattgtgtccctccaaaatgcatatgttgaagttctagcccccagtacctcagaatgttacctttgaggtgattaagttaaaatgaggttattaaggggggccctaatccaatatgactgatttctttataagaagaggaaatttggatataggcacgcagaaggaagaccatgtgaagacagagaagatggttgtaagagacagaaaaacccaaagtgtgtttctcctactctcatacacaccgctcaccagagagtgcttcacctctggccacaaaaatgggtggagatttctccccaccaacaacctgttctccagcagacactaactgggtgttctctaattcaagtcaatctagtgttagattttttaggttaagggctcagtgccacaagactgctctctgcttcagatgccaattccaagtggtaagttgtcagctatacttctgaccaactggctataaatcaggggttcccatgccaccctccttgggttcaactctgtgagtggctcacagaactcagggaaactttagttatatttacccatttattataaagggtagagacaaacaccagatgaagagatgcatagggagaggtatggaaggaggggtgcagagctcccatgccctctccaggcaccacaccctccaggcaccttcacatgttccacagtctggaagctctcgaaaccctatcctcttgggtttttatgaaggcttcatgattgatcgcatctttggccatgtgatcaactcaaccatcagccccactccccattccccagaggtcaaatagtgggattgaaagtttcaaccctcagctgggcacagcagctcacgcctataatcccagcacttttggaggccaaggcgggtggatcacttgaggtcaggagttcgagaccagcctgaccaacatgatgaaacccatctctattaaaaatacaaaaatttgccaggtgtggtggtgggcaactgtagtcccagctatttggaaggctgaggcaggagaattgcttcaacccagaaggtggaggctgcagtgagccgagattgcctcactgcaccactccagcctgggcgacagagcaagactcagtgtcaaaaaaaaaaaaaaaaaaagaaagaaagaaaaaaagttccaaccatctgataacaaaagatgcttctatcacccaggaaattccaagggatttccatgtcagttgttcctctcactcaggaagttataaaggtcttaggatctctgcgtgaggaactgggtggaagaccaaatattagaacagaagttctcctagcatccctattgtcaagagttttaggagctctgtctcagaaatggggtatagagaccaaatatatatttctttacaatatcacaagaatcatctacaagccaaagaaagaggctatagaagaaaccaaccctgctgacactttaatctcagccttccagcctccagaactgtgagcaaataaatttatgttgtttaagccaccatctgtagtacttcttgtttttttttttttttagagacaggttcttgctctgttgcctaggctggagtgcagtagcacaatcatagctcactgcagcctccaacatcttggtgcaagcgatcctcccacttcagcctcctgagtagctgtgactacaggcatgtgccaccatgcctggctaattttttttatttttgtagaaacaggatctgactatgttgtccaggctggtcccaactcctgagctcaagcaatccttctgcctcagtctcccaaagtgctgggattacaagtgtgagccaccatgcctggcctgtggttctttgttatggtggttctaggaagctagtatagttgccttatttttctcataaatttagtttttagataccaaagtttaaaaattaaacctaggcctggcacagtggctcacacttgtaatcccagcactttgggaggccgaaggaggcaaatcacttgagtccaggagtttgagaccagcctggtcaacatggcgaaaccccaactctactaaaaatacaaaaaatttgccaggcatggtggtgcacacctgtaatctcagctatttaggaggctgaggcatgagaatcacttgaacccaggaggttgaggctgcagtgagccgagattgcgccactgcactccagcctgggcaacagagcgagacttcgtctcaaacagaaaaacgaaaaaaaggcctgggcgcagtggctcacacctgtaatcccagcactttgggaggctgaggtgggcggatcaactgaggtcgggagtttgagaccagcctgaccaacatggagaaacctcatctctactaaaaatacaaaaattagctgggcatggtggcgcatgcctgtaatcccagctattctggaggctgaggcaggagaattgcttgaacccaggaggtggaggttgcagtgagctgagatggcaccattgcactccagcctgggcaacaagaacgaaactctgtctcaaaaaacaaaaacgtaccaattaaacctagccatattgttgctgctaataattttatgaccttaataaaatcttcccttccttcttttgtatttaaaaataattaactgttaagcaaatgcgggatttattttggggtgaaatatgtatacaagttaaattatttgctgctggccaggtgtggtggctcacacctgtaatctcagcgctttgggaggatgaggcgggaagatcacttgaggtcaggagtttgagaccagcctgaccaacatggtgaaaccctgtctctactaaaaatacaaaaattacccgagcgtggtggtgcatgcctgtaatcccagctacttgggaggctgaggcaggagaatcacttgaacccaggaggcagaggtttcagtgacccgagatcgtgccattgcactccagcctgggcaatgagagcaaaattccatctaaaaaaaaaaaaagtgctgcaaagcagttgtcccaatagcatttatttaagtggggcgggggcgggggggtgggggcggggggagattcttattggttcgtaatttatcaagttagaccttttatgaaattccccccatgacctttgaccttctgtttttaacctggtaccaaacagcttttatcatcgtctcgtggtgtttatgttttgaagtccaatagggtgagttgtctatgattgtttccttcttttcccaaaaatattctttggagttcttacctactgattttttttttccagatgaattttgctgtcacttaagtttgacaaaatgttccctttgaaatttcaaatttttgaaatgaagtatgagatctaaaaaaaaaaagaaacctgtgtattggctcagcattacccttattcctctcagccaagtgcaagggatcacttactcaaatctttattcatcccactagagtttaatgacttccttgaatggctgttcaatgttcagtgacaggtctggcttttgttgtgaggccatctatggagtctctgggacccttccagtccctggaatcagtttggtctgagaggtcaggacttggaaacatactggaggcagggcaagggcaccctgctcttgttttggcatctacctcttttccgctggtccttcttatccatccaactagtccttttccctgagccaggtccatactttcccaccccaaacccttcctcttgtttcctggctctctgtttctggctacattcatttcctacactcctgtatcaaaagtaccacaattgcttctcgttcccacagtgcagtgcggctgagcgcctcagagcccgcggggacgctgcggggggattgcggggagggggcgttgggaggtgccgatgttgggctgggcggatgagcgcatctgcgtggtgagccttccaacgtgcgcgagaaggacgtggaagaccttttctacaagtacggccggatccgcaagatcaagcttaagaatgggcactgccttgtgcccttcgccttggtgcgctttgaggacccccgagatgcagaggatgctatttatggaagaaatagttatgattatggccagtgtcggcttcgtgtggagttctccaggacttacgaagtcggggtgggtggccccgtggtgggaggaatgggccttctgcaagaagatctgatttccgagttcttgtttcaggacttcctcaggcagctggcaggacctgaaggatcacatgcgagaagttggggatgtctgttatgccgatgtgcagaaggacggtgtggggatggttgagtatctcagaaaagaagacatggaatatgccctgcataaattggatgacactaaattccactctcatgatagtgaaacttcctacatctgagtttatcctgagagaagcaccagctatggctactcacagtctcggtttgggtcaaggggccgtgactctccatactaaagccggggttccccacaccacttctctcctttcaggccctactgagacaggtgatgggaattttttctttattttttaggttaactgagctgctttgtgctcagaatctgcattccagattgaggatttagcgtcttaggaaattattttaattttttttttttaaagaagaaaaaaaaactacatactttctaccagggccatattagcagtgaaacattttaaactgcagaaattgtggttttggttcagaaacaagttgtatatttttcactcctgaatatgggtaaaaaatcagttccgtctttgtgggttgctctgctatggagatcaacagttactgtgactgagttggcccattctgcttaaaaatatgttttaaacgtttaagaaaaatgctcatcatcactggccatcagagaaatgcaaatcaaaaccacaatgaggtaccatctcacaccagttagaatggcaatcattaaaagtcaggaaacaacaggtgctggagaggatgtggagaaatagaaacatttttacactgttggtgggagtgtaaactagttcacccattgtggaagacagtgtggcgattcctcaaggatctagaactagaaataccatttgacccagtgatcccgttattgggtatatacccaaaggattgtaaatcattctactataaagacacatgcacacgtatgtttattgcagcactgttcacaatagcaaagacttggaaccaacccaaatgtccatcagtgatagactggattaagaacatgtggcatggctgggtgcggtggctcatgcctgtaatcccagcgtggctcatgcctgtaatcccagcactttgggaggccaagacgggtagatcacgaggtcaggagatcgagaccatcctggctaacacggtgaaaccccgtctctactaaaaatacaaacaattagctgggcgtggtggtggcgggtacctgtagtcccagctactcggtaggctgaggcaggagaatggcatgaacccaggaggtggagcttgcagtgagccgagattgcgccactgcactccagcctgggcgacagagcgagactccatctcacaaaaaaaaaaaaaaaaaaaaaaaaaaagaagaagaaaatgtggcacatatacaccatggaatactatgcaaccataaaaaaggatgagttcgtgtcctttgtagggacatggatgaagctggaaaccatcattctgagcaaactactgcaaggacagaaaaccaaacactgcaggttctcactcataggtgggaattgaacaatgagaacacttgaacacggggtggggaacatcacacactggggcctgttgtggcgttgggggaggagggagggatagcattaggaggaatacctaatgtaaatgacgaattaatgggtgcagcacaccaacatggcacatgtatacatatgtaacaaagctgcacgttgtgcacatgtaccctagaacttaaaagtataattaaaaaaaaaaagtttagtaattgaaaaaaaaaagtacaacaattgggttggttggaacagcagaaatgaattgtctcacagctctggaggccaaaagtctgaactcaaggtgtcggcaggaccatgctccctctgaaacccatagggaaatccttctttgccccttctagcttctggttgtttgctggcagtctctggcattccctggcttgtagacgcatctttccaatcgtctgccttcacatggtagtctccctgtgtctgtctctttaagtggctgtcttttgttttttgtgtttttttaatttcaatttaatctattttttgtagacacattgtttcaccatgttgccaggctggtctcgaactccagggctcaagtgatcctcccgtctcagcttcccaaagtgctgggattacaggcgtgagccgccacacccagcccacatggctgtcttcttatgggaaaccagacatgggattagagacccactctattagagtaggattgcatttaactaattacatctgcaacaactctatttccaaataaggttacattctgaggtactaggggttaagacttaaatatatcctttttaggaaggacacagttcaacccacaatattagctggccacatgtttcccctgatctgtactttacttgttccccctggctctggtccctcctcgggtcaggtcctgcctgagcctcccctggccatgtcccttctttgtgcctggaccctcctgattaataccccatccccacccttgtgccctcagctgacttcttgtacctcccaccaggcatgatgacctgaaggagatgctggacaccaacaaggattctctcaagctggaggccatgaagaggattgtggcggtaagaggggaaggaggaggcctccctccgggcggggcctgggtggccaagagcagctctccttagctccttgtagaccttccctctagttagtgctgtgcctctcgctttgtccctcttcccctaccttgaccccaccacccagatgattgcccgaggaaagaatgcttcagacctgtttcccgcggtggtgaagaacgtggcctgtaagaacatagaggtgagcactacctggtgagggattgcttgtccccacctcccccaggaccacactcaagcttggggtgaggaaggaaatgatttagcccctgggggcccgacctgctgagaaatgtctctgagccaggagaagacactgtctccatgtccctgaactggatgtggatcaaggtaaaggacccggatacactcaggggtgctctcccccactgggagagtttgtccccatggaccgcagctggctggggagatgacatcccaggggtaggggggtgggcacaggtgcctgctgagaagcgttctgctgagaaacgtgctctccccaaggtgaagaagcttgtctatgtgtacctggtacgctacgctgaggagcagcaagacctggccctgctgtccatctccaccttccaacgtggcctaaaggtcaggggtctcagtttgcctcccagggcctgggcctcgttggcgctgtatcggaggagtaggcctggggagaggccatgagcatgggagcgggctctgcagaccccttcctacctgcctaaaattgggagggtcacagtcagaagaggccagccagaccctcagagagtggaagctgggctcagaaggggcgtaagagatgaagtgggtacccagggcccctgtctctcttcccaggagcctgtggtaatggctgcttctagtatgaaccacttgagcccccggagagtggagagtctctagcaatggagaacccctcaaccctcacccccctttgtgtaaaggtgtgaattgtggtccacagccaggtagatttcaacctttagcagtggcctgaatcccccacaccattctcaccttttgtttcattttgcccaaggcctctagttggatttacatatgttaggtgcatgtataagtctcccccctaagggcttttctggttagtctaagacatcttgagggtaaagacagccatttcaaggccattctctccatattggatttttcagctctgattacaaccattaactcctctatttttgcatacctttatttatttatttatttatgagacaggttctcactgtgttgcccaggctggagtgcagtggtgcaatcatggctcactggagcctcgacttccctgagctcaggtgattctcccacctctgtctcctgagtagctgcgactactcagcctgcatcaccatgctcggctaatttttttgtagtttttgtagagatggggtttcaccctgttgcctatgctggtcttggactcctgggctcaagtggcctcagcttcccaaagtgctgggattacagggatgagctaatactcctagcctggatacttttagttcaaatttctgtgagagagattgtgaaaggtccagctcatcttttcatatccagaagttctgtaggttgctgggtagacaggattgctgctcaaatccagggcccaccccttgtccaatctgctatggccagcaagaggggttgacagtcggcttctttggggtgagagtagaaagcatggtcacttgaatatacaattcattcatttagtaaatacttgggtgtctctatgccacacattgtgctagatttctttttataagtcaaaaccatggaatccgtcttagattggcaagtaatcttttggtttgagtaagggttaagtataaaaactaatctgaaattgttgtacagattttcacctatagtctctaccaactgaccctgtcccccttttagaaaaccagagctcatttagttcaactcaatgtgataatttctttctgcaaagtgccaaatagtattttaggttttgtaggccttatagtctcaactatgcaactactcaattttgcccttatggtgcaaatgcagccattgacaagtgggcgtggccgtgttccaataaatctatataaaaaacaggcaatagacagattttatccaagggctgtagcatgccagcctttgctctagaacatgtctaacaggtcatcttttctgatagggacctcactccttcataaggcaacttgctccatctcaagacaactaccactatttggggtgttttttaaaccattctcttttgttgaaacctccacaactataatttttaaaaattgatttcaggctgggtgtggtggctcatgcctgtaatcccagcactttgggaggccgaagcaggcaaatcacaaggtcaggagttcaagaccagcctggccaacatggtgaaactccatctctactaaaaatacaaaaaattagcttggcatggtggcgggtgcccataatcccagctactcaggaggctgacgcaggagaatggcttgaacccgggaggcagaggttgcaatgagccgagaacgtgccactgcagtccagcccaggcgacagtgtgagatccatctcaaaaaaaaaaaaaattgatttcaggctgtactgcattatgactgcacctgtgaatagccactgtactccagcctgggcaacatagggagaccctgtatctaaaaaataaaataaaatttactacaggttcacaaaaggcataaagaataatataatgaatatccataagaaatgacacatttctcaaatagccaaagcctcctatatatcttctcttgtttatcattcataggtatgtatttattcctgtgctagtaatttgcatattgttaagcaatataaaatgttttgtaaatggtgtcatcgtactacatatgtattcctttaaaacttgttttcttttttgttgtcactggcttttggtctctcctgcatgttggaaccaatcatttcaatccagccttctcccttctttcaatcctagcccaggctagggccgtgttcactttcttaggagatccctcatggaatcaaacctctgactggcaagcagataatccaggtctccctacatcctgtctttgtacagttggtcccttgaaccccctatgaaaccctactctatttcattttatcagtttagcacagggtccaaaccagggtgattctgaatcttaattatgtccctcctgattttgtgtcttctttcaagatactgataagctatttggaccagggcaaaagactgaggcatagcatgtttccaggttgacactgatctgttaataaaccttctccaagtatatttcaccacgttgtagacccacctgactgtacagacagctggcatttttctatcttgttaggaaggatcttattcaatagcaataaataaataaataaataacacctttcatgtgcaaagggttgtgggtgacacagagataaaacagatgtgaattctgctcttaaaaatgcttggctattaggtgaaacaaaaggcctacctaaaaaatagcaatgcaggaaatgctatgagacttccacaaacatatcactgaaatcaagatactaatatccaccggcctagttaccccatcaaaaaggaaaacacattttttttgataactttctgtgaatctataatcatttcccaaataaaatgctcacacacaaaaaaggaaaacaggtttaagcagatgatgtgactatttgtctctaagaaaacagagactccttccttttcaataaatgtttctaacccatctgtttaaaagtcaattccagaattttgtcaggaattagcatcaattttacctgcaattgtgaggatcttgtcttgtctttttccatttcagaaagtcagggtaatatctacccttctttagtgttctattcccgtcattctctaagagtaatagtacaggcacacctcattgtattgcactttgcagatattgccagatattgcactttttacaaattgagggtttgtggcaaccctacatcaatcaagtctatcagtgccatttttccaacagtatgtgctcacattgtgcctctgtcacattctggtaattctcacaatattccaaactttttaatgattattatatgttatggtgatcagtgatctttgatgttactattgtaattgttttggggtgccacaaaccatgctcagacatgaaagtgaaattaatcaataaatgttgtgtgtgttctgactgttcccccatctccttcaccttgggcctcttcattccctgagacacaacaatattgaaattagatcaattaataaccctacaatggcctctaagtgttcaagtgaaaggaggaaccacacatctctcactttaaatcaaaagctagaaatggttaggcttagtgaggaaggtatgttaaaagctgtgataggctgaaagctaggccacttgctccaaacatttagccaagttgtgaatgcaaagtaaaagttcttgaaggaaattaaaagtgctactccaggctgggcgtggtggctcacacctgtaatcccagcactttgggaggccgaggcaggaggatcacttgagaccaggggttcaagaccgtctctataaaaaatttttttaagttagcctgatgtggtggtacgcacctgtagtcttagctacttgggaggctgaggtgggaggatcacttgaacccagaagtttgaggtgcttctccagtaaacacatgaatgataaagaaagcaagacaggattattgctgatataggaaaatttaagtggtctggatagacgatcaaaccagctaccacattcccttaagccaaagcctaattcataggcaggtcttaaatctctccaattctatgatggctgagagaggtgaggaagctacagaagaaaagacggaagctagtggaggttggttcatgaagtttaagtacagaagccatctccataacaaaaaaatgcaaggtgaagcaaaagtgctgatggagaagctgcagcaagttgtccagaagatctagctaagatcattgatagatgtgactatgttcaacaagagatgctcaatgtaaatgaaacagcctcttactggaagaagatgccatctagcactttcctacctagagagaagtcaatgcctggctttaaaaaacaggctggctcttgttaggggccaatgcagctagtgactttaagttgaggccagtgctcaatgaccattctgaaaatcctggggtccttaagaattatggcagatctcctctgcctgtgctctataaatggaacaacagtgccatgacagcacatctgtttgcagttatggtttactgaattttttaagcccactgttgatacctaccgcttaaagattcctttcataatattactgctcattgacaatgcatttgttcactcaagagctctgatggagaggtacaaggagattaatgatttcatgcctgctaacacaaaatcagttctgcagcctatggatcaatgagtaattttgacttttaagtcttattatttaagaaatacatctcgtaaggctagagctgccatagatagtgattcctctcatggatctggacaaagtaaattgaaaaccttctggaaaggtttatagaaaccttctggaaaggtttaccattatagatgccattaggaacattcatgattcatgggaggaggtcaaaatattaacattaacaggagtttggaagaagttgattctaaactccatggatgactttgaggggttcactacttcagtggaggaagtaactacatatgtggtggaattctacctagaagtagaagtagaattaaaagtggagcctgaagatgtgactgaattgctgcaatctcatgataaaacttgaatggatgaggacttgcttcttatgagtgaacaaagaaagtcctttcttaaaatggaatctgccgggtgcagtggctcacgcctgtaatcccagcattttgggtggccgaggtgggtggatcacgaggtcaggagatcgagaccatcctggctaacacagtgaaaccccgtctctactaaaaacagaaaaattagccaggcatggtggcgggcacctgtagtcccagctactcgggaggctgaggcaggagaatggcgtgaacctgggaggtggagcttgcagtgacccgagatctcgccactgcattccagcctgggcgacagagcgagactccgttacaaaaaaaaaaaaaaaaaaaaaaaaaaaaactcctggtgcagatgctgtgaacattgttgaaatgacaacaaaggatttagaatattacataaacttagttgataaagcagaggcagagtttaagaggactgacttcaattttttttttttttgtagagactggggtctccctatgttgcccaggctggtcttgaactcctaggctcaagcaatcctcctacctcagcctcccaaagtgttgggattacaggcacaagccatcacgcccagcctacattgtttttttaaagacataatgctattgcatgcttagtagactacagtatattgtaaacataactttttttttttttttggagataggatctcactctgttgctcagtctggagtgcagtggcatgaacatatgtagctcacttcagcctccaactccctgggctcaagtgattctcccacttcagcttcccaagcagctgtaactataagcataacttgtatgcaccaggaaacaaaaaatttatgtgactcgttttagtgcgatatttgctttattgttgaggtctagaatcaaacccacaatatctccgaggtatgcctgtaatatatagctgctgctgctgatagtgggaagacagtcctaagccccatgatcacaatacagtgtaaggaatgcttttatacgttctgtataggatgcagtaggaataaagaagaagggcttggggccgggcgtggtggctcacgtctgtaatcccagtactttgggaggccgaggtgggcggatcacttgcggccaggagttcgagaccagcctggccaacacggcgaaacctaatctctactaaaaatacaaaaaattagctgggtgtggtggtgcgcgcctgtagtcccagctacttgggaggctgaggcaggagaatcgcttgaacccaggaggtggaggttgcagtgagccgagattgcaccaccgcactccagcctggcgacagagcgagactccatctcaaaaaaaaaaaaaaaaaaaaaaaggaagggcctacacccctattttgttttaaacactgtggaagaacagcagcttttgcaatgatttctgggagaaaggagtgtaaggttgaactccggaagggagaccagcttgcatctgctgggcggtcacctcaggcattaaaacaggcacctccaaaaaaacccttacaaggaacaggaagtgtttcaggtgtttcagcaattttaggtgttctgaaagtttttcagtgtttctggaagtgaagctacccattgcaacacctgttcaggtgtcagatttctgcaaccagagccaaaattaagtgtcccccagatacccatcactggcacaccatccaggctccagtcaagcggcagggaagcaagagctagtggtcgctggggacagtgacttccaaaggtgtggcctccccccatcagggcacctggtgccctttcatagctctgcctccacctctgcctttaggatcccaaccagctgattcgtgccagtgccctccgtgtcctctctagcatccgtgtgcccatcatagtgcccatcatgatgctagctatcaaggaagccgcctcggacatgtcaccctatgtgcggaaaacagctgcccacgccatccctaaactctacaggtatgccccagccctgtcccacgctccccaggaggctggttcctaagttctcaacccacccctggcctttcctaagtcttgcctgctgcttctcagagggtttgaggagggtagtttgggggactgacagagatggaggagaacaataaggctggggtgcaggaggtgagcatggcttggacagatattgggaaggctggggctgagagtggcaaattcccctcaccgatttctccctcagtttggactctgaccagaaggatcagctgatagaagtcattgagaagcttctggctgacaagaccacggtgcgtgtataggggcgctccgggaggggtggtgaccggcagccggccttccacccttcgcgttcaccctctcgtctttgttctttccccagctggtggcgggcagtgtggtgatggcctttgaggaggtctgcccggagcgcatcgacctgattcacaaaaactaccggaaactctgtaacctgctgatcgacgtggaggagtggggccaggtggtcatcatcagcatgctcacccgctacgcccgcacgcagttcctgagccccacccagaacgtaagtgggcccagcccaggcagagcgggccgaagtgtgtcccggggaggcgcccacagacccgtcggtctccccgtccaggaatccctactagaggagaacgcggaaaaagccttctacggctcagaggaggacgaggccaagggcgcggggtctgaggagacggccgccgcggccgccccctcccgaaagccctatgtcatggaccccgaccaccggctgctgctgcgcaacaccaaacccctgctgcagagccgcagcgccgcggtggtgatggcggtggcgcagctctacttccacctggcgcccaaggcggaagtgggcgtcatcgccaaggcgctggtgcgcctgctgcgcagccacaggtgcgctccgcccccagccccgccccctccctcgcctcctgccccgccccacgggctgcccggctccgccccctcacgcccaccagccgcttccacctctgcccacccgctccacactgaccgtagtcctgccctccgcactggtcctctccccgcaacgacttgccccaccttttcccctcatccgctgacccttgccccaaccgaggggcccggggtgctctgacccgtcctctccgcagtgaggtgcagtacgttgtgctccagaacgtggccaccatgtccatcaagcgccgggtgagcctgcgacggcgggctgtcctcgctgtccgagggccgcttctgcgggcactggaggcgttgtcggggctgggaccggggccggggaaagggaagatggaggaataccctggctgtgcagaggatggggcaggggaggctccaaatacagatagggagcagggcctggatcctgaggggccgctgaggggatgtccagtggaaaaagagctagtcagatctgagatggacgagggaagacttgaggagtggagggcagtggtgaggaggcaaggatcctgggcgctgggtcaggataggaggggtgtctctgggcagcgaggcaggcctggggcttcggtggagctccctagctgcctctcttgtgccagggtatgtttgagccctacctgaagagcttctacatcaggtccaccgaccccacccagattaagatcctgaaggtgagtgagggacagaagtgcatgtgcttcccagccctccccaccccatgtacccactcaaataactcacagtggcccccctggtgcctgcctattcctggggctgagcccaggagcccatgactgccccagctggagctgtttgttcagggagctgggctaaggagggtcagggggagaagggaactgctctttgcctagtacctggtatacacctgctactcttcataaatgaagtaacctgatatcacctcataataatcccaggatgtgtacattatattccttttataaaaatatagactctggccaggcacagtggctcacgcctaatcccagcactttgggaggccgagacaggcagatcgcctgaggtcaggagttcaagaccagcctggccaacatagcaaaacctcgtctcaacgaaaaatacaaaaattagccaggcgtggtggcaggtgcctgtaatcccagctactcgagaggctgaggctagagaattgcctgaacctgggagacagaggttgcagtgagctgagattgtgccattgcactccagcctgggtgacaagagcgaaactccatctcaatctaagaaaaagaaaaaaagactctgggaggtaactgccccaggtcacataattctgctgactccaaggttcacacttttctctcccacccacagtgttatggcccccacacacctgccccctcaggctctcctgcaaacattcacggacaaggaaagtggcgggagcccatacctccatttgattcctgctctgctgcctcattattgagtgatttccttcagcaacagttaatcttcctaacccttgtgaacatccactatgttctaggggtacatgatgagcaaactaatcagggaccctgcctttgtggagcttacagatgtggggaggaggagacattaagcagttaatcacaaggcaaatgtaaaagtccacttacaaaatatggaagaaagtgtggagagctataagggcataaaatagggagacctcatctagtctggtgccagggaagttttcccggaggatatgagacttgagctgaagcctgagagatgaacatgaattatgcagggacagaaatgggaagaactgctccacgcagaggaaacagcatctgcgaagaccctgggttaggaagtggagtgggattggggcctggaagacaagggggacagtgatgggagatgggaggtagacagcaagcagatcattcagggacttacagaccatggtgaatacgatggtctccatcctgaaagcaataggaagctttaagttttcaatgcagtagggaggtgacatggtcatactgtaagcatactgtgtagggaatccacttaagaggcaaactggtcctcttgctttttagacaagtttcataacctgtcaattccctcatcagtgtgaggatgatgcagggctgtcatgaggattgttttctggtctatgaagtgtatttggaatgaaagcacagaaagtccactggccaacccacccattttctgcctctccaaccctccctgcagctggaagtgctgaccaacctggccaatgagaccaacattcctactgtcctacgggaattccaggtacaggccagctcccagccagaagggcctgggagaggggcccatcagatccttgtgccctggtgggtaaacctcctcttatgagcccaaggctggagaaactattatcttacattcccgttccaatgtgtttggctggctttgggccaaggaatcactggattgggggtggagttgtcaccccctttcccaagtcttagtcaccggcatgataagccataaaatgaaaggccacagccttcttgaaggtcaccctcaagcctgcagagtcactgagggatttctttgtcatatcccacagacctatattcgcagcatggacaaggactttgtggcagccacaatccaggccattggacgctgtgcaactaacatcggccgagtccgtgacacctgcctcaatggcctggtgcagctgctgtccaaccgtgatggtcagtgtttccctgagtgtctaaccgtgatgatcagagggtgtctgcctgcaggtctgactctgctggccactggatatccaccagtctgcctagacacaatgtgtatccattggtctgtctgtcttgatcagggcccaagtgttcctacacctctgagggctgctagagaactgaagggggttgagagaaagagccaagggcctggggcactgcaggtgtgtctgtccacctgagtgtggccatctgactgtcttggggtccacacactcatttttgttctgtagagcttgtggttgcagagtcagtggtcgtcattaagaaattgctacagatgcagccagcacaacatggagagatcatcaaacacttggcaaagcttacagacaacatccaggtgagggagaagccatattttcactccccacttcaaggtcctccccatgatttcaagactgtataattacatatgctagccttatcaaaagtaacttccaaaccttaggtcttcaggtggaaggagcagagacactggaccatgtgaccctgaccttgttacccctgatttgctttccctttggagaccctcaatgagcacgatggactttactactactcttgttttctctctaaagctctagccaaccatggttgagtgacaaatcttgtgtttttctatcgcactgctaagctgaaacatctaaacaaggcattcccaaagattctggagagtaacatggaaataaagtactgagggtacaatgaatccagaaaatcaatcttttacatcatgactgacttagggtcttgaaagctctatgctaatgaagccctagggaagaggggaaatgctgtctaggaaatgtctaccttttaacctctctctatctcaccacccccaactcccatttccagagaacccataatacaacaggccagcacagatgaggagtgctgtttccctggaagtccacaatcctacccacccactttcccgtatttacccatcttcactcctctcccacaaccacaggtgcccatggcccgagccagcatcctgtggctcatcggagagtactgtgagcatgtccccaggattgcacctgatgtcttaagaaaaatggccaagtcattcacagcagaggaggatattgtcaagctgcaggtcatcaacctggcagccaagctctacctgaccaactctaaacaggtaaagattaagagatgaccccccagatactctggtccccagaaactccctagacagtattcttttggccctccctaggcagggctgaactctagctcctattttggaaaagaagaatcagggaaggtggctggtctgcccacataaccaatgctaccccagtgcccacaaagaccttgtagtgctggtggtcactgttgaagagactctcctatgaagctgtgacctccagtctgctagtacaagagtcctgtctgccaccttggaactctggggctgtgaagaaccacagttgattgggataagggaagggcccaacagtggcaggtactgatgggagaacatgcatcccagatgtggtctgtgcttctttccaaagcttgacaatgcttggccagtctgtgccaaagataagggggtgagtctctgcttgggcttgggtggtgctggtggccactgtcattcccaaggtgaaaggttataagagatacacagccaaggatgaggctcaactaagttgtagtatcagggtgttcagagcctcctagctgtctggcatctcctgagatggttccaggagattctcctaaaatgaagcataatgtgctgagcttttcaaggtgtcagggacatcaaacaccatgacgatttccacactctcccactcagttaagcaggacagggattggcaaactactgcccataggctgaatttggcctattcctgtttttgtaataaagttttgttggaacacagccctgctcattcatttacaaattacctatggctgcttttgtgctacaacagcagggttaactagttgcaacagactgtattgcccacaaagcctagaatagttattctctggcccttttataaaaagactctgccaatccttgaagcaaaacctctggctaggtggctggggtctacagatttatagcagggatatcccctggagactgtagcatccctgccatgtccactgtgcgtgggagtctttggatggtggcacttatctttttcagtggcttctttgatccattgtggccagagtgagccccagaggctcaaggtgaggtaggcagggccaccaagtgctgtgactgtaatcaggagtcaaaggacagcagcaacatgtggaggcaactgagtctgtataattaaatatgctagccttatcaaaagtaacttccaaaccttaggtcttcaggtggaaggaggagagacactggaccatgtgaccctgagcttgttatcagtgttgtgggcaaagcagattggagagagagaagttagagggggagagagagaagttagagggagaaagagcaccatggggaagcgttcaatcgttgaaaaaatatttgtatacttcctttgttcaggtgggaggaaggagcaagtgggaggaatgtttgaaaagatgaagcagcctgggtggggagccacccaggtaggtgggagtcttgacatgctcagcaatgagccagagtcctaaaccccaggatggtgaggttggcatgttttcataagcctgggcctgtccacatgtcatttcccccaagttgtcactgtgagctacatgtgcatttgttcatttatttaacatatatgtaggtgggagtctgacatgctcagcactgagccagagtcctaaaccccaggatggtgaggttggcatgttttcataagcctgggcctgtccacatgtcatttcccccaagttgttactgtgagctacatgtgcatttgttcatttatttaacatgtaggcctactatttgcctggtactgtgctgcgtcctgaggatatgacaatgagtgagacacatttacaggtctccagatactcacagccaagtaggagaaacaggacaaaaataaacattttaaacacagcagtaacagctgtcatcagggttggcacagcgagctgtgggtatatacagctgaaccctcccctaggaatgacccctgtcagggaacccagagtaggctgttcaggcaaatggacactcacctccagggcgcccttcacctgcaagtgagtttttgcaggccccttagaatggttatttgattcaataaagatttttgtcctccctttctttctcctttcttcccagcctcttctgggagtggtaaagaagggggagtccttggggtactaggagggaggtggtttggatgcgcacatgaccatgcttgcaaaacagtagtgatgcttcccatcctgggaccatgagtggcaatctgcccagctaaaaggccacagtaatctcagtcattctctccaatttggacatgggcccacggcatgccagatcctggcccaggatgaggccaaggaaatgaccaagatgaggcctctgccctgctattgatcagcagataatcagatactagaccagaggccacaaaggcataacatgcaggtggcgggggatgggggggttggtaatcaaagtggctattacatccacctggatatagaccctggggaaactgcctagcaggttagtttgcttttatgtgtcaggtgagatgtgtggcaggagggtctgccaggggcacagtgggatctacaaccctcccatgtgaccgcctttacagtgaatagaagattctgacaaattttgcagaattgcttttaaaaacgtaaactttttttaatatgctaaaggtaatacatgcttatcatagaacatttggaaaactcagaaaattataagtttaaactattaataagtccaccatttagaagaccaccattaattatatatttccttattttttattcctatatatagtcattcagaagttgtacttttgtctattgtccaatattttaaacttttctgcttcttttcaatgctttcatatttaatacttttttttccccattcacatttcaattaaacttttcacttagaattttctccaggctgggttcagtggctcacacctgtaatcccagcactttgggagcccaaggtgggtgggtcatttgaggtcatgaattcaagaccagcctgaccaacatggcaaaaccctgtctctactaaaagtacaaaaaaattagctgggtgtggtggtgcgctgaaatctcagctacttgggaggctgtggcaggagaattgcttgaacccaggaggtggaggttacagtgagctgagatggtaccaccacactccagcctgggccacagagcaagatccatctcaaaaataaataaaaattaaaaagaatttcctccaaatttttttctactttcacatttttaaatcaattgtattagttttctgctacataataaattactataaatttggtggcttcaaacaacacacgtttattttctcagtgtctatgggtcgagaattcaggtatggcttagttggatcttatgcaaggctacaactgaggtgtcagccaaggctgagtttttatctggaggctgtactggggaaaggtccacttccaagtcacatggtgccacgatccacttccttgcagttgtaggattgtggccctggcttcttgctggctgtcagctgggggctgcccttgccttctagaggccgtccttagctcattgccataggggcctcccaacacggatgcttaatttctccaaagccacaagggagaaagtctctagagccagtctgctagcaagaccgtcttctttttattttttaatttttatgggtacatagtaggtgtatatatttatggggtatgtgagatattttgatacaggcatataatgcataacaatcacatcagggaatggggtatccatcctctcaagcatttatcttttgtgttacaaacaatcaaattacactctcttagttatttataaatgtataataaattattgttgactgtagtcaccctgttgtgctgtcaaatactagatcttacacattctatctaactataattttgtacccattaactatccccacttcccccacccactacccttctcagcctctggtaaccattattctactctccaactccatgagctcaattcttttaatttttagccctcacaaataagtgagaacatgtgaagtttgtttttctgtgcttggcttatttcacttaaaataatgacctctagttctatccatgttgttgcaaatgacaggatctcattcttttttattctttttttatagtactgcattgtgcatatgtaccgtattttctttatctatttgtctgttgatagacacttaagttgctttcaaatcttggctatggtgaacagtgctgcaataaacgtaggtgtgcagatataacttcaatatgttgatttccttacttttgggtatatacatagcattgggattgctggatcatatggtagcactatttttagtttttgtttgtttgtttgagatggagtcttgcactgtcacccaggctggagtgcaatggcatgatctcagctcactgcaacctccgcctcccaggttcaaacgattctcctgcctcagcctcctgagtagctgggattacaggcgcccgccaccaagtctggctaattttcatatttttagtagagatggggtttcaccatgttggccaggctggtcttgaactcctggccgcaagtgatctgcccgactcggcctcccaaagtgctgggattacaggcgtgagccactgcacctggcctatttgtagtgtttttttttgagatggtgtttcactcttttttcccaggctggagtgcaatggcgtgatcttgcctcactgcaacctctgcctcctgggtgcaagtgattcttcttctgcctcagcctcccaagtagctgagattacaggtgcctgccaccacgcctagctaattttttgtatttttagtagagacagggtttcaccatgttggccaggatggtcttgatctcttgacctcgcgatccacccacctcggcctcccaaagtgctgggattacaggtgtgagccaccgtgcccggcctatgtttagttttttaaggaacctccaaactgttctccagacatttccactaacagtgtacaagggttgccttttctccatgttcttgtcagcatttgttattgcctatcttttggatataagcctacttggggtgagatgatatatctttttttgttttgttttgttttttgagacggagtcttgctctgtcacccaggctggagtgtgcagtggtgcgatcttggctcactgcaacctctgcctctgtggttcaagtgattctcctgcctcagcctcctgagtagctgggactacaggcgtgcgtcaccacgccccgttaatttctgtacttttagtaaagatggggtttcgctgtgttggtcaggctggtctcaactcctgatctcaggtgatccgcctgcctcagcctcccaaagtactgggattacaggcatgagccacccgtgcctggcctttcattgtagttttgatttgcatttctctgatgctcaatgatgttgatcaccttttcatatacgtgtttgctatctgtatgtcttcttttgagaaatgtctattcagctcttttgcccatttttaaattggattattgaatttttttttcctattgagttatttgatctccttacgtattctggttattaatcccttgtcagatgggtagtttgcaaattttttcctcctattctgtggcttgtctctttgttgattcctttgctgtgcagaacctttgtaacttgatgtgatcccatttgtctacttttgctttggttgcccgtgcttgtggggtatcactcaagaaatctttgcccagtacaatgtcctggagaatttctctaatgttttcttttattagtttcatagtttgaagtgttagatttaagtttttaatccactatgatttgatttttgcatatggtgagagataggggtctggttttattgttctgcatgtggatatcccgttttcccagcgccatttattgaagagactctcctttccctaatgtatgttcttgatacctttgtcaaaaatgaattcacggccaggcgtggtggctcatgcctgtaatcccagcatcttgggaggccgaggctggtggatcacctgaagtcaggagttcaagagcagcctggccagcatggcgaaaccctgtctctactaaaaatacaaaaattagctgagcgtggtggcgggtgcctgtaatcccagctacttgggaggctgaggcaggagaattgcttgaacccgggaggcggaggttgcagtgagccaagatcgcgccactgcactccagcctaggggacaagagcgagacttcatcttcgtccccccccgccaaaaaaaaaaaagccactgatttttttttttttttttttttttggagacggagttttgctcttgttgcccaggctggagtgcaatgggtttttttttttttttttttttgagatggagttctcactctgttgcccaggctctggactgcagtgacgcgatctccactcaccacaacctctgcctcccgggttcaagcaattctcctgcctcagcctcccgagtagctgggattacaggcatgcaccaccatgcccagctaattttgtatttttagtagagacagggtttctccatgttggtcagactggtctcgaactcctgacctcaggtattctgcctgcctcggcctcccaaagtgcttgctaggattacaggtgtgagccactgtgcctggacaatgctactgattttttttttttttgaaacggagtcttgctctgtcaccaggctggagtgcagtggcgccatcttggctcactgcaaccttcacctcccgggttcaagcggttctcctgcctcagcctcctgagtagctcggactacaggtgtgcatcaccacatccagctaatttttgtatttttagtagagacaggatttcatcatgttggccacgatggtctcaatctcttgatctcacgatctgcctgcctcggcctcccaaagtgctgggattacaggcatcagccaccgcacctggccaatgctactgatttttatgtggattttgtatcctgcgactttactgaatttattagttctaatagttttttggtggaatccttaagattttttaaatataagatcatatcatctgcaaacaaggataatttgaattcttttccaatttggataccctttatttctttctcctgtctgattgctctagatagaacttccaatacagagtcttcttaataaaacataatcataggatcatatatagtcatataccacctttgccatatcctgttggttagaagcaagtctcaggttttgcccatacccaaggtgagggattgcacaaaggcatgaacaccaggaggcagctactggtggggaagaccttagaatctgtctgccacatccatctagagcttaaacttactcatgtgtaatgtgtgaattgaggatatatttcaattttttttaacagccagttttctaagcatgattagcaggcatctgcaaggtagcatgtatgttggcataggttatggaaaggaagtcagtgtttcctgcttaaaattcctctctgacaactggagcctgttggtgagggggagccttgttctgttcttggcacactggagtgtatctcagaggccttcttgaacagcctgtaattcctgcacatcctggctagatgaggtgggggtcttggtggtgcacacaggatgccacaatccacagggaatggccccttggggtggagaagggtaatgaattattataggcaaatcctgcagtgttgaggtggtgggccagccccttcctgtgttggttgttaacatgcagttaaggctgtggacagatggatccaaataccaaacagttctttctagaactaggcaaggacttgaaggagggagtctgtgatcagccagctgggaaatctgtggaggaagacattgtccaaaccaaaagagggatcagcagcctcttgataattgactatgttggtaagggcatccactagccctggccatttagatggtgtctggccaagagaggggcaggttggtgatgaaatctgttgtgatggcatcttattttcatatttttaagtctattctattagcggtgcatgggattgggattgcttatctgtgactataacagtatcgcaggtgctgctttgctggaagggactgagctgaagagggcctgtgggccagattggaggtaggaatgtggaatcatagtggctctctagagtggtgtggggcaattctgccaaagcagctgctcagactctgggtcagcatctgaggggctttgccccttatggacatctgcttgatgtccctgccagattagctgggttaaccatgtccaaggctacacgtaacagtatgtcaccataaacctcaggaagaacagagtcagttccaggctccctcctgccggcccctgatgcccttgggcattctgcttgttgaccacttggtggttttgatcttggtcacaagtgatggaaacatggagacctgggccagggcaggctccttatgtcagcaggtaggcagtgaagggaagcagatggggtgcagctccagcagatgcaggcctaggtgcagtactgatgggctccttggcctgggaaaagccccttaatgatcctgcttcttttctgtaaaatgggggcaataatgcctacttctcagaaggcttggggagattagatgagctagtgtggagcacctagcacagagttggtgccagaaggcacttgataagtgatggctgctaccgctgttgccatgttaaggcaggttagattaggccaagatcatggcagaaatggagatattttaggtctgcagttgtagcttccctgactgcagactgtgaaccctacatgaccttggcaaatgcatgggcagctgcagtttgccctgatgtcattagaagcttccagggaaggataaagacctctgagacccctgggctgctcagaatctactaaatgggtggatagggcatgagggtggcccctgccaaagggacccctgtttatctgccctgtctttttgttgtctaattccccctgggtggtggagcctggaaactgtgaggtccagcagagcattccatacttccacataccctgctgccctagagtaaagaggctggacaggcctggagtggtagggaccacaaatctagggaagaatggagtccagagccaggagtggggaaagtccaaaaggaaaacctcttttgttggcccaaggcagttgtcaaagttgggatcatcaggaggcatgtccagagagatgagagaaaattctgagcccagaacaagggcaggtggggagggacagctgggtggaagcgccggtcctaagcagggagaggagacgttctgcctgaaagtgtcggcttaaagaatctgtttctgagcctcctgtgtccccatccccccgtcagctgacccacctcttcctgttcctccagaccaagctgctgacccagtatgtgctgagtctggccaaatatgaccagaactatgatattcgcgaccgggcgcgcttcacccggcagctcatcgtcccttccgagcagggtggggccctcagccgccatgccaagaagctcttcctggcacccaaaccagctccagtcttggagtcatccttcaaaggtgggagctgaaatcaagggtaaccttcctaggggaatggaaaggaactggccagagtctctgccccagaccttcctgaggcccctagccaggcaccaggcttctgtggacagtcctgctccctggctcactccttttgtccctcctgtggcaccaggaattactctttcaccctcccataaccactgccagcatcatctcacctgagggtctgccttcctggccaggatggacttgtgcctcctctcctctcaggctcccttttccatctccctccctgagcagacactaggctttggaatacataccaagatcttaaataccaaggacccaggaaggcagaaagcaaaacaacacacaaaggagaggtgtatatttttataaaggtcctgagaaagcagttgcctgcattctgtgagcttagtcactacagtcagtccaaatcccaggccccagggcttcagccttgcctctgttcctgggcttggcccttaaggcctcttttcccaagacaacggccttgagatgggcctgggagggaagggtcctcccgctgcttctccgggccccaggagtggaagccaggaacctacacagaagagagcctccttcacaaagctcagttcttctgggtatcttttcgttctttttctcttccctggacctcacgaatggggagattctgagggtgggcacagctttgaaattctcccaggaagaaggcaacagtccctttctccccgacaccatcctcactcacaggcctgtgctgccctcctccagcagtgcctcaactctgatccagacttctacacactcatgctctgactgttcatccctccctgctgagtccagagcctgactagacgtgcatgctgagcagacaggtcggcagcatctgtgggcccagagtctcctcctgcccacctctgtaggctgcctttccctggccctcagtccctgctctggcctggccagacagccttttcttccagcatgtgggcctaaaggtgcagtcagggtggaagagccattagggcacacatccatctccttcccctacccacctgggaagtcccaaccagaatcaccacccagccccacctggaaaacagctcccagagctttccctcactgctgctacctgcctgacctctaaacctatccctagaccgggaccacttccagctgggctcactgtcccacctgcttaatgccaaggccacaggctaccaggagctcccagactggccggaggaagccccagacccatctgtgcgcaacgtggaggtcagcggggtggagggttgaagtgtgtgtgtgtgtgtgtgtgtgtgtgtgtgtgtgtgtgtgtgtgtgtgtgtgtgtgttggtgggggcagacagtagggagccctggcagtgccggcccagccctcctaacaccctcccccacacacacaggaagaagatctctcccttattgagactcacgtgggcctgttgggcgaatacactgaggtcccaccttcgtgtgacgtgtgctctctcccctgccctgtctgtgtccctcttcttcccctgtgtgttgtgctcctgggccttcccatactctgtttccaccttggtttggcagtgctcctctgtgagcagcattccctcccctccatggacagtgcccctttcttcctcctctgttattccctttgtgggacagaccaggtagggcctcacaaagaggtggaataaagggtaagggcttgtgcctgcctgccttctccccaaccatgatgaaatgaccctgcaccctacccccatctccaggtacctgaatggaccaagtgctcaaatcgggagaagagaaaggagaaggaaaaacccttctactcggactctgagggggagtcaggccccacggagtccgcagacagtggtgagcagatggcagagctggggtcctctgtgctctgcccatgcatctgtgtgactgactatatgaggggtatatgtatatggttgtgtgtctaggggtgtgcacctgcttgtgaattgtttgtgcacctgagggattcatgttccaggtgtgtgtgcttgtgcaggtttctatccatggagtccatctgtgtttctgtcagttccagctggcatgtagggctgggggcaggtcagagaggtttgagggttcagtactgaatgtgaaggtggaacccaggtgtctgctccagacccaaggaggcctgcatatgagggaggaggcctcatattgttcctccacagaccctgagtctgagagtgaatcggacagtaagagcagcagtgagagcggctctggggagtccagcagtgagtccgacaatgaagaccaggatgaggatgaggagaaagggagaggcagtgagaggtgagaagggagctagccagatggctggtggggttcagggggctttcctggaaagagggctagcattgagctttagccagtctcctaagagcccctgagcccctcgtgagctgggtggggctgtcagctcacatgacgcctactttcgctggctgcaggagatctctgaggcctcatgggctggtgtggagaagcaaccagagtcctagagcctgagctggcacaagctggcttcaagctctcacggggtccctgctataggacctcaggtgtgaaccctcctggctcaggctccccacaccactccagcttttcagcatttctcctgcttctgtgaagcaaggagggagtgtccaggccaggcctgagccaacctttcccactccttcagtgaacagagtgaggaggatggtaagaggaagacaaagaagaaggtgccagagagaaaaggagaagcgtcatcctctgatgagggcagcgattccagcagtagctcatcagagtccgagatgacatcggagtccgaggaggagcagttagaacctgcctcctggagcaggaaaacagtgagagccttggggcagagtcagggtgtgctcatgggccagggccctccccaacctctgggccaggcccagacatctatctccctaccatccagaacagaacatgacatcttctacccaacccagaacatgccaaggtgctccccttccccacacccacatcccatttttctctttcagcctcccagcagcaaaagtgctcctgcaaccaaggagatctccctgcttgatctagaggattgtgagtttgggtggtaaaagtcacaggggaaaggaggcctggggagcatgaattagaacagcccatagggactctggatcgggttcctcaggtcttgtgggagcaggggagcagacagaacatatcttcaggcctgagagggcagcagggctgacctccccaggtctggggttgaggtctaggaatgggtattttgcgagagcctccaggcagccatgtgccccgctgtccatggtgctgaaatgcgtgctccttgatccctaggctccctgctcaacccaagccacctccactttgcctcctcatagtcttatctactcccacagtcacccctcccagtgtccagcctgtgtctcccccagcaattgtgtctaccagtctggctgctgacctggagggcctgacactcacagactccaccctggtaccgtcggtgagtgggatggaggaggggaccgggctggggcagggacacatccctgtgctgcatcctatggtgtggatgtgtgtggggggtgggtgtgatggaggatgtgatagctttgagtcccagctgctggatggccctaggggacaatgctgggacaggctctctccatcttgctcagttctgtccttccctacccctccactctagcttctgagtccagtatcgggtgttgggcggcaggagctgctgcaccgggtagctggcgaggggctggctgtggactacaccttcagccgccaacctttctccggggatccccacatggtgtccgtgcacatccacttctccaacagctctgatacccccatcaagggcctgcatgtgggcactcccaaactgcctgctggcatcagcatccaagaatttcccgaaattggtgcgaagggctttggatggggtggaggaggaggctcctgggcagagtcagtctttctgtggttgctgataccctccttgtgccaggccaggggccaagctataggggcacagagatagcatctaacatgatcaacactctggtggacaagacagatgatgaaataagcaagttcacatcagggcgggaggtgcttgcagcagcagatttgggccttggttgtttcaggactaacttaaatgtggtgagggtgagtgggggaaagggtgcttagagttcaggaggaaaccgggaacagtctccagcagccaagaaagccaagattctgtagagggctggtcagctgtgacagtggagaggagagtagggctaggctgggttctagacctatcaggtgatggtggccctccctctccccttcactgccttataccacttcagagtccctggcacctggagaatctgccactgctgtaatgggcattaatttctgtgactcaacccaggcagccaacttccagctgtggtatgtgcccaactcgaggtgggggtgagaggatgggctggaaagggacagggtaacaatgaactggaaatggaggtggtgcttagtggggatacatcatgattgggtgggtctggaagccatctcaggccctcattcctgacctcactctttcactgcctccaagctgtgcctctacacagggtgggaagtgaggggagagatgacagccttaattcttctccgtttcctcccacccctcccagcacccagacccgacagttctacgtctccattcagccacctgttggggagctgatggcccctgtgttcatgagtgaaaatgagtttaagaaggaacagggtgagtgctccctgggagtgggcagagagggaagtatagaagctgactccagaatgtccagcttggatggtagggagaatggtggtgtccttcatctagaccaggggtcagcaaactttctgtaacgggccaaagataaatgttttaggctttgagaatcatgtggtctctgttgcagttacaacacgactgtggctgttgaaacatagaaacatccacagacagtatgtaaatgaacgagtatggctgtgttccaagaaatttccatttatatttatagatactgaagtttaaatttcatgtaattttcatgtgtcatgaaatattaatcttttgattgctcccccaacacttaaaaaatattaaaaacattgtgggccatataggtggtgggctggatttggtctggaggctgtaatttgcaaaacctctggcctagaagaaagaagagtggcttgggcaagggaggagggaagatcatggttagttttggataagctgattttgaaatgcatttgggaaattcaggaggagctatttagtatgcaactgaaaatatgggtctatgcccaggaaacactttgaagctggagtcatgaacatagaggtggtaatggaagctgtgaatatgaatgagatcactctgggaggtgggagaaaataggaaggccaaggacagaaccttgggggaaaacctgaattctgcagaagaaagaggaggggagggataagagaaggagcacagggagaggtgggaggagaaccaggagagacaacaaggcagaaggtgtctgcaaaccacagttacctaagaccttcagagtcagcatataaaaggctactgccaacctgagggagagagggtcattgctaaaggagggacagaggccaactgcagtgggttgagggagaccacggctcaagtacatgcagtcctctttggaggactttagccatgaatgaggagggagacagggcattggcacgatgaaggatctcacttctggaaaggattttttggagacggggacacttgaacatgaacagattgaaggaacaaaaacaagaaaatgttattagtcatgaatgaaggggatagaagaaacaggagagggatgtcagtttctaaaaggaggtgaagaataggggaagcagtggagggaggaaagaggctgaagagaagactgctggtgtgcaggagagcagacggaggagctcccatggggggcctggatcatgtgagtggagagaagtcagccttgcagaatgaggagttctgggggtgctgtgaaggtttggaggcttcaggagccctggctaggtctggagctgctactgcagaggtacaattaaaaatgtacctgtgaatgctgcatgtgactactggattctggctgagagatcacagcagccacctgtgatctttttgtgagggcttagcttccaggagctgagtgggagttgaatgtgggttggagggccccccaggaaagatcaaagggtgtgaggttcaggatgggcgaacctcttaagaactgactggccactctcaaggggctggtagcccagatgtctgatggaggaagcgccaaatcagtctttggtaacaacatggataaaggcctgggtgggaggggtagagaggctgacaaaggcttcctgagggagggcccagtctgagagggaagtaccttctccccaagactgatgatttaaattctgacctgccctttgcatgataccttcccagcctgggagaacttgttgctcagtaagcagacccaggtgctggcctctgtacccaccatggcctctgccctcatcacgacctctacccccaggaaagctgatgggcatgaatgagatcacagagaaactcatgctgccagacacctgtcggagtgaccacattgtggtgcagaaagtgactgccactgccaacctgggtcgtgttccttgtgggacatctgatgagtacaggtactaggccaccagtagaggggaaatgatgagcatgggggccctggtttgaaggaggagccccagctgctgatccccttccaaacacagtcacccttagcagctcttcctcaccccttctattcccacctcaggtttgcagggaggacactgactggtggaagcctcgttctgctgaccctggatgcccggccagctggagctgcccagctgactgtcaacagcgagaaaatggtgattggcaccatgctggtaaaggatgtgatacaggctctgacccagtgacttccaaatgctgtgacctgtttggctcccatctatacctccccatgacacctaggctgtcagtctctctcatctttctctctctctctcatcatcctcctcatgccagatagcattcagggtgtcctctctccctctggaggaccaagccctcccctaatgccctccccatggattccttagtgatctgtgcagagagagatggcagccactcccttcagtcctcccagatttctgtagct

SEQ ID NO: 15435 - DNA, 30809 bp, Homo sapiens; identical to SEQ ID NO: 1137

SEQ ID NO: 15436 - DNA, 109469 bp, Homo sapiens
gacatttagggaaggcagaaagtaggtcagggacggaggtgcctgtttacccgcgccggactcaccgccgccgccgccgcgggatccgagtgcgggcgcgggcgcgggcgctcccggcgagccacggtgagtgtcaggccggcggcggccagcgacgcgatcccgcgcaccccgtcgggggccgttagcaccctcgcgggcgctgcgcccctgccgccgccccgggggcaacccggccgccgaagaaccctgcccgacgtgcccgctgccggccttaaagggcccgtgaccgctccctgcccccacccgggccgtggggaggctgcgccccttaaaggcgccgcgcccgtccgcccccatcctcctcgcgggggctgccgctgcgggctagggcaggcagaggtgctgcaggagcccttaaaggggccgggaaagtgttcgctggagtacccaccgcccttccgcgggcatcgctacctggcggggggagggggcagctagctgcctcttaaagggatagctctgcccttgggggcagtgactcggccgaagaggactcctagatgtgtccccgggagcttcggggatccccgaggggaccatgcctggtggctgcccctcaagggcgttgggcgaacggtgccgcgtctgcccttcctccccgcttcacttccctttcgggagcccgcgaggctgggtgggggcggggagggcgtctccgtcgggcttggggagtccaagtccgcccgccccttcggccctgtagccagggctggcgctgcacccgggaatccccggccggcacggggccgaccccagcctgcgaactttcgtggggcctgtgccgtccaggtcctgggcggccctcaaggatgccccgtgggtctgcgggcaggtgcgcgtcggcctggggatgtcgcccggagcccgggtgcgggccggccttggagtcccagagctccgcggagggcgcagcgagcctggctccagctccgggtttgacagatgtcagggaagaaaaggttcccgctcggctattgccgggcgttgacatcccagagagcttcccgtttgcttggaagaagacgaggaaggtagaggtgaacgtcgaccttgtggggcgcatgttagcctccccgaggggtcgcgagagccggcagcggggtgagctcaggtgcccgccggcaggagctggggagggaaggggagtgctggacaccggcgcctgctgtcaagttctcgccggccggtgagagacccgctgccgccgcgcaccccgcacctcctgacccctctcccctctccgcctcggccccttcccggtcacctagcgttgttttggcgctttggcgcttgcggtctcttccttcttccaccgctactcctcagcgaggaattattagccaagttttctcacccagcttccaaaaatcagattccgtatttgtgaacaagcttttcttgacactacccgtatacccgtatttccagcatcgtcgttttattaaacatccataaaagctgccccttagatgcattcatttcccacgacacctgcttgcttgtcatttgtccttctgacatctgctgttgttcacccctttaatctattattaaatgacaactattattttaattcttctggtctcattgatatccggatctgtgaatttgggttggtggagtttttaattaatgtacccgttgaatcatgagcttaaaataatcattgctgctcctgagcagttttgaataatatcatgctctctctgcttgcaagacttaaaaaaattcgctggtgttatatttgatttccatatcaatggaattcccaaatatttttgaaaatacaaaattcagtctttcagtccatgttttgttactcagatcattttactgataagtctttaacgcagcttatagaacatatttagaaggtttggaaatttcctggacaggatttgaaattgcctgtatcatctgaagctggttctgtagaagcattttggttttgattgtagatgcagccagtgaatgataacaataagttaaaactgtagttaaatttgttctttattcaaccctctgaagaacgaacagatctggtagaaaagcactaacctgggagttaggagctggacatcctggttctagtttaggcttgggctctcatggccgttccagtcggggcaagttattaaagatttctaggttgtgtttgcctctgatggaaagtaagacggttgaactaggtgatctcaaaggttcctctcttttgaagttctgtaagtctctaaatatttaatacatttgaattcaggttggtatttacctcctggcacctccagaatatctgagctgaagccctattttcataagaaagttaagcagatcaacagatggtgttttgaagaatccatttcaaatgatttataaaatgatgactacttacgagtttgtctgctatttgcagaagaggtttgcatgccacagggcaggaaaaggaagtggccatgttttcagatttatcccttcacaccaacaatctctgtggaatttatatgctaaaagatggagaagcaccatagaaagatttggctgtattaacaaaactgcatatgaaaaggtaaaaactagatagttaatatctctctttggtgtaagggttataatgtatctgagctttctttgtgatttcatcatcaactctcactgtggtaggaaaatcaatattaaataaacagtttcagccccgtgattacatgcagtgattttaggaagcatcatgataactaaagtaggtacttgcagggaagtaaaatatcctttctagaccttgaggtttcgttgggagctagggacacaggcatgttatccttctccacagtcttttttcattgtcaccttatcacaagactcagatttatcccaaatacccaccttgtcttttcttctccctctcatgaaataagacctgctctgactcaaccccctcagcatctcttacttcccacccaaaatgtcctgtctctatccccatcgtcccctcatctcctcccaattcagagaaagcaagtggacctctcctctgttccttttcttggcctctcaccatgggcaagtgcctgggctctggtggcagaagaatccatggctcaggtttgggctttgtggtcttggatgtgtgcttgactcctctgacctcaggtttctcctcttggtgtaatggcagtgcctgcctcgtggagtctgtgtgaggattaagggagatggtgcatgtaaaaggcctggcacacaggaagcctttcctttgtgccagctgccattccttctcacctctacccgggtcctatcactagaatattatttgtgctgtttgtccttagtctcccctgccccaccctgaaaaccttaggcttgacttaggagaggaaggatggaagaggcagagtcagacttgtggtgagcctgctgtgtaccaggcaatttacatgtgtctttacttggtaccctgggttcgtaagcctctctttcctccctcctgccagcctcccccactctcccatctcctgctccattcttagtacctgccctctggcttctctcgctaccacctttctttatatttcttctcaaagttttctccaaaactttgtcgtgagttcctggggcccatctgcccatccttattcctgagtggttgttcttggcccctttgcagtatttcttttatttttttaaacatggtctcagtcttgcctggttggagtgcagtggtgcaatcgtggctcactgcagcctcccaagtctcaggtaatcctcctgcctcagcctccagagtagctgagcctacagacacgtgccatcacacctggctcatttttgtatttttattagagatggagttttgccatgttgcccaggctggtctcaaactcctgggctcaagtgacccacctgcactggcctcccaaagtgctgggattacaggcgtgagtcactgtgctcagcccctttgaagcttttacctcacttgttttttgtcctttgaaatcctttcctctctcagcctttgggtcatgctggtttcttgattctcttcctgcacccctgtaaagataaatgtctgtcctagcttctgctattcacactgtccgtggcctggggtcccctctctagccctgacctgtctctcctgtgttctgctagcaggtccgttgtggacatgaatggcagcctgtaatctgcatttgtggtctcggagttacaggtttgcagactgcttgcaagcactgtcacattgagtcctcatgacacactggagcctacatcccttcattccccaggctgtcctaaaaggcagtttggttgggtagtttagcatacagactctggagccagatttcacatcctaagtattccctactggcttcgtgacttgtggtcaattttcttttgctctctatgccttggtgtcctcatctataaaactgggatcatagtagcccctacatcagagagttgaggtgtggattaaatgagttaaagcattggaaaaagtgtgccagtctattcatggcacattgcaaacactcagtgaatgttgctgtcagtcttgctgctcttcgttgccttgccggggtgccttggcctggtttgtagtggtctccacattcagcctgcctgtctgccagaccttgccatgtgcctggacactgtagtcaagctgaggggctgtccattccctgtaccagcccttggcccagtccatccctcaattttcacgtgtccaaatcctcctctgcttttaggacccagggccttggtcctgcagcactatttcttcattttgttttccttcctccccacacctggcagcaatgtccacattgatttttctccaattctcttaggttctgctgcattccatattgtgttgggctgtctctgaaaatatctcacctgctcgctcagcctgagcattctgggagaagtttatcttgctttttccaaaatgacaggcacagggagcctttaggccatggttgtccaatgcacattgatcttgtggaggaggagatgggatggggtgggcactcagggacggagcaggtggagggaacaggatgcacactgcatagaggtgggggtgcaacagggccataagtggacatggccgtaagtacttaggtctgcatggaaggagggtttgaattggggacttaacctcagggggagataagattggataaggtttagtcatctttgctgcaggggaacgttgagtactggcatgtaatggagagtggtttttaccttagtatgtgctgtccttttaaatagtgtaaactaattctttatctagcctggttaaagaaggggatggctggtctgcctaatttaatatttggctattgctctacccactgggttttgtgcatatactgaatgaagcattggcttgtatttattccttcaatcactgtttgaaatgtctgacctgggcaagttaattagcttctctgagtgcaaaataggaataataattattacgataatagcagctaacatttattgaacactttctatgtgccagcacatatgtgagtcacctttgcttattaactcatttaaaccccataacaactacatgaggcaggtactattatccttacttcacaaatgaggtggttttataaactgcccaaggtcactcagctgttatggcttggggcagaatttgtgctggtgaactccagagtctgccctgtaacaccctagtagattcctactgggaggaaacaccccgttatatcccttacctcactcagccgcaccatgccaggagcctagtaggctgacagcaattgggaaccagtcttattgttgacaaacatggtatgagcctcttttagagcggagctgcctgaaaccctccgcataagggatgcggacctggatgctacctgagcagcagctccaggggcttgtgaacattctcctcacatcctgttatgcatggctgtctctctggcctccccctgctttctctgcagcattgctctgacccaggccccctgtggctcagccagctcctccccaggcagctccttgtgtgagatgaaccttttaacataactcactaaccccacctcccaccctcatctagccatctgcagagctcctcactggggaggggaccttttcaaaggtccctcaccttcgtccttttctccctgaagaccaacgtccacaactttggtatatccacagtgttggggtgtgtgtgtgtgtgtgtgtgtgtgtgtgtgtgtatatatatgtgtgtgtgtatatatatatatatgtgtatatatatatatgtgtgtatatatatatatgtgtatatatatatatgtgtgtatatatatatgtgtatatatatatatatgtgtgtgtatatatatatatatatatatatatatatatatttttttttttaatgccagttgttccccaaatacatttagatagtaagggacacattgttttatgtcaagaacctgttacataaaaatgtgttatataatgttcaaatatatactgcacagtgaaattagataccactttttttttttcaaagaataaaaggataataaacacaggccgtcctgaatataattaacctcagatttgggaggcatggaaggacgtgccctgccctcagagctctcgtcctgagctctgcctttcttgagtgcgccgggagcaggatggatgggaagttggcctgaatctgccatggtgtggtactgtgagatgctctggaaattgtcttttttttttggcggggggtgggggatgccttcgcatcttgctcacttgtatctttctcacacctaagcagagggaagaagctctttttgccccctcgtacttagaccacccaggtcatcttttgaccagttttctgctctgctcaactcctttcaatcttcccagatgacaggccagctttgcctgctaagaacagccctggtgccagtggcatgcaggtggcacccctgtgtccagtcttccaggctctccagggtctggtcctgttcctcctccccagccctgcttccccgctcaacctccattcccagccacagccctgtgcccgaggttcagtcctccttgcctctccgctgtcctccctaggccacctcacttcacactctccctctggctagcggggtctttgcttaaattgttcccttgaggcctctcttccttgcccgtgcctgccttggatctcacttctctgtgaggtacctctgataacatttgttccctttgtgtgtgctctcccttttgctcttgattgccaaccattcattcgttcagaagcaggggtatgtcataatgagcaaattaccatatcatactgaatcaggatggccagttgtctcattttttaattgtttcatggttaattatcttacgctcacttcccactctccagtttcactcagttactccgtcagtgaagtttattggatgcctagcactgttgtgggcactgaggatacagcagtgaacaaaacaaggggcccgcaggaggggacagatgatgaatagtgaaacacgttcatgccttgttgtgagaagtgctaggagtgctaggatagcaagcaaatagagtaaagcagtagcgatgaggtatggtgggagggagggtaccttatctagatcacaggggagacctctctgaggaggtgacatttgaacttagcttcagaaagatctgggggaaagtatcccaggaagagagaacagcacatgtaaaggccctggggttgaaaggtgcttgatatttttgaggaaagtaaaggctagtgtgactcgattatgagctgcttgtgtacagatgttttctgcctcttttatactccctttaaccctgagcccagtgttaggaaggccttgtaaatacttacatacagaattatagcatttgtcattggttatatattataaaatagtaattttataaaataataatttatcataccctgcttagaaggcttttaataaaacattatattgcatataaacaaattaagggtttgaagggttttcttataaatgcactcctagcatgtttcaccaaatattactgttttaattgtgtttagtgcagaactttagacctcataattctgcttcatgtgcacaaccatcttaaaaacaggttttgttccaaaagtttatttgtaaggcactaggtggaaacttgggataaatttttctataagaaacaatgaagtaaatagtgatgtagtttctaggcgagccctcaaaagctatttagtggtgactgtagctgaaaacatactggttggtatcagcagtcgtcaagccttctgctggtagaccctcctctcagtagcattgtacctcatttgctgttagcaatcataggacccatttacctcagtcacttctcctactgtattttcagtctgttaaagttttatagaagggattttttacctttatacctttaagatttggttgcatgtgttataaatgagacagtagtgcagagagtggggaaaactctggactgggagctgggagaggcctgggctccagactgggcccagccactgactggctgagtaaatttgagtaagttatcctctttgaactttgatttctcaggttcttcttggctgtaaaatcctattgttttctcaccatagcagggaaacgtagatatacttcgttgttcaaacctgccctcaaatggctgcctctgatttcttcttgaagaagtatatggcactcagcaatgaggaactcaagcagttccccatgtgcagagctctgcagtgacattctcagtaggaaccttgattttgatctgctatctttcttgatgagttgaaagaaattttgtcccagaacttttggtccagataagatttctgtgttcttggccaacttatcttccatataattatgtaaattgttttttctttttaactcttagggataaaaatggtgactctggcttgcctgcttataaaatatagttataagtgcccttagggaatggaatgagtttgcaggagagagcagagctgaaagagtgtgggatcaaaaacaactttaaatgttaaatgcaaagctattttcagtaccctgctggaagaaaaaatttttttcaaggttttagaggatagaagaggtttttgctccaaagaagaaaggaacctaaggttttgcagtggtgaaaagtacctgatcctttaaccaactaccaccctcccttcccacctctgagttttgttttcgacatcatgaaccacatttgccatttgagaggtttgatatttaagtgacgttagtggcagagctcaactggcagtgttcaaatgacttaggtgcagagtgctgtgctgcaaacttccccagtgcattctagggtaagggatgcctcatagagagtgacagagcacttttagctctgcctctatttggtcagttgtgaatggtgtgttcctttttttccttacttgaaggcatagcgaggagttggtacaagaagttattgcttcatggacttcactttggagctagagggtggcattagacctagcctgccttcttggatgctggaataccagtggcaatgtcatctcttgttctctgctatacccctagcaatgaaaacagtgtctgtacagaaaagtctctcaataaatacttgtttattccttcaaaaagtgaattcagctttggataaatttttaatttcctccactctctagcagtataggcttatgaggttggtcttgcaaggtactttggagtttaggttgccatttctttttgacatctgtgtttttcttattcttcaggttggtcaggtatcagtgtcttttactgatgatggttgtccctgccctgctgatgttcatcttctgttatctttaattggctccaaactgcagcaaatctatagctgagccacattaactaaaagaaaacttgttgcatatttatttaggcatagtactacacatgtatttattcagtcaacaaatatctgtgagtctatatgccaagaatgttactagacccaaaggaagagcagaaattgttgttgtgaccaaggagcctgcagtttgattgccttgtggaacatctttatgagcattgtagaagggaggaggcttcatagaactggtcaggttttcacctttaaggatggtaggatttcgattcacagacaaggtgaggacaggtatttccaggaagtggctgagcggaaacagcataattaaaaacacagaagtaggaatggaccagtttgcattcatggacacagacttgtctaaaatggaaggttcttaaataatggtgggaatttaagtatggaagatcactgaaggcccaaacctgaagccattttagacacctagtgacttgcctaaagtgacagctgataagtggtagatccaggcttaaaataaggccatgggagctctcgaccactggcactggacttggctgtttcccagcagtctctagatgcaggatttgggtttgattggggattttcttttttctttctttctttctttctttttttttcttttttttttttttgtgatggacactgagattgggggttttagagtcatgagctggaaataggcaaggctctatttagcccactctttcattttgcagttggggaaactcagtgaggttaagtggcaagtcggagtttacctagtgagtcagagactgctaggcaatggataaccactggatttgttttattatgattatgattttagtgacatgaaatatttctctctaaagcatcagtccagtgttagtgttccagttggattggagcaatgaaggactaaatgcagcagagacctgacaggaggctgctagatgaatccaggaaggagagagagaagccagaactgagaattaattgtcaattatgttaatcagcatggtgttatcagtcaccctttagatttctagagtgcggtgaacatctgcctgtgtgagtggctttcaagtgtgtgaatctgcactgtactgtgaccaagataccttaatgaattctccagacagaaagtgccactatggaagtcgaatgttttaaaacaaatgcccacattttctggaaagagcaccagattaggagtcagatgacctgcattttaggctgcttctgctgcttagtcaccatatagccaaagcaaatcacttaatgtctcaaactgagcctgactccttatctgtggaacaggtataacaattcctgttgagcccttttcagtgtatgtgtgatgcttgtgtgagctaaggaaagaataggcattttgaagctgtaaagttgctttctggctgcagggagcagcagtgcagttttaatagtgaagatgtactggcccttacaggaatagcctaggagaaccagaagaaagttcccctacctccagggcatgtttagggaatctggcgctgtccaccaggtgggtgctgatgtgtactactttattggatagggccatgttttttgtttatttgtttgtttttattatactttaagttctagggtacatgtgcacaacacacaggtttgttacataggtatacatgtgccatgttggtttgctgcacccattaactcatcatttacattaggtatatctcctaatgctatccctctcccagccccccagcccctgacaggccccggagtgtgatgttccccgccccgtgtccaagtgttctcattgttcagttcccacctataagtgagaacatgcggtgtttggttttctgtccttgtgatagtttgctcagaatgatggtttctagcttcatccatgtccctgcaaagaacatgaactcatccttttttatggctgcatagtattccatggtacatgtgtgccacattttcttaatccagtctgtcattgatggacatttgggttggttccaagtctttgctattgtgaatagtgccacaataaacatacatatgcatgtgtctttatagtagcatgatttataatcctttgggtatatacccagtaatgggatcactgggtcaaatgatatttctagttctagatccttgaggaatctccacactgtattccacaatgattgaactagtttacactcccaccaacagtgtaaaagcattcctatttctccacatcctctccagcatctgttgtttcctgactttttaatgatcaccattctaactggtgtgagatggtatctcattttggttttgatttgcatttctctgatgaccagtgatgatgagcatttttttcatgtgtctgttggctgcataaatgtcttcttttgagaaatgtctgttcatatcctttgggatagggccatgttttaaagatgattacatttcacccccgtaagcctgggcatggacggaaaagttaggcatggatagccatgtgaatctattatctgtagacacctttcaggatagtgacaggcagctgtgaaccagaaaaacaagtgtcagaatctagccagctggccagtctggcattcttggatgtttcatctgtcctggggcattaggcagcgatccagaggaaccttgattagcctgggggattcatggctgagccagcatgctgtccaggtaatacctggctgcaaagcctgactggagatctgccaaatctaaatttctgccagcattacaagtgtatatattattattattattattattattattattattaatagcagtatctaaccttgactacctaccatatgccagcaactgtgctaagtgcttacatactttttctcattcagtcttcacagtattcatataaggtgggtaatgtcagttctgttttctagttagagagactgaaactcagacgagcttcagctgatacatactaagtgtaaaagccatgattcaaactcagaacagtctcagtccagtgcccagctgcataactgctatgttcttctttctctcttttcctggtacctgaaaatacttcttgtctctggttttgaggtttctgactgtgttattggttgatggatgggttgccacacagaggctcagctcagcacagctcttttttcttcatagcttatgacggacatcctcctggatactctggctggtgagcaaatgggtgccagtggtgaatgcagcagaaagactaactcttgccagctagtgcatgtgggtgaattttaaagacaacaaaagaaatttctgtaggtcagtttttcaaagagtaactggtagcttgtagtctacttaaaggccaagtttgatgttcatcaaagtcaccctgtaaaaacctttccaaatgctgtgattctgataacaataccatagaacattcctgtgtaattgacaagtagtttttacatacaatgtcttgtttagtcatcatcacaaccctatgagggtttgcaactacatatagttgcaaagaagactgggagatatctttagttgggaagccatgagtctagcaaaatctctgtttttaagggtggcgaggggagtgaatgaggggagctagcaatctgatgtgttgtggtggtgatggaagggataagtagagtttgaagctgttgtcagtagagttgggaggatgcctcctagtctatgacatctcctagtgttatgacatctcctcttgtggactgggaaattgcttagagtttaagcaactgtccagggttctacaactggtcagcggcagaggcagcacttaagtattgcttttgtgacttaattcactctctattcaagtttcatctttgctttctctattgaagttcttaaatattctgattcactgtatttagaagtcggcaggaattattaaagtgaacttctttgtggtatacactgttactgaatcagagtaaataaaaggtcacatgattggttgttgtgttaggtttaattgacgtgtactctgtatgatacagaatactcacatatcttttgtgggatatcattggtccaacagctttaaaaatcccaaggctttaatagatgataaaacacggagtttgtgtaatttcttgaaaaagttggccatcgagttcttggtcaggaacacaagcttcaattgtaacagtttccatggagacattagccttggcttgcatcatttcagctttcagtgcctttcctaggaatggagtgaactgctaaaagaagagctctggttgtggttgtcacttagagctctctcccctactgtttctgctggaggctgatttgcttttctgggtcttctcagttttttctgtgacctaagcataaattgtctttgagatcctggtaatctcatattttaaaagttttccacaaaagacaactgaatggaacacttttttttttcacccctttaaagtatttaattggccatcaacggtggctcacgcctgtaatcccagcactttgggaggtcgaggcaggcagatcacgaggtcaggagatcgagaccatcctgctagcacggtgaaaccccgtctctactaaaaatacaaaaaaaaaattacctgggcgtagtggcgggcgcctgtaatcccagctcctcgggaggctgaggcaggagaatggcgtgaacctggggggcggagcttgcagtgagccgagatcgcgccactgcactccagcctgggcgacagagcgagactccatctcaaaaaaaaaaaaataaaataaaatgaaaaataaagtatttaattggtggcaaggggctttgctagaagaatggacacctggtctcactcaagcttcttgtattagttgggataccaggtgagtccctctgttaaagagacccacaggcacaatggctgaaaccaggtagaagttttctctctcatgtactagtccctagtagatagtggtccaggcctagtatttttaacacatggcttccatttgatggttgaaggtaaaaacttaccatctcccagaggaaacacccaagggggcacacatccagtcatttttaagggaaagacccggaagcagcacattctctttttccagtagccggaatttgcaactacatatagttgcaaagaagactgggagatatctttagttgggaagcaatgagtctagcaaaatctctgtttttaagggtggcaaggggactgaatgaggaaagctagcggtctgctgtgttgtggtggcgatggaagggataagtagagtttgaagctgttgtcagtagagttgggaagatgcctgagtcaagggtgagaatctaagcaggcacacagaaaccagggcatgtgcagccatctagaggtcagggaagctcttggctctgaaactaagcagtggggggcacccaggcatggaagggaatgtgaattactcagaagacattaggttgtcagtaaaaggaaattcaccagtgtgactgaatcagtagaaagagcacttagactaggagtcagaagacctaggtttgagtccagcccttttacttcataacctggggcaaaaaactcccataaatatttgctttattatttagataatggcaataacagtgatggcctttcctgcctcccaggcttagtgtgagaccaaagggtgaggaagtactgtgtagactgcagccccatggagatgtgcacagtgtctgcccagcccagggcctgccatgggtgtatttgttgaatgaagtgtgaactattaaaagagttgggaaaaatgcattatactaaggagatcttaatcctggacagtcttctctaccaggcagaaaggttctgctctccactggtcaaggccttgggcctatgtgtaaaactgggtacctaacaaacacatgggcagacgcctgcagctccttactgggtagcacatgacacatagtatgtccttggcaaggccatttgctcattcctctgtgtaggtaaccaagtgcaacagaagtggaggtatagcccatgaatgtgaactaatcatttttaaatgatttggtccatgggcaggttagaagatgaaaccttcccaaggccaccaaaacttgatttcttgcttgaaaatgataagatgcagttataaaatgcttctgttgatttggaaaaaatgtgtgacttgttcaaaacaatatgtattaatagaaaatgtaacataaataagaggatacaaaaaagagcttaatgtttctatcttctgggcctagcaatagtgatttttttttccttttggtaggaaaatgggggctcagtggaataatcagttttatttctttttcttttaacttcatgaagggtttgtattgttcattttgttatttaatttgttcatttgctaaggaaagaacttctttcttggaactctgcggagtgtttttagatggactttactggaaaaaaacaggaattgaaattatattcacagtgcgctctaaactcttttaaaatctcatgcatggatggaggaaaatgcactgaaatatcaatagtggttctcacctcatggaattagaggtgacttttattctcatctccttctctgtggtttcctatttttcaacgagtgtgaattacttttatcatcatgaaagaccagttaaaaattaatctcacaaattaacactctcaagccaaaccacgaatttttgtttttcacaacctggcttggactataaactgtcacactatctcagacctatgcagattcttttctgagtgaggcattgaggaacttgttataaagatgatgctttccttctggaaatcaagaaacaagccaagggcttataatgtgttaggaaagatgtcctgagtaactttcctcctggaatctgactagcctttattacagctacttaaggaaatgagttttgtgggttccctgttcactgtgtcaccatttttttctttatcctgtactcatatgtacctcagggtccccagattttcttatcctgggattgcatgaccttgtccttggctctctcgggcccctgccgtttccagtgttctctgttcatgttcacaatattgttgatttggctgtggcttcttcccgcagtgttcttgtagactgaagagagcacattgctgcccttgtccctgtgcagcttcctcttcctctttatcattgctcaggtgagtggcctgagcagtgctcctgggatgaggtgaagagaagcagtcaagactgcagggaagggctaggggtgctgagctggccgagcttccctgggggaaggcactgggccatctgtccagcagcagttggcccacagctggcagggcaggctcaggagtggctcttgaagatggctgcttggtgtttgaagacagttcccagggcatgcattcatttgttgagcaccttcaatctggcagcctgtgttctagatgctggctgatgaccaaggctgacatggctttggctgtcatgggagtttcattctagtggtagagggagagagagagagacgatgtggtagagggagagagagagagacgattagcaggggaatcaatgaagaagataattacaggttgtaagaacagccccagaggaggttacaggtgcctgtttgtcgagaagtgggagggccagagttgggataggaacctatgtccctgattgcaaggtctggctccttctgtgtcctctgggctttctggtgggaagggaggaggtggaggagaccccttgcgagggccgagcttctcccattcagccagtctggaccagcctggggccttcagatggagatagcaaaagttgagggcataagctagggactggctctcttggtcactccagttgcccatctctgtacttccccaggtgaatagccatgttttttaaagaacacggagcaaatttgcatacaagagtccagatttatgcatgctgcagctttgtctgaaggcaagcttatattttctctcctattattttcaacttttaatgagttaccagcatctcagtgcccctccagcaaggatattgggctggtgttttcagggaacaattttaattaactcctccttgcctccctctcacccagccacccccagtccccttcctggtggctcagagtctggctttggcatgcaataagaatatttttgccttggtgttagcctttctgaaactcttgattaccagtgctcacaggacctttctgcagcactgtctgcttggctgtggactacccagaggagcttggtgtcaggcaaacttaggcgatttccctgagcatccttgttgagtctgcctttgtacttctttgtcaggtctagaggcttggccgtttgtcctgctcttttgtcccctccttctgggaaccctcaggaccctcactccatggagactcagcacccttcctcctgcaaacatcagtgatggggctttcccagccctttcccctatcttccttttcaaagaacaaagcctttgaagcttgtctcatacctgtctgatgcagtatgggaatctgtaagttctttgcctcctgaaggggtctggggaatcacttggctttcagagctttcctcgctcctctcccacccacagaccgattttaaccagagagtaagtcattcatgctgtgcttgaatactccttccagtcccactaggaagactctttgttactaaattctgttttcttgggaaaggggagcttattactatctcattttgttggttgttattaccctcctttaaaaatgtatctacatacacgcatgtgtgtacctacatgtttctatatttcccttgtgaatgtggccctcagagggcctggatttaaaccctgggagtggtagtgaccctttgggaaatgtatactttttgttccaaatcttctctggcttaaatttgtgaagttttgtttcagccttggtttcatagtttttcccagtttccaagataagtttggggctcactgtaatcagcatgtaaaggagaatatggccatcagctctgccccttaaattcatagtcagactcagtggggaagccgttcctgtcccatcttgcgctcgtggctctgtcagcctcaggcagctcctgcaccgtcctcctgcctgtgacagtgttgtcaggagttcttggtacctgggtgctgcttggcctcagggtgccagggctcccatgtggagtgtgcttgctgcagtctctacagcccaggtgtctctgcagccctcctcttacatagccacagcgtggtaaagtacatccagtttgcgctgtagtaagcaattttattaaaaaaataagtttaatatgtaagtggtcccttagttcgtttgaatggctcccctctctggctttggtttgaatgagctacacctggctggagccctgctgctcccctcagcatggagtcacctccctgtgctatggaggaaaggaagaagttattcttaccttggttttgagacaagacaagcctggagaaggctgtagggatgaaggagttgcccatttgtccagcatcagttgagagtctactgtgtgcctggcatcataggaagcctctggagtgctgtgagcaagaaaataatacttgatttatgtttttaagggttcttctcgctgcctgtgggccggcagtgaggaggacaagagcgcagcagggagatgggttaggaggcagttgctccggtgcagggagcagtgccagcttgagggctgctggtgggtattggtgtgagggtgggcaggctgcagataggccttcgcccattgcccttgccatgtgtccccatgtgtccccaggggaggctctgggcatcccaaactgtgagcctgccctttcccaagtgtgctaggccctgccaagctcctgcttcatggcctatgctgttcattccatctggaatgctctcttccccctgctttccatcctagctgagtgacattgggcaagtgaccagatctctcttgagcctcaatctcttattctgtgaaagagtgctcatggaacctactgcatgggaccatgaggataagactatagttgagtgtggtgattgcagtagcctccaaagctgtctcctgcttccaatttcatcccgctactgtgcattctttacacagcgatcctgtgaccgagggtcagatcagggcaggcctctgctcagaatcctctccacagtagcttcctgtcccagtcagaggaaaagccaaatcttagcatggccctcagagcttcctggtacttctgacctcatctcccaccccaaggccatggtgtatggttgatcatgctgggttctgcacagctcattgtggtgcatgtaagtggcactcacttcctccccaacttatgcattgcacaacttgtgcagctgtacatgctgctcctacctgcgcctctctagctccactccagccacagtggaatccgtgttgttcttcaaacacaccaggcatgcttcctgtttaagctctccctactgcctgctcccttggcctggaccattcttcccccagaggtgtgtatggctagttagctcaccttcttcaggtcttttttcaaatgtcaccctatttaaaattgttccatctgggtcactgccccccaaatgttccctttttcccttgctctttatttttcctcctagcacttatcaccatctaatatattatacgttttccttatttatttggtttatttttatttatttatttatttctcaacagaacataagcttgatgcaggcaggcaccagtgttaattttgttcactgctgtatccccagtgcctggattggtgcctggcagtaggggttcagtgatgcatgagtgaatgagtttggatgcacaaaggtaaagtattgggtacggtgcttagcacactggaagcacctaatacatggatgccagtattttcattgtctctgttaactctccaggccctggctcaaatgtggctttctctgagcctttctgcagtcccttctcaggctgaattaagtcaccaccacctgtgctctgtgttccccttcattttgccttctctgtctgctcggcatttatcacactgcagtagtgggcttatctcacactttttcctgttccaattgcaattcctgtggggcaaagactggcctgttcagatttgtatctcaggcggtctgcgcccccagctggcatgtggtaggagcttaggaagtgcttgctgctggtggctgtgggaggtggaaagagctttttaatccatcaggacccttacaagggggactggctccagcatcactgccgtctgatgtttgtgccccctcccaaggggtgtcaagggagagcttggcaaccacttaaatgagagtctccagtggtatatttagagcaaattttggagagaggagtctcttggataacagcatctgggtgacctgattgtttcacatataagagtttggctttttggctactcaggctttgagaggttggggtcattcaagggaggcagtgtaatacccatgtgttcagaggtggctgggacgagagggtgcaggagaaaaggcttgagctggcctgtaagggatctgagttggtgaagggagcacagcttctgggggtggcagaaggaataggagagctgcccctgccatacctggggaggggtggttaggtaggtgccttgggaggcatggttaggtaggtggtttggggccatggggggaaaactgtaatgccagggcaattactttggcctcttgtatttggcaggaggggtccacactggggattgtggtggcgtgagggagagggccctgggagagaagctctagagtcattttcttttccagaggtggagttgtcttggggacctgcacgtggcacgcagagcccatgctctcaggcacctttggggtggcagagtttcaactgaaccaacagaggacaaggggctgagaagtcggaggccttggctgaggtgcccagtttcttggttcactttctttacctgccaggttagcagcaagtgagcaaatccctcctgcctttgctcagcattagcctcagagacttgaggagagctgggccttcaggtgggagcctggtggccacactggagaggaccaagcttgacattgagtgtccgaggggctgaaagttgttcgctcatccagagatggattcgttctgcaaacatagggaaagttcccttcccattcctcatggctgtttgaggatggaattcctgcattgaccttggcctttccctgatcttggcctttcccctgcactatggcctctctactcttaacattacgccccagcccttttccatgggcccctcgtcttccctatggccatctaaaatggccgtataatattctatcaagggaatgttttcagtaagccatgagcttgatatggagcatttagattgcttctaatttttgctctttcagctaatgctacattaagccatctctgtgtattatggaatcatttcattagttggcatttgtctagctaatggcaatggcccaagatttaatagcgaatcagaatttcttttttcaagaagaatgtcatgaggatatataaaaaatttacttaaaatgctaggaatcatctatgttggggttttcatgaatgaggaagcagggaaacagtaacatgaaattagttgtaagtgaaagactgtgtgtataaaagtaactcgtgacttgtttgttcctgagtgtggaggggagccaataaatccttggaaggagcaatctacctgtgaaaatcaaagagatctgtattcctgcatctgatgaaaacataacaaacagtgatctcttcttaaggatatttttagaaatgccctaaaacaagaaaaagtaaataagatttccgagaaaaaacatgtctccttaattccaaatgagcctctctggaaatgccatttagtagtggaagcaggttgtagacttgctgaaaggatttggttctttggttattaggaaataactagaatgaaattgacaaacagacaacactgacttggtccccagtactgctttgagcctgaggtatgtgttggctttggaatgatggggaaggcttcctctgacttgctgatttgttgtagttgttgttgttattgttttgagatggagtctcgttctgtcaccaggctggagtgcagtggcgtgatcttggctcactgcaacttctgactacctgattcaagcgattctcctacctctgcctcccgagaggtgggattataggcacgtgccaccacacccagttaatttttgtattttcagtagaaatggggtttcaccatgttggccaggatggtctcaatctcctgacctcatgatctacctgcctcggcctcccaaagtgttgggattacaggcatgagccactgcgcctggtctgttgttgtttttattgtttcagtctctggtggcttattatgtagacttgggctgtaagctttgcatttcagtttaaaccagcaaatgtttacactatataaggttgcaagggctaaaactttagggagaaagaacccagtgcacccctgtttctgagaagctcatgaccagggagtgggaaggataaagcaatgttaaaaccaatggttattcaagggagattaagaagggggccctgggagagtcagctccatccttttagagaagggaggagttctacctcactgctgggcagggtggggctaaggggcaggagaatcaagaaaggttttatggaactagttgcatttgtcaacatcttgaaggacaggctgaaatggaggctggacattctcagcaaaggtaaaaggcctgagtagaggagatggagatggaaggacatggggcaatgtttgggatttggctgaagaattgcatgcctgtagtaatggtcatagtagcactttatggagagtatcaggtgccaggcatggttctaagagctttatatgtagtaactcacttaatccatgcaatgaaccaaatgaggtactgttattatccccattttacagatgaggaagctaagataaatagcaaggaattaattgcccaggatcacactgctgtggagccaagatcagaccaagttcatctggctccaggctctgtgcttacgaccatgaagctgtcctgtctctgatttggggaaagaacagtcactagaatcagacagatggacagatgccgtatgtttagaggctgggattatcaacattcaggaatgcagaggtggaaaagagaccagagatggagatgaggggcattggagaggtggggatgggaggagggtttggtgagagccgtgaagggccacaggaagacagagctttaaggagaagtttgtcagtgaggcccagagctgcagacaatcccaggaggtgagacctgaggaataggtctgggctgaggagaaagctgtgagggcctcgggagaggggcagcagggtgacccaggctggagctgctgtggtgtcctatcctggctgcagagtgctgcgtgttcctgggggatcatagctgttgatgagtatcactgtccctgtcctcttatctgtagaaagaggtgagtgtgacagagggggcaggtgagagctggcactgctaatttggcaaacctggtgacttttctgcagcctaatgatttttgaaagctgtttgctatgctgaggcacaagtgtgacttcccccatctaaatgctgtgcaatcgctattttccctggaaaattgggcccatgtgggctctgtgtgtggtttatttgagttccatttttatagccttattaccttgtccccatgatgcaagaggcctctctcttttcttgagctttgctgtgaaaattgtttcttaaaaggcacaaagtgatctctcgtcatctgggtggtgctcgctccacaagcagcacttttctcagactccgcacacacttgtcatcgcccctgcccccacttggcaggttcctctgattgttggcaatttactgagaacttttaggcagctcttgaagctcactacctatgtgtttgtcttgatttcttccggaagagtttgtgcatgtaaatatccattcagcctctttctctccgagatgttgccctgccactgaccgtgcttggggctgaaacccagtcttgtcctctggcctcgagctgattaacaatagcagtcatcatgtacagagcctgagtggttatcaggcactaagctaagggatttacgttcgtgatcttaattattcccaatttctttgaggtaggtactattacttcccccattttacagataaagaaaatgagccttcaagggatagagtaagttaccccaggttacatagctagtacatggcagagctgggcttaagcgggcctttctaaccttagactccatgtgctccattcattcattcattggcaacaaatgattgtctgcaacaggctgagaactgttgtagacccagggtgtacagcaaagggaaaaaaggccaaactcccaccttcagcttatattctaacttggggaggtagagatcatataataaatgacatatacattatgctatgtggtaatgagaactatggagaaaaatgaagcaaggaggtcagatgggaagtgggaggattttgaggagtggtcaaagaaggcctcattgagagtacaacaaattgttaggttaacaaacaaacccccaaatctcagtgtagcaacacaacaaaactgcacttctctgcagaaaaaattccaaagtggctgctcctggttagcaggcagccttccttgcagtcatccagggacctagactccttttatcctgtgtctctgccttcttcaagggccttggtttcctttgcattcaaatgctggagcgtgaggaagaagaagagagggtagtttgtgaggaaggctttatggaccagtctggaggaagcatacctccctcccacccactggccagaattcagtcacatgttcactcctgactgcaagggaggctgggaaaggaagtctggccatgtgccgcctaaaaaaaggaagtgggttctggtgaactcatggcatggtgtgttgcagcgagtgaggtgaagaagtgagctatgtgtttagctggaggaagagcattttacacaaaaggagcagcaagacaaaggctgctggaatggagtggggaggagagaaggagagtgggagaagatgagggcatggagttgtgggggccaggccactggggtcactgtaaggatttggttgccttgggaatgacaagcagagccagaacatagagttttgaaggaggaacgacaggatctgaggcacgtctcacagggctcactctggctgctgtgttgagagtggactgagggagcaagggggatgcaggggagaagcgggcgtttgcgggtgttatccaggtatgtgaccagaagggctggccctgagccggggtggtagaggtggggagaagccgttagatttgagatcagttctgaaggtgggccagcaacttttgctgtgggattggtagtggggcatgagagaaagaaaggagtcaagattattctgaggttttggctttgcctaatgagtattagtctcacttcctaccctcagaagcaagaggggaaattttttggaaaaggatatctgagtgttctctgggccctgacctgtcctccataacctctttcactctgtgatacttttttcagcacagatgggcaattcccattcatgactaggctttcagacatggagagggcacttggagtccctcctggcacacagcagaggtgaggcagcactgggaattgtctcactttggggtctttgggtcaaaccttgggacccctttagagtgacatggcagggactgagtgtgccctctaggggggtgagatatgcctactggagtccacttccaatgcctgccatctgcaaacactggtgaggccctggctgaagggtaacaacccacaaaagtgcacaaaaggaggaagttctggaatgcgagttgatgctgccagcggtccggttggctccttgccttctgttctttgtgtgttgacatcagacctctctactgcagacaggctgccctacctgagggggcacagctgccagcagcctcagtttacaatcctagcaaaggaggagagcctttctctacatctaggtatcagtttaagggaaaagcctctgtgtttgagagtgggagcggaaactgtttcccacgtacttccttggcagtcatgacctgtcaaggctgaaactggagatgggactttttaatagaccatgatctcactgggagcatatggggaagaaagttcatcttagagatggcagggcgtgagctgtgaaaacagatagtgcacacctactagatgctgggcccccgctaggtattttatttcactggagagcaaaacaatatatcatccctgccctcatggcacagatggcctcaagtggctaaaccatagaatggctagctgagagaaatgatagttctttctttttttctttactgattgcgaatggggttgtatttttaattttggtatccatgtgttcattgctagtatatagaaatccaattgatttttttgtttttatgttgtatcttgcatgtttgctaaactcactaattagtcatagaaatttttttttgtttattccccaggattttctgcatagacaattgtatcacttgcaaatagggattgtttcatttcatcttttccaatctgtatgttttttatttctttttgttgcctgattgtgtggccaggacttctagtcctatgttgaacaagagtgctgggagtgcacatccttgccttgttcctagtcttggggaaagcatcagcctgtcaccattaagtgtaaggtcagctgtggatttgttgtagatgccacttgcactttgctggcatggttgtgagtaggactgtgggttttgtgtgtttgtgtgtgtgtgtgatgtttggctgaaatacagtggttattatctacaagttttctgtcttgaaacagggagatttgttggggcattttctctttgtgctccttggcatttctgagttgctggtctcctcagttccaagtctgagctatatgcagaaaaggaaatgcaggaagctcaccactgtgttgttccttggatcctgaggtcccagctggtctgccttcttcagactgccatttggagtcttcttatagtcatctagcatagaatgcccaggggttttcattgttcttagcaggtggaatcagggaaagtgcacctgctccatcctgctgggagtggaaatggttgggggaaattggagcgtataggtcggggctagtttagatgcaagggctccgttctgtaggtgcaggagggccgtggaggctcagccctgacagcagtgggagggggatgggaagagggggagtggagagagcctaggtggctgctgcctgtgtccaggcaggaggtcctgaagtcctgaggtcctggccgtgacagtagaactgcagcagaaagaaggacaggaagttccatgaggacagtgaggaagtgcaaggagaccaggttggtctgaggtttctagctagagcagctagctggttctgagataacagagacagagggaggggtctaagcgtggcagaggggtgtattctaggcattgtagagcagatctggaagactggacttactgtgcttcccctcaggggaggcttcacagaggaagtctggctgctggggaaaaatccagggagtgtgcattctgggcagaggaattctggctgctgggtaaaaatccagggagtgtgcattctgggcagaggaaacaacgtgggaaaaggcacagatacagaaaacggcgtgatgggcctgttgggactccagctagctgaggcataagtgggtagttactggttccatgactgggaaggatgctgtaggagtgcacaaaaggaagaagttctggaatgcgagttgatgctgccagcggtccagttggctccttgccttctgttctttgtgtgttggcatcagacctctctactgcagacaggctgccctgcctgagggggcacagccaccagcagcctcagttttacaatcccagcgaagggggagagcctttctctacatctaggtatcagtttaagggaaaggctctgattggcccaggttggtgatgtgcctgcctttggacccgtcactgttgcaagggagtggagagttctaatctaggccggatcgtctgcccacccctgttggggcaaccagagtcttttaaaggagaaggcagacaaaatgcatctggggaagataaaaaagactgtttaccatggcttactgtaatagattttgaagaatatgtagtctggcagtgcaggaactcttcatggagattaaagcaggggacttgatcaaagttaggttttattaaaatcattctggacactgtatggggttgtgattggaagtgaatgacaagaggtgtcaaggcgggttcgtaggccactgctttagctccaaggagcactgatgaggcctaagctagcttagaatcctgacttactttgtttgcacttcacctgtagcgacagcatcagtgaggtggagaacagggatagagtcctagagatgttagacaggcaagacttggtggccagatggaggcaaggagaagggggtcttatggaggattccccactgccaccaagggcataaagaatgagtctctggagggctagccttatctttggaaacactattaagtgttggcagactcgatgtaccttattgcttcttcagaagtgttagtgttgttggcttcttgtggtatccagctggaaaaggaagctgattgattgcatttccctccctttaaagagcttccttttttgagaaatcagaagataggtgatacagtcaggactgccagtggagaaataggttggggagagggagacactggcttggagactctcctgcccccagcctgccccgaggcccgcgagtctgctttaggcacattcgtccttttggcatcatccttgctgggaaggcttttaagggatttaaggaaagaaatgacacaatctgattcatattgcaccagatttcctcctctgttcagaatagactatgggtggaggtagagtgactccaagagtagcagcagggaagcagggcaccaattaggagactgtcgcagcaatctaggatggggacggtggaggtggtgagaaatggtcacattctgaatacattttgaaggtaagaaccagttttagtgaggattagatgcggagtgggagagaaaggagatgaaaatgactccaaatttttggtctgggcagctggaagaacattgtcttaaactgaggcggacacaacgctgggaggagcacgtcaggggtctgtgttggacatgtttaagtttgagacacccaccatgtcttacacaaagctcccatctacttcttacttgacacaaacagttggatgtactggtcaggagttcagagcaggggtccaggcttggagagaaatctgagcattgttagcatggaggtgatatgtgtgaatccaggagactagttgagatcaccaagggagtgacagagaagagatgaaaacaaggactgaacacgctgacataagaggtggggagatgagggagaataagcaaagataagccagtgaggtgggcggaaaaccaggagagctagagggcatgattaactggtgtcaaagctgcaaggtaaggactgagactttaccaatggatgtagcaaaatgcaagacaggccaaatgcatatgctgttggacctaagcttaactttgcaaataagtcatagttccttcccagaaggagaatataattttgcaaaaagggatcatttaagatttattaaaataaatctgagaaagatgtgaagatagtaccgtaggaatccagcagaaggaaacagtgcttctggcttttgtggggaggattgagtcagattcattcataccttcattcatttgtgtgttcattcatttggcaaaaacttattgggtgccaggggttgcggggaggagggaagagagagttgttatctagtgggtatagagtttcatttttgcagatgaaaagagttctggagatggcttgtggtaatggttgaataagaatatgaatgtacttaataccattgaactgtacacttaaaaatggttaagactgcaaattttatgtgacatgtattttctcacaattaaaaatggagagagattaaataaaaaacagagcactttttggggccccatcatgaacttggtctgggatatgatgtttgaaatggatgcgccatctcagtagatggaggtaatgtggagaagagtggaggaagacgtccagctcagagggttttgggaactatcagtcctgtttgtctggatggtagggtctatcgggggaaaccatgcaagctgagactgcagccgggccagttggtgcaggcccagcatcctggctgtggatttgggcctgccttcttagattctgggagcctctgatggtttctgcccaggggagtgtcattccaaaggtgtgtatttagattaatttcattagtccttcctgttaaaccattgcctattaaaagcagtggggttgaggcattcatttttatggtgaaaattctggcctagcagaattttagatatccaagcatgtgtcaatgaagtgagtaggttatttttccatccattttacaagtatttattgaggatcatctaagtgcccgtagtgttctaggcagttgggggtatgggacggggtgaatttaacaggtctcttctcttaaaaagcctacagtctagagaaaccccctctccttcctaaacaagaagttatgccacaacgtgccatgtgttaccataggcatgccgccacagttccatgggtactgagaggagggggtgcctggcctgcctggaacactggggaggcttacagggaaaaactgtccaatggatttaaaggacaagcagggattttctaggcaaagaagcagaatgggcatcccaggagtatggtaaatcaaaacttattgggtgctatgaatttaaagctaaacttttatttcattggcttttaggtggtgctggctagagtgtatacgtttggacccaagcttaacttttccaatgtggaatcctgggccttcattggtaagtttgtttgatgccttcttaccaaattatgctatcaaggattggtatttggaatgaaaggcaaggtagttatcattggcaagttctctgtggaggttaccagccctggacctggagaagcctgtagcacaggctgaaggggtacataggaaaagtgaaatctcactgtaggtttctgtggtagatgcagagagggaggccagaggaggggaaccaaggggtgcgggggatggatgcagcgggccttatggagaggtggagctttggctctgttttgaagggcaagctagattgaaaaaagtccggggaggagtgaaagaagattttcgggacttgagaacatagaggtgaggtgtaaacaaagtgggcctagcagcagtcccataggagcaaaatcttcatcgaaaggagtcacgggcaagaactgtggtgggatctgctggcgtctgatgattctagtccatcagcaaactttttctgtagaggaccagatgctaaatatttttggcttcgtaggccatgtggtctctgtcacagctactccactctgctgtggtaacatgcaagcagccatagataatatggaaatgaatgggtgtggcagtgttccagtaaaactttatttacagaagcaggtggtgggctggatttggcctgcgggatgtagtttgccaactccttttctagaccctaaatgcccggctaaggcacatagactttatcctgaaggcagtgggaagccattgaagttattttggataaagaagtgaagtggcagaagtgatgtttacattttaggaacattcatctgatagctggacaagaggcatgggccccttttggaaggcagcagcagtcatccaggcatgaggtcttgcggtgaacagtagtgaaaatggaagcaaaggatcaatggaggagatactgcaaagggagaaccaatagcgttttcagtcttcttagacttaagaggcaggagtcaaagaggatgaaagtttaagcttgcttgtttacggtggtatctttgacagaaatgtagatgttgggggtggaaaggatagctgatgcatctggttttagatatgttgaattcaagataacagtggttcatccataagaaatgtccagcagagaattggaaatgcagggctgaagcctggcctgagaagattaagtctagagatgtggaatggaagccataggattaaacacggtctccccaagatgagcagtgggctgagctgtggggaatatgcgtaactgtgggacgggaagacgatggaagagacccagaggccatggaggagagtcccgggaagggaagagaatggggcagcagagaccagggagaacggacctgaagggaggctgctgaatttgtgacaaggtctttgcagatggccttgagaaatgtaatgtcacaagaggggaagggaagaggaagccaggttacatggagttggacataaatgaaggataaagaattgagatgttacaaaaatagaccgctcatagaaggtttgggtagtaaaagaagggagacacataagatttagatacttgcttgtcagaataacctttgctttagctttgaggcaggcaaagcatgctgtgaccagttttcatttccttctttggagccaagctgtgtttgggagtttgtgtgtaccttgggcttgtgattgtgttcttatgctcccttttgaggtgtggtgttcgtaactctgccacaacttgcaccacggaatccagcccgtgtttggacccttgccatgagacaagatgtgatctgttggggaagtagttgcatttgtataagttggaggagaaagtagagtggaccaaaaattgaaataaaccttcttactacagagtctatccaagtatggggacttgaggataattcctccagtcatgatttaattatgtatcaatttgtgctctgagtattttgagtgtaccttctttggtttgaattctaagtagtttttgacttggtttgtgtgaatatagcagttagagagctggtaacaaaagcaacagttgtaactggtttagagccatgatttattgaacactcattatgtactaagtccagtgctaagtgctattgtgtatcatcccatttcatctttgcaatgacctatgtggggggaattattaatagtattcttatttcagccagaaataagtcatagatgagtaactatgcaaggttacaagggatttgaacccgggtctgtataatccctggcttatgctgcttcctactttatcttgcctgtgtctggaatttttcctcctactaatgtagaaggactagagatagatcgagtccctcaggttaaatattcagaggctgtagtgggtgtttccacttcttaggagtctattgaaagggcagaagaagtgtgggaagtctggaagagactaaggccaaacctcaaacacttactttaactgtttccccagataaaatttagttgaaggcagcagccttgggcttggaaagaaaatagcgctagaaggcatgagagtcagattccagtcctagcattatgacaattataatgtcatttttgtttaaactcttggcatttctctccaattacctccagctttgagctccaaaggcaggctcctattttgtcttgtttttcactgtatccccagcatcgtagcacagaatctggcatgtagtatgttatgtactcactaattatttattgcttcgaatgcaccaagggacttggtacaagacacttagcctctcaggcactgctcttggcatcatggttatagaggtgaaacaggacaaggtctctgctgtcgtgaagcagacgtctacatgtgtgagatgtagaatgtgacgtcaggtatgatcatgctctgaaataaaagacagtgagaccggggtggagagggaagggcctgtccaagaagtgagacagtgagctcgttgggggtaaaatccataaaattcctcttggggtgactacagattgtcagctgcgctgtcagcaccttgttttaattgttttacttggctgccattgccaatgcccagctgactgctccctgcagcgagaactcccacctcaggcctcgctttcttcagctctgctgagcgtgcctctcctgggtcggctcccggttctcctccagctgctgagattccagcctccacagcctgctctgctggttctctgttctttgtccttagcttctggtttggcttggtccctttcacgtcatccttaacgtcctccctgggtgagctcatccaccactcacctctgtcttgaagacacccggatctccatatccggtctgaacctcctcccagtccacactcctagtggtctgccccgagggcacctcaacctgtctgtcccctcctgagtgccacatgcgtctttctccctgtgctgcctgcttggtccacgcccctcagttgcttctgcttcatgagtcgtcctggccttgtcttttccctcatattcccttggttaccacatcctgaagagctcatcttctaatttgtcaactcagttcttctctgtctctccactcctgtgtttaggattcatcattttgttctatgacagcctcttaattggtcatcctgtgttcatctttttcctccctcattccactgcccacattcctatcaacgtgatctttctaacacatgtctgatcagagctttcttttgcttaaagctctccaagagctcctcattgcttagaaaataaaagctaacccccttcagcggggcctgcagtcttctcatcatctggcccttggccccctgcagcttttgctcccccacccccaccccactttgggttttcctttttccctaactcacatttctaacctcagcctagctaccaacagccatcacctcctagtgcctttgcaatgctgggccctctcctgggaatggcgtggtctctgttcaccctcttgggaactcaactccagtttcccccaaatcttcaggacaccatccttccctacccagcacctctccatgacctggaaatgaccttcctcctggctcccagaacaccctcatgtctctcttgcaaagcacttatcggtgttactgttgatttacttacctgttatgctcagcaacctgagctccttaagggtggagaccacacacacacacacacacacacacacacacacacacacacactctgtctctctctctctgttccaagtgccagcatagtttacctggctcaggaagtttttgttgtaagagtgaggagtggtctgtttgtgcagccaagcaacagattcataatgtgataaaatgtacctgaaatgggaggttcattggccattgggtttattggggtgctcttcttgtcagctttgagtgcaggacaggttgtgttgggcttgagtttgtgacgcctgttgtgtctcccagcatgctgagacctcaggaatgtctcttctctatattctttgcccctgactttttatttttttagctcttgtttttgatggaccgataatagcaattcaaaatgaaaaataatccatcaaggaattctcaggaatgaggtccacccaccttggtcctggatgaatcccaaatttcctaaataagccagaatatctattcttgcgaactactgtctgacagcctttttcccccttaatccagctgagaatgcttttcttgaagggtaaggatacctagtggcccttcatgggggtgcctgagggcctctttgtcttcattttaaaccttgtaaagtccccagtgaatactgaggagtctaacaaataggaagaagctctgaccccaggggtcccaagtcagcatctgtactttgcatgggagctagcacaatgcacctagccaatagcatataaactctcctgttttcattcagtgccttaagcttgttgcttgttgtgtcttcttcacttcctatctctgccagagacctgagaagttgtgccaagagtgcagcttttatttggggcctcacagtaatctaggaaagcttttcagaagagagccattctcagcaccgaggtgtcctgcagaccaggacactccagcaggctcttggaactgctttcctgggatggaaatgcttgtgatgctgcctccccttgtagggactttccatatgctgttccctcagcctggaatgcatttttctcctggtttgcctagctcatgcctgttcaccctttggaactcagctgattggcctgcctcctcctcagaagcctccccaacctccctgataagaaggctaggtcttgtcctcaccattcccatgccagcatctagcgcttatggactgctcaccttgtgtcaagtactgttagaatgcttcatgcgtagctactttgtattaggggcttggtagatgttggctgaggtaagtgtcatcattgtcccaaagacactgtgtgaggaaactgaggcctcgacccattgagtaggtgacagagcaggagtttatcccagatgctggactgtgggtttacgctctgacccttctatacgccaccgttccctctgctccaagtccttgcagtctgtccttttccagcacttgtcatggaggtcatgacctcggtttgtgtggttatttgattaatgaatgtttgttccctcactgggcagcccttttgagccccaggatggcaggagtacctaggactctaggcaggtgcgcagcctggagttgaccgagagcatgtgggactgcccacttgcccacagctgcttcttgccttttgcatcacaggagggtgggctaggaccataaaagagccagcccaggcctccccctttctggagctcactgagtgcgtgcatggggtttggccgtcaccctcacttccatggttctgcatcagaaccagctgtgctgaggaaacatctgtgccttgttaaggtctgttccttctgcccactccctttgcccttttctctaccttacaacccctttgttgtccttcttcaaggaaaggggccccctttgtctctcagggcagagccagctgcccttctcctggtcctcttgatctgcacacactctgaggatgactgcccatggcaggtcatgatggtccgtctgccctggactgtggtttctgtggcagagcaatactttgtacagtcagggcccatggccctacggaaggctgagggagagcctgaggtcattgccttaagagaagctgcttcatggtgcagttggtatgtgtgcatgtgtgtgtggatgtgtgcttttttcatgcatgatgtttttatttgtgttatttatccccctgctatatctccctctctcaggggtctaacatggagctttgaatagtagatacatcatagctcttggctaaatacatattttctcccccgctgatctgaaggcacctcccttttcccctacccctcactttggtaccttggtgacttcacagggttgttatgacttcccagacctcattgagattgcagtgatgtgaaaaccctacctagattccagccagctgggcaggggccttggcagcaggggaagcccagttccctagggcaactcaccaggcctccagggctctctagggccaggctggctgagcttcaactgactcatactgtttttgactgggaaaaataaaaattttaaaatggcttctgaccaaatggggaaagtggatgtgggaggaggagaagggggacgttagccacaccctaggtacatttgccagcagcaaactgagatgggcttaaagtgtggctggcctctaagacgcctgcttcaaagggcattcggcacactggtctcaggctttggaggcccacctgcttcagaacatcagctccctgtctgtctagcgttgtgacttaagacaaacccaccaagctcccttagcctccattttctcatctgtaaaatgggattgtaatcattagaataacctttataaggttcttgtgagagtggaatgaagatgtgcttagcaccgtgactggcgtgtagaaagcaccaaatatttattatctgttaacattgtttttgtttgtcaaagtattattgttaataataattataagaagactttggaacagatataaagtctaaaatgcaggctgtgatgaaagggagatggtatataagaaaagtgctttttgaattgcacattatgtccagatattattattagcacaagtatgtttattattgttttgtctttgaaaaaaatgctggagcacaattttatgatgttgagtctatgtcctttgttgttttgttttttgttttggaaaaaggtttgtcacattggcctttattggaatcttgtccagtggatgtatgacccacattggtgaccctgggtgccaaatgcctggacagcacctggcaaagaagagccattatttcaatggtcactattgtttaaaatcgttatggtaaacaatacctgacagaagttcttagaggttcattgacagtaaattgtgggcaatgcactgagttattatttactctagacctgagaaattctccctctccaagttttgtgccttgtatagctaaataaatataaacaatttccttagaatttgatacaaacagctaccattgtcttcacaagtatgttagaaatactttcttaatagcaactacttgactgttttgttttttatctccattccctgccattactctgcctcttcccatctttctgaaataaaagtgagccaaattagccatttaaaaaatacgtagatactttcaggcagaggttgaaaactgtctaccccctggctgcatctggcttgcagatgtgttttgttcagcactcatagtgttttaagatgtttaaattagtggccaacatttaaaaatgggtagatttttgaatcaaaatccagatttccagctcttcataaaaaatcaaaggtctagtgggcctgggcccgtcttccttgtggcagtgcggaagagtggtggtccctcccctgggagcttgtttctccagcctgcctccggctggcccagcctcactgtacctttccatggcctgcttggcccctgtaggaatagagtttgtagtctctgcttaatataactaataccccttagatactgtgtatcagtttagaattatttccactagcaactgtgaccataggtaggaaggatattttacttgctaagttgtcattcttatgatagcccaaatggctataatagtattttaggctcttttggatttaatagaattaccttctctcctctctgtgggatttcctcattaacaatttttaaaaagtgttcagcaaggcttatatagcaacataaaattttaaataatgcaggatataaatttctatagctgctattgaaggggggttgcaatcaagtgaactgctttaattcaacaatttatggtgttgtaaatttgaaaaataaaagacacttagttttttttttttttttttttttttttcagaataaaataattaaatagttgacctttggcagagtctttgttgaaataggcaagggttttgagcttctcagaacttgagaccattgccttctggagtctttcctcagatgagtctgtgcctccttctagctagtgcactctgagcactgtggccacatctggagggtggagaggagacttagcttccaatggtggtcactctaggggaggggggcccttgcaaataccaaaatttttttaaattattattttatgagcttttaaaaacttttttgtttttgtcatcacaaaagtaataaacacttgtgataaattcagacaacactgaagtgctttaacataagcaacaaaatcttctgtgacctcccccaaccttttccaaccattccccaaacataagcacttttgagagtttgcttcttatactcctggacttttgcatttgcttgtttctctccacccctaccctttgccctcaaccacgacatagatactttcccttttgttttctaaagatagactgtccctgtgcatggtgttctgcaactttctttttacagctgtcaattattatggttatttttccaagtccatatgtacagataaatgtacttgttacttttaaaagttgtactccatgttatggttgtatgttaagtaaatttcgttttgtattgatagacactcaggttgtttctgaccttttgccattgcagtcattgctgctgtggaaatttttgtgcacacgtgtgaacttttgcctgagattttctttggtatagatacatagaagtaggacttttggtttaaatggtttgctgtttaaaatttgaatccataatgccaaattaccctccaaaaaggctgtaccaattcatgctcttcctaggagcatcccattatggctttgctaatctagtttttgcttacacatgtgtaagaaagtaaatcttaaaagcctcacaaataatgccatcaaaattacacgtttatcttagaaaagcattcagaatatatgtctgtagatttaattatatgatttttatatcttgactttgatggtggttatcatcctgcaaggtgacaaaaagttccctaaatactgtacacaattattaaataattattaaggatatcagttgtgccaggtagcctttggaagaattacagccaaatcacagcttccttttccacagctctgccaggctggcttgtctttcccaccaagggctgagccattaatactgaggctgggtcagcatttgaaggggccctgccagggagtgccaggccttgggccccagagacctggggagtgggagatggcaagtgactgctgtgaggctgagacaaagtttttgcctacaacaccccatggctgtttcctttactgagctagatgaggaaagcaaagggaagtgatggtccaagacttctggtggtcacttttgttcatagatttctcacaggagtgctaacatttaggctcatgtttacgaaggtttgaaaccttagcatttgggaaggatctgcaaattctcagccaggggccttaactgatcacaggtagttgtgaactcttggtccaggctgtatctcaaggcttcttcttagaaggacaggtcagcttaccacctgctaactgcatgtgaaattttgaattctgccttctctagctctcctctctggctctgagctggtatctggcatttgcaaacagtttaccctttgttgacttcttagcactaacctcacttttatgagtctgagtagacttgatacccaggccatttatcctttgagggtgccctcagcttcatcagacccatgctgggcagtctggcatagtggtaagaggcacttggagccagacagacctgggttcaaatcctgacatcatcacatttactaacagtgtgaccctttggctgatgacctcacctctttgagcatcagtgtctccttctacaaagtagggacagtaattctttcccaggggtattttgaaggatatacgaattaatatttgtcaggtgcctctcagatgttcagcacaaaataaacagtgtataaatatgagtcctctcttatcttcctgctgtagagagaaagttcgttggggatgctccaagttggtggctactggctgaggatcctggagtaagaggaaggctaccatgtaaacccagagatgaatcatgaacaatgtgtattctcaggagcttagtatttgatatgggagcctaacaagcaaatagtgtgtccagtaataggaactgattaatagaggaaagattaattaaccttctaggtgggtggggtggaaaagtaggtggggtattgaaggttcaacaggagttcgacagagaagatagaccataaataataaatatacggctgtatccactagagataaagttacattgttttttatgtacatgttgacttcttttggccttgccaatgcactgatatattcaaattcagctcctctctttttctcttcccttttcccttcactctgcctttcctccagccctgccttgaaatactcagccactgaaaatttcttaaagaatttctttatactttagtaagtcctcagaggataccagttcaccctactgagattttacaagaactttggtgtagctggggttttttttgcattcctttttctacggtagatataagttcttttgggttgcccatcaatgaacaaactaccaaccatttgatgtttactgcgtgactcctgtataccaagcacatgtgccatttcacttagtccccagaatgtcagagcagctttgtgaaatgggctgcccgttctttcttatggatgaagaaactgaggcttaggtaggttaatatactgaatattatacatgtagtgagtgggaaagccacagttcacctccagggtctttttctccctctttgctgccttgcttggggtcctgctcatagtaggtggacagcagatgtttgtctgaacatatgagaacactgcctgccacgtgccggtcagtttgatttgtgctgctggttttgtaacccacatggggcaatgacagctgctcaggtactttcctacctattagtggggccccagggtcacacatcagtcataattgacaaaaaacacaatttccctttcctctcaacttttatttctaaggtacttgtaagcaggtagattagattgttaacttttcattttttgctttgtctctctcctttaaagactatgtgaaagaatacacagtgccctgagagcctggcctgggaatcagaaacttagattccagcttcggttctgctggtaactcctcagtcattatgggtaaataatattccctctccagaactactagattgtgtccttggtgcagtctggggttcgggtggtcctagggaccctgcctactgcatgaacctgttatcaccatgtgaggctggaaggatctcagcgttggtgttgggcaggcctgagtgagcatcctggctcctgtacttcccagctctgtgacctcgggctaatcacctgactccctgatgcttgttcttgtctacgaaggagggctaagaggacctgcttcccaggatcactgtccagattgaatgagaaggaacgtcggcttccttccttctgtctccaactcctgagtgcactggttttagactaactgggtgtttctgcagttgaaaccaaaacaccttcattaggtacaatgttcattatacctcgcaacaccctgagatactcaactcttagatttcttgaagctcttttttgttaagaaactcctcaaaggaagatactcttctaccccattgagctttattagtgcttcaatgacagcaccttattttttcacttttttcccccttgcagacagaagctgcagtgtgaatcagtttgcatttatataatttcttttgcatttctttgcaaagaggaaaactccattcatttagcaaatgtccgtcatgcccaggccttatgttaggtgaagggatttggagagaaatagagtcactgacctcaagaagcttacagggaggaaaggtgtaaatacataaagtgacacatgggtttgtcctgtcaccaaggtatgcagtagatgctgtgggagaagagaggatgacacaggttctctcttggaagacctcatagagaagaggtgacttgtgagcaagtctttttttttttttttttttttttttttttgagagagggtcttgctctgtcacccaggctggagtgcagtggcatgatcctagctcactgcaactttgaaatcttgggcttcaagggatcttcctgcttcagcctcccaagtagctggaactacaggtatgtgccacttgcctgtctgatttttttttttttaattttttgtagagacagcgtctagccatgttgcccaggctgatcttgaactcctggcctccagtgatcctcccaccttggcctcctaaagtgctgggattatagacatgagccactgcacccagccgttgtgagcaagtcttaaaagatgagtaggaaggagtctgtcagctgtagaagtaggaagggcccaggcagaaggagcacagggcagaggctagagccctggtaggaggtgacacactgggtgcatgtctggagctggagccaagaggtggaggacctaagtggctacatcttggcagtcacccatatattggcaagccccaaatctttgtaaccagcccagattgtcttcctgagcccccaactcccatacccactgcccattcagcagctagctgcatgttgaagtgtagtggtcttcccagacctaacataactaaacagaagtcttgatttgttccttcaaaaacaaacaaaaaactagccttgctcctcctcagtcttccccatgttatgaggtccccatcatttttacctggctacccaggcctaaaatgtgggcatcatctttgattctgcttcctcctgtgttcttcacatcatctgtttgcaattctttttttgtttgttttactggttttaaaaattatttatttattgagactgagtcttgctttgtcatccaggctggagtgcaatggtatcatcttggctcactgcaacctccgcctcccgggtttgagaaattctcgtgcctcagcctcccgagtagctgggattacagtcgtgcgctaccactcctggctaatttttgtattttcagtagagatggggtatcaccatgttggccaggctggtctcaaactcctgacctcaagtgatccacccgccttggcctcccaaagtgctgggattataggcatgagccactgcacctggccaatttatttatttttaattaacacataataattgtacatatttatggggtacatagtgatgtttcaatacatataatctgtagtaaccagatcagaataattaacatatctgtcatttcaaacattgcagttcttgacaactcttactgtatgtcctggaagccaccactgctccttattattagtttgtttctttatcaaccaagcaggccagaccactgctctaccctcgttcaaacctccactgtctttcagcaggtctcttgtcagtttgctacataggcaaagaggtcttttaaaaagcaaatttgtgtcatttccctgctctaaactctccagcggctttctggcatctttggaatggaatctaaacatctcgccttggcctgccagcccctcctgctcatcttctctggtctcatcccttggcactctctgctcactccatttcagctgccgcatcttttcttactgttccccctgttgtctcatgggctttgcacttgctgtcctccgcctgagctgctcttccccagacaccgcctgtctcaccttcactccacgctggcctctattcaagtgttctcccacctgtctgaaaaagcaccgttctgccccctctccccgctgcttcaaccattctgtcctacctcgctttggtttctctcattagcactcatcactctctgactttatatgatatgtttgtttgtcttcttatttagtgtttgtcttaccccacaagaatataaatccatgaagatgggacctggtcttatctattgcattcagcactctagggcctaaaacagagcctggcacacagtgggtgatcctgaaacacgaggtgggtggatggacaaatgactgagttaatgcatgcctgcatgcaagcgaagactttggagtttatttcataggcagtgcaaatctagtagacatctttcaggaggtgagtgacgtggtcagcacttttattttagaaagccagctggtggcagtgtgggggctggactgtaggagggaggcagcagaattactttagcggctgtgaaaatcgtccaggaaattgatgctgagtgttgtgctagagctgtggggatggagaagaggggacagatgacaggacctgaagatctttgagtgtctttgatttctattgggataacttggtatagtgattcctttataagaaaagcaggaggggacgaactggtccagggagagactgttgacactctgtggtgtttttctcaccaagaaaacctaagccctgggatgcatgttctctgtagtggcattggctctctggggagtgactctgctgctccgcagcctcccctgttccattttttaataagagaatagtcaagatggtggtgtcagtgagtgggagtcttcttcatgcagatggatccattgatctttgcatactccaagccacactaagtcattggttcttttctcgcagtgggtacatttcaccttatttgattctgatctgacaaatgctgctttttttcttttctttttttttctttttttttgtttaaagaatacctagactgtgctcaagttccaggtggggtttacagataactggggttccagcatctcccttcttacaaacacgaacaggagcctttgccgtccttgggtctcagggaggcagaccggcagcaggcacacattcctggcccaggcgtagccatgctgtctggtgctgccttttgagaccttttgtgtgtgtgtgtgtgtgtgtgtgtgtgtgtgtgtgtgggcttgaatgattccttctttcaaaaattcaaccctctccaaattttgatgaaaaccttttcatctctgagtaagcacattatttcccatcttgatgaggtgtgtcccctctgtgtccctgagagtatgtcatcccagccttttaaattttattgtatttttttattttttattttttcatactagtcaagtgcagtagtgagaagcggggaaagagtagaacaaggggccgggggcggtggctcacatctgtaatcccagcactgtgggaggctgaggtgggtggatcatgaggtcaggagattgataccatcctggccaacatgatgaaaccctgtgtctactaaaaatacaaaaattagctgggtgtggtggcacacgcctgtagtcccagctactcgggaggctgaggcaggagaattgtttgaacccgggaggcagaggttgcagttgagccgatatcatgccaccgcactccagcctggcaacagagcaagactctgtctaaaaaaaaaaaaaagagtagaacaaggagtttgatctgttacagactgaactatcaatggagataactcactaccttcggaccagcctcatcccagtcttttaagcctggtccagaattcctaatcctgcttgtcaggcccttcaaagtgaaatgctgtaccatctgtatagctggattctcacctcctacctctcctctcccttccaaaggttccgatgtcataggaatctacgctagagggcttcctgtgtgccgggcactgtggtaagcacttcacatgcattctctctaatccttaccacttcggggatgtaaggattataatcttctttttacagatgaggaagctgaagcttgccactgcttagtagttaagagtatgggcttacagccaaacagaccctggattgattctcaactagctggggaccttgggcatgctacttaatttttttaacctttttcacatttagaagataaagataatatatagagagataatatagaagattatataggtattatatatatatatatcttctatattatgaagataatacagagttgtgataaaaattaaatgaaatgaccagacatagtggctcactgttgttttgttttgttttgtttttttgagacagagtctcgctctgtcgcccaggctggagtgcagtggtgcgatctcggctcactgcaagctctgcttcccgggttcacgccagtctcctgcctcagcctcccgagtagctgggactacaggcgcccgccaccacgcccggctaattttgttgtatttttagtagagacggggtttcaccgtgttagccaggatggtctcgatctcctgacctcgtgatccacccccctcagcctcccaaagtgctgggattacaggtgtgagccactgcgcccagcccatagcggttcactcatgtaatcccagcactttgagaggctgaggtgggaggtcacttgaggccaggaattcaaggccagcctgggcaacatagcaagaccacttctcttttatgaaaaaaaaaaattaagaaaaataaaaattaaatgaaataacatgtaatttcctaagtacattaagtacgtgcctactatgcgccggacattgtgctgtcagcaaataatagctcatcgcagatgctgttatcatcatcatcatcccaaagccacagattgagtctgtaggtgaggccctgcctggctccaaagattgtgtttttttctcctgttgctcccaagttcacctgtcccaaactttctagcccctaagtttgcttccttgcgcttttctggttgtgccatttgtccctgtctgggcagtgggctcaagctaaggcacagcagttttccagtccctttgagctactgacctcttttctgtcattgactgaacagtttccggtggctgaatcgtctgtgtaagagcttggacaattttttctgattgttaccatcatcgtgtttactgtgaaagggcttcctgtatagttgtttgtgttagcagcattgtctaaatgaaacaagagtggcaacagaaagggttggtgagcagtcctagtcttttggggtcacagatcactttgtgagtctgaagaaatttatagactctctcaaaaaaataaacgacaagacaaatacaagcccagcatttttcatgagacgttttccctgaagttgatctggaaggctatgtgctcttttgtcattgtgctactccacattcacagccatgaagggtgtcatgtttctgcagggtgtttgtatttaagggttgttgggcaatttggcaacactatacctgtttcattgatactatgtgctatttgcatttatttcccatatctgagatacgtattcacacatgagaactggcctggccattttgatgagatgtacctgctgatttgcacataaacacaagccatggcctgcatctagaggatcgactggagaggcttttttttggcccaaaacatcagactagtaggaattttattatgagttatagactaaaaggggggataaacttagcttcagcagggtttaatattctcaattcaggtaagtgtaaatctctacttttcattttaaacatttttgaaatttcagtctttaaaaaaatgcttgttttttttccttccaagttttaaggtatgggtttgggagaaggcagattccaaacactttaactcttcgacctcagacttgcttatgagcctctctttggaacatttccagtgaaccgtggagcaagcctgccacatccagcagccgtaggcatgatgatcactggtgccgatggcccctccactccctgcctggcttttgaggccccgcagaaagaaaggaacagaatcctttcataaggaaggccccagaatcctttctcctgctgtagctatgctgccagtgtcctctgtagatggaaatggaacttggattttgggtgccagaactgaattcatcacagataagattagttgatataaagctgtttctgatgagcagtttttcctccagagttttcatttttgctttttctaaattatacaaaataatagacactcattacaaagggaggatcataatgctccatacctggttttgaattccacttctatcacttattagatgcagccctgggcaaaacacacgccctctctgagccttgatttttctcattgaatgggagatctaattattttacctcataatactgctgtagggattgaaggagattggtataaataatggttttctgagagtctggtgtgtatttgctttttttcagttaatatgaattgagtacctactaagagctggtcactgttctagttgatatggaaccagtcaagagcaagacagagagggtctccgctctcatggtgctcacattctaatcagaggaggcacaagaacacaagatcacttcagttattaagaaattagaacccaggggtagcatgagagtcacaggaaggacccctttacgtcggatggccagcagaaccctccctgaagagctcaatgctttgtgacccccccggtcccaagttttccaggactcctacttttaaaaacactgcccctccaagtatataggtctcaattttgagtttggaaaatctgaccacatattagttctcttgttcattaatgggcttcccatttagagagtgagttcctggggcaggagccatgtcacaggaccttttgaaggtctcagggccaatatggacgacacttctcttgaacactcacccagttgggctgacatgaaaacctcatggtgggaggtggggggtgattagtttccagccagagcccattttgctccattgctgctttgaacattctggtttctaaggagctggaagtagtttctctcagcgagaatgtggcacactgtcatctcctgattctctgcatgcagttcttcaatggcttgttgaggctgcgtggaagcccagaggtcggggcagttccaactcacacactggcatttgaacggcagagcagtaagccctacacctgacataactgcattgccttcttggggtacggtacggatttttaaatgaccatttcagcctgctgggctgggcaacggtgatccaaactgatgagtcaggaagccactgaacagaaaggcaggctgcatctgactcacctgtcatgtcgatagttgacctccttttgtttgaccttgatttgctcagtgcaattaaagatgctgttgtgagtgcacttctgctacctgatttaaataaagtctaacatgtgacagctcagggtcttaaatgcacacacgacttaggcagacggacagatgggtgagtggttagcctttcacttacctctgaattgtaattctatcacaaggaaagggcttaatttcaggaacacggagtaattatttgagactagatacaatgccaaagcagcaggccttgattccttgctacagggcagcttaatcaggaaatggcctagatggccgcctttcaagtaggtccttgcagtagcttggcaacaggcacagggtcataattggaagaatttggctgtgagtgtctgtgggtgtttacagtgcactatagggcagggcttctcttatttatagaatattttgagcaacaagcagcagaaggctgaaaagccactaaaatctcgatttatttttaacaaattccatttttctcctcatcccagaaggagaactgagttattaaaaaacagttaaaaaatacatcattgcagagcatgccatatctaattatggggttgccagcatcggcctgcagccacatttcaagggcttcgtaaatcaaccatccattcaatctgtgaacttatatgactcctgttctccatttagatgtagagcgaaattattggcaagtgggtgctgatcagaaaaagttcttccctgtctaaattaggagatgggagggataaatatagaatagtatacttatgttctcaaaaggagataaaatcattcttcattgtccattatacttagctgcacaaacatccatcccattgcactaaatagccactttagagttttcacacattgcaatggcagttctgtgccactcaaaggcgcagtattgtgatatctcgctgagcctaaacctgagtgattattgctcacgtagtcatgaagagacataaacccagtgcttttttgcctgtgttgtcgtagtgtactagagctacaaggtgggccttcagagagacactagttttaagtatatctcattgtaggtggggaagcagaggcctaggcaagggagtgacttgcctagggtcccattaagagtcatggcagaggtgggctggggcggcagtctctgtgcttctcttgacagtgccctgctgtgctcactggagctactgtattaaacagatacccttcaggggttcacagtcttagaagacacaggcacgaagatggccaaacaatcagcccatgcataagcagaccaagatatgtgtatataacagattagttgagtggtagagaaaatgagagtggggaattttggaatctatttggatagcaaagcaaaggtaacatcagttgctctctgacccacttgggaaaagcttatagagatgctatgaagttttctaatggaaaaaggtgcagtacatttgccatgtgttagtgggaaggtaagtatgatgcagtggtgggtggtaggaggcagtgaagataagtattgcaactttggaggagccctgggaatggattgttgaggtgatttcataggaatacgaaagggagcataggaccagggcacaggccagagacaggcaatcccaagttccctggagtaccctgcccttttctgggaaagcaagtgggtggcatgagtgctatgttcccaatgctctggccccacccctggtagaagaataataactgatcatggtgggttttttctgagcctctgtatctttgagtagcattctggtagccaatatcagtggactggtgccagcctgtgtggtgaacctctatctctttcttgccctgggctgcatgtcaggcacagtgcctaagccggagtgggctttggggagttacttctctttctgaggctggaaggggcagagggacgtagggaaaactttgctagggagggcaaactgtgaaagcctctggagaagtcacctgttgggataccaaaggccagcggttttagaggatgcgaagaggccgggcggggttggtctgggcctaaactaaggctgtagcggctagcatggagaggaacaagcgacggggagtgattacggatgaggaagacgtactaggatttggctacagacagacaaccaaccagagagtaaaagacagtgacatgctaggatgtgaaccacctactacagagaaggtcagaggtggggagggaggaatcagggctgtgggcagatccagcagctgggatccaaagctgaagcccttgggttattgaatccattctttctgagaagagatggttgatcttcctgcccagggagttcctagccagactggacagtggttctcaaacatggtgccaggtgttgtcagatagcaaacaattagtttgtacacagaatgtccccaaggtcacctacacatatttgtttttcctaatctttgatacctacagccacttacctgctttcgagttctcagagttgagaacatataaatttgcagtaacaagtgcacaggaaatacttggaaaatggctgatgagctttagtttggaaatttcatttttttcttggatctggattataatttcagtacaagctagcaatttttcttgttggtaaaatagtttctagttttaaaattatttctgtagttaataaagttaacactatttcatgatggaggctgccccagctctgaaccaattttcaaaaggcagattctcctctttctctctcttatttcttgctcttgaacatttcactgtgttctagcaacttttcctgtgtgtgactcggccaggagactgacttgagtaagatccaggtcaaggggttgtgtgggtgggtcggtggtaaggaggtgctgaagaacactaaaacctttgcctgagaggagtctgggaagtagcctgcgaactggaatgaccccaggcttcctgtcacggtcatagcccatggagttggcagacttgatcactctatattgtgtgcccccaggtaatggcattagtcatcgatactgtcttttttttttttttttctttgagagagagagtctcagtctgtcgcccaggctggagtgcagtggcgtgatctcagctcattgcagcctctgcctgctgggttcaagtgattctcctgcctcagtctcccaagtagctgggattacaggtacatgccaccacacccagctaatttttggatttttagtagagacggggttttgccatgttggccaggctggtctcgaactcctgacctcgggtgatctgctcacctcggcctcccaaagtgctgggattacaggcgtgatccactgcgcccggccaatactgtctttaaatcgtccagagtaagaaaatgttgatagcttgttgtcacagccctgtcattttacacattccctgaattattgtctggcaccagcaggtgttccagaaacacttttggttctttgagccattactggtcattcctgtcaccactgccaccaccagatgtggttctgagagcattaagtaaaagttttgaaggttgtgtatgttaagactggtgcaaagtccatcctccttccttcgggctgatcagccacaccctggctatcagcacttatttactcattttcaaagtgacagaatggtccagtgggcaggggcataaggggtcacttcctctaaccacccgccagtgcaggaggatcccatctgcgcagtggctgcccatgacaggcagttccctagccccagtcggacatctccgcaccaggcatcctgctcctgctttatggacatctttggctcttaaaaatcctcctttattctgaccgcagatctgccttttggcagtgtttccttagtgacctagttctgctttttgtggcaacacagaacaaaggtcggtaggcatggcacaattccagcttagaagtttgaaggtagtgctcatggacccacatcctttccctctccacccactctatctccctccacaaggtttatgttctccagtgccttcagccattctttctatggcatggcagtcagtattaatcccagtaaaggtaacatgtatccagagagtgcttgccatgggccaggcactgttctaagctccgtacgtgaattgtcttatttatgactcaaaatcaccatatgaggtgagccctgtcatcatcctcattttaccaatgaggcaactaaggaacgagggctcacatcttgtcccgagccatgcagtcaagcagcagagcagagatttggggctaggcagtgtgactccagagcccgtgctcttagttgtggtgcaagactatcttacagcctttcctgcatagtgccaaaaataagcccatggtgcactagacttgggctggccctgctttaacttattttgcaagaaatcattagacaggagccttagttgaaccattttctgtgaaaccttcagagtttgttttgacagaacagactgcagggcagaggcatctgcactgtccccaacaaatgggttcatcctgtagctctgccaggccccacagggttcataaaatggtagctttagatcaaggtgacaaatacagggctcttgatgttttttttttttttcctgaacatggtgcctgagcaataggtttcttgtttaaagtgcttagtcatggttttatggccagaaagtagaaggagagaggtacctaagaattgcaaaactgggtcatctcttcaagtgcctaatccaatattcagtctcagagaacaactccagcagttacgggggtggaaggatgtgatgaccacctaccatccaaaactgggatgtaggtgccaaatacacattctcctgaaatgatccctggtgcctctagccaggctcttccaggagtctagagaaagatggcccatgacttcatccagagtctttgcttcctgtgctctgggatgcctgggcttttctggccacagccatacactgacagggccagaagggctgagatgctgggattgaaccatctttctctttgtgagttgctttccagatagcacgcattccggtcactattttccagagatttaagcagcaaagtgagggaccctcgggcatcgactcagagacctggaggggagcagcttgaagcaatgtaaaaagcactggataaaatctggttctaccaaaaatagggctatgagagttacctcacctccctgaaaggtaatatctttatctgaaaaatggggatgataatactactaacctggaagattgacaggaggattagatgagattctgcatggacataacagtccttggcatgatgtctagcagtgaagaaacataaatatgagaataataacttccttcttcctccgctgtctattccttctcttattctagtcctgtctgctgttgggttttgtctgttgttttgggtaaatagctaacctctctgcctctttttgtctgtagaaatgctactggttctgaatgggtacttcgcgccccctataggacatcgtgggaatgtgtgtgggtgatctggatgtcacagtgacccagacgaggcttttactgggggaagaggggaaggcaggggtgctagatataatgcttggggaacaaaagattgcccaacatctgcatagctgcctaatgctcagtgcattcttgtgggcaaaaccctgcttaaaattatctgggcctagagtctgactccaattaacacataaacacaaataatttttgcatgtttttaatatatactgaattttctgcgaacacagctaccaagtatataagatttacctatttgttatgaataggtgcaagcatttcatatatctttcatgatgttttctggtgtagcggtgccccaatacttacatattgatttacatgttgtcttatttttaactatatttcctttcttctttgtattacagttagggcattatattgattatttttggaattataagtgttgtaaggttatattacttacagatttcaagagagctaaagacatatttaaaatatttttattgcatttttgacaatatgaaagagcaagagagagagagtgtgtgtgcgtgcatgcatgcacatgcttacaaattagctagaaaaatcctaagacagactttaaatgaaaagaaatggtttcatagctcctagaaatgtccttttacataaggatatgtagtagaagtccaaatttttaactgcattcattgtcagagaaatgaggtgttttgatgtttcccctgtcccttttagaaagtatatgatcctaaaagagcctgaaacagtttccattgtcatattttttcatttttgcaatctctatttttttcactcctcccacctgtgcatatatatatttaaaagcgtccccatatagacttttaaagaaagaaaagccagccaggctccccactctttactaagtttgttttgattgttttgtggcctctgcctgcacctcggcctgagtcagactgactctgggagctgtgggcaggtccaagggaaagtcaaggaggtaatgaggcttctcgtgggggcaacttgtaggccaagttgggtgggttgaagtcagtctaccagaagcttcctgcctcaagcctgggcctctacctgtcctgaaacctgagggctctccagttggaccacgagggtctgacatccaggaggatccccaggagagagcaaccgtcactagggaatatgctgcccagcactgactgtactgagcagcagtgttgtgtgcctgttgggttgatgccatggatagccaggcgttcagaactgaacacgacacctaaaaggcaaacacgaactgtgaatgtgccagtgtcagatgctgccttggtggtcatgtgtgggctggcagtaagcttttggtcccttaacactcgctgttggaaatttcccaaggctttcatctagggtagctggtgtgtgatttccctgtcctttgttactcctatctggaaactagttgaaatcttttctatgatattgatatagttacagaaaatctgaatacttactactaagttttatagttctgcttagttcaaagtaacacaacctcataagagaaagtttgaaacaggtagagaaattgaaagatgaaaatcactacccattatctcagcccacaaagatagctactatcagcattttggtttgtttcctttcagtcctttctgtgtttatgaaattttattatataaataattcatgtccaatatagaaaaagatggaaaattgagaaattataacgttaaaacaaaactgacccatctcaccagttggagatgtcttaatattctggtgaatttttttttgtcttttttctatagacacataagaagactgggaaatattgtgtatatacgtttgtaccctttttcaccaatgtatatcaatgtatatcagttcactaatgaatactaattaaatgaaaatttattaaatgtatatctatttatatctattgatatattaacagatgccagtgcatatctattaaaagagtactatgtaagagatgatgttcttaaacataaaatttaatttaggcatgaaattactttgtcaaaagatatatcagtttatattcagatatacagtgtactgacctgcccatttaccacatcttcactaatactggtattatctttaaatagaatctttgctaatatgagcagtgaaagtggcatattatctattaaattttgacggttatgagattgagcatgtttttgtatacttactggtctttgtgtttcatcttttggggtttcctattcatagtctctgcttagttttccactgaggtatttgcctttttattgatttataagagattttgttttgttttaactcagaaaaggtagtattgcttcagttgtcacagagctttggagtcagacagagctgggtttgaaccctggctttcctacttgtgagctgagggatttcaggcaatttatctgacccctctcacaattaattagttcttctttgagaactaaacgaaacaacactgactagcatgaaaaaaaagcctggtgtgtggtttctgccaatagtttttgtgttgttatttttgttgtgattcctgcactgagtattttctcagaaaaatgaccttgagctgtacgactcatgcctgttcagacccacagacacatgatactcactatatccaaagctcagaaaaatgaaactgaaatcactgaagtttgtgggttttttttttaaattcttcttgccagaaggagacaaatgaaggaaaaaaaacaagccgatttcattttcattaagaggaatttgtagagttatttctggggtcaggcaggatacattcagacgaacattttagatctagggctgggaagatcccgagactcgttatagattacatcatcttcctccaagtgcacttgccaggcaaatggacaagtgcattttagaaaggttttcagttgttcacgtttaaacagaaaggatcacctggctaacttttagttaacccattgaacagatgtgccattcccccagcccattggttattcatgtccttgttactggtttttgatatccttgccccgtaggtgggaggagggatgggtatgagcctgccctgccctctttctcctacttgggacagagctgttgcttttatttgctgagtcactgaagcaatagagcatgtgcagagtcccagcctggaggtgggcatatctgggttccagtccctgctctagcccttctcagctgtgtgatcttggacaagttgccatacctctctgagcctcagtgtcatcttctatgtgatgtcgatgcctcccccaaaaggtcgttacgaggaccaaaggagacacgtcagggcaggaaccatcctaggcacgtgtttgatgctcagtaaacgggacgtggtcagtgttcagagttgtgggggtggcaggtgactgctctgtttcacctccactcacagcaacagggcctgtggtgtcacctagacatctcataggcatcccacactgaacatgtcccaaaccagcagctcctccctggatgggtggatggtgtacagggacctcttcctccagctgtcacatggggcatgtacctggcaagtggctttgcagccctagctgcccccttggctgggggcctttgtgcagttcatggactgggagtcacccccatgtctagaccgtcaggaaacccattggcttttcctttagagcataccaagaatcaacttctcagaacatagcaagagttgactttttgtcaccctgccgtggccactcagactgactcctcttacacctcacatcccattgatcagcacagcccctggaaatatgtctagaatccagctgcttctcatcacccccacacctaatacagagggctgagtcatagcatctcttccccggactgttgtagccgtctcctaactcagcttcctgccctgcttttacacacacacacacacacacacacacatggtatcttctcaccactgcagccagacttaaaacctaagagggatcatgtcactccccattttactcagagtcaaggccaagatccttactggggtctgcaggcccccacacctggccctctgactgcacccctaccttccttagctgtctcctctccctagcatgccccaggtcgctggtcccctagcactgggcagctccctgcggccctgttcactagctgtcctctgcctggaacacatctgtcacctctcacctcctcctgtccagcctccttggggcctttctaactgcctccctcctgtggtctgcctcctccccatctctgactttcctcccgagcacttactgccatccagcacccgacataacttacttgtttcgtttgcttgccttcctcaccaggaggtgtgccagatgaggacaaggatttttatatccctacccccatctgcagcactgccatggagaacagtgcctggcacttggatgccctcagtaaatatttgttgagagactaataagtgatcgtgggccagcatgccaacagtgtcttcgttattacaaaattgtcccgaattgaaatttggctactacaagcagtttgtggtggaaatttactcaaattaccaattctttcactgaagaaattacctggcatatgtgggttctcaataaactgtgttggattgcctcaaggctttggggcagtggtagccgtctgaggcctccttgccagtcaaccaaaccctgtgctgggtgggacataagagatgcccccagcatccttagctgatgctactatgtcaccccagaatccctggggcagcccacccctcagcagcagctgtcaccctgctgggttccgcttttcctcctgtgggcttcgtctccctaaggaaatcattgtccttgctttctacatcttatctccctgagcagctccaaaattctgttattcatatcccactgacctttctcattgtcctagtccaagcttctcacaggaggagttgtctctctgttttatattaaaacaaagcggttggactcttaaaactctattcacttttcagattctttggagtcctcaatgcttcctgctatgaaatgctgcgctctggaatgccttccagacccacccccaggatacctgtagccttccctgcagccactctcctcaactccctcctcgttcccaggggtcaatgtcctggatctctccagctttaagttccttcatgtcctcttgccacccctgctctcaccatctctgagttcttgtatccccaggatttcaacctgagtttgcatctcctgacatcacttttcccagccttctcccttttcaaccagcacaaggccatccacttccatggccatagtggacgccactgagcatgctaggtgttttcttctattcaactcatgtggtctgcacaacaacccagtgcggggaatccacccctttcacagatgaggcatctctagctcctggaagtcacctaacttgcctaggacatgcagctagtaagtggcagggctgggattggaacccaagaggccccgccctgaccaccatcctgccctgcctctcctcgggcacccagaatcccctcactctattgtcaaaacccaccttgtcctgcctgtctggtacctaggggagaaccctcagcctcttcttctgctgccacttgcttcctcttctgccaggaaggtcccacgcctggccagcctgctctggagacacgcccactgcctggccttgccaggaggctctgatgctctgcaggcttcctgtcccacggatcccttcctgcctgtcctggggtcccaccaccccactttgtagttggccttgctctttattgtggtgaaaggtgcaggccattccatccaagatcctataatattccttttctctgctgttgaatgttcttcccattccccccacattctcaaagaaggcatgtggctttcttcactgcgtctcggcctgccctgagtccagcccctgctgcctggcccagcctgtcttgttggcatcccctaagccctagccagaaacacaagcacctttcaggtgctccatcctaactccaccctccctcacactggcctctctccctttgccaccagataacagcagtgcattcttttgtttcctttagaacaagatgcagatgttttccagaattttcttcaacttcaggcagtaagttttttggtgaaaggagtattactccctgagtctgtagaaccaggctctctcctcttattctgtagcaattaaagacaaagacaggcaagaaaacaatgaaaagaaacaggagccaggctgatgcaccttcatttagctggtccttgagcatgactcattgatccttcttgcttccatcagggattgcaccctgtgccctctttgaatgcaggggcatgtcaaggccaagggtcaggaagagagctttggcctcgccagcctggtccccagagtggaagtggcagggcaggaggggtgtggcagacagagcacatatcgcccccagccttgcccccagatgttgagtgctgggtgccggagtgcagaggggaacaaggcctggaccctgcctggggagaggcagcacctgggagatctttgtggcttcagatcccatgtggtcctccaggtaaagcagagcatctctggggtctaggctgggggaaaactcttgcaaaaaattcctggttctgggacagaatgcatggggtctgcgtgaggggcagaggacagtgccaggccagtgagcacgcactgggcaaaggaagtggccagagaccactcataagaaaaagtgggacatgaacctcagagcctgggctgctttcagaggagccaagagcctgggaaataagcatcttctggtgaggaaatcagcagggggaggggagggtcatacaggaggggacttttaatcctgaatggccttgcagggcatggttcccctagtgtgccccatggaacccttggctgttagatgtgaggtgataaatggtgtgtggatgcatacacttgggactcagactctgctgcccttagactttcaccctccacagggctgcgtttaaaggtccaagaagccctgcagaagaaaaacctaactattgaaccagcattccctatacgtatttggcccctgattttttcccccgaataacatcattacaatcctatgggattagtgttccatggcagaactttgggaagtgttttttgaagaatttgtaaatccctgcaccctctggactgtgcccatttcttagattgcatggaggctgtgctgtacagtggaaggagtatgggctttagatgggactggcctgtgtttaaatctgctttcccattatacaaaatctctgatcttgatcaagttacttactctctcaaacttagtttccttatctgtaagacaggggatgaaacattagctagttgtcttatgaggctgttgtgatggttaatgggaagataataatgacacttacagagggcttgttatgctccagacaccattctgagcactttatatatctcacttacttttcaccacaactgtgaggcaggtaatgttatccttatcctacaggtcaggtcaggagaccaatgacacatacaggctaaatgttgtgcccaacatcacacggctggtaaatgtgggacctaagatttgaaccctaggcactcatacatgatggggtcaggatttgaaacttgaccgtcatctcccatcagagaacatgctctgaatcagtatgttctaaagggtctagagcagtaaaagcactaattggtatcagttcccttttcagatggttcgtggatatgttagggggattgatggttcctgggactccaagtcattctgcagtcattaaaatcagccctgttgaaagagtaatctcctcgatctgcttgcccactcagatgctcccattgtgaccattttgtttgctctgctgcctcatcctgggccacttcaatttgggtggctgctcagcgttcaggtggagtcgggccactttccacagccatctcatctgtggcctgtgcctccacttccaggaccaagagtccccccaggatgcccagtgagttggtagcttgttctctttctacacctcagtgatggacttgacaaagggttaagaagacatcccttttatcattcagcaaactgagtgcctttactgagctagatgcatgccctgggggaactagcactgtttggtgacttagttagacctctgaatccctctaccaaccctcagtagctgtctgggagactgggattctgtggactctcctctatcaacgatattgggggtcttttccacaaagaccagcctggttttgattgacaaagtgcctcagatttacaaatcttaccccttgcaggatcctctcaactgatcaagccccatagctccaaatgccgtctccttgattgatgtttaatttggggatccacaagcatctagagctaccagttgaatttgggtacccaagggccacaaatgggcccccctcacaccctgacccctgacaaccagcacctttgagactgaagtaccactgcatatagtgctgtcctctgctcagggcattctccctaccagccaggccacccggcaaacccctgcaacacctcataagacctcttcgctggtctcatctccttttattaacacctcctcagcacccctccacacacacccaagcccacaagcaaatcattttttcatctgttttgctcttgtaccttacctatgctccactaatacaaaaaaagcacgccttcctcaagacacttgactgccacctgctggagagttgtcatcatggctcaacaaatatctgccacttctaaacccccaggcacctctggagtagggcagtgcattgcttgtacagctgtaaacatggcctgcctgttgaattggtcatgctgtcatgtacttattaaaacactcgtctttctaactggactgaggacatcttgaacgtaaggactgccgatttctgtcttcgtccccattgtggcttctgctaggggctagagaaatgcttattgaatgatccttgtgcaaacacctgttaccttaggttcagggcatctgctgtcattcagtgaaggtcttctaaatctgtctgttgcaaagcaaggctcgccacaggctgtcagagtaaccatggaggtcggacaggacttgcagtggggacagggccccatcagcctctcacctctgctcagaggcaccaccctctgaacagatcagagcataaacaggtcagagcaattcagcattcattccctctacagacatcagggcaggcaccatgtagtggagagtggggccaggggccatctgccatggctgtttgggctggggaaggagagcagtacttctggagcatgtgctgtgctcagggccagctccctgtaggtaggttgtgggaatgcagaggtggcaactcaagcacccctgctggggattcagagttttgtggagaagtagatcagtaagcacatggataccagatagggttgtcaaggatgttgattcactgttgtccctattttcctaagctcgccacatcatggaaggctgctacccaagtgacattcttgggcttcaccaagtgttttaacagagctccacccagctgtcacactaggggtaacacagtgggccagaaggagaggcaggccttccctggggtcccattttaaaaagggggaagtcctctgttcttttacaacacttgtttaccccaagccattcagcatagtattacttaggtcccatacagagaaccttccaacagatagctctccttgctcaggcctgtcctgatgaactccctgatattcttccaggtcttaaaagagtgagagctgagcatttccctctctgccctggctgccaggaagctcagagataacttgtttgctcagttcctgtagctttcctgacccaggacttctttttcttataaattctccttgttccttttccaggaatgcttgctttttatgttttgtttgtttatgttgcttttgtctctgtattatactttggggggtggtttttggaggcaggattggcagcagccatggtagttagaagcaccagcagtaaagctggacacacctgggtttcatccccacttgctagctgtgtcattttaagtaagataagttgcctcttcagttctcggttcctcaccttgaaaattgggataatgatcataatgaatggataggttattgtgaaaattaaacttgtttattgtaaatgcattgtttcctgttcctgctcttggatcaggcttgatctgtggctgtagaatcctagtcttaatttccttcttcctgcctgtgtctgtcagcatatgatgagttgtacaatagtagtgactaggggaccaaccatcccggtttgtctgggacggaggggtttcctgggatgcaggactttcagtgctgaatgggaaggtcccaggcaaatggatgagtcggtcaccctggtaataaacaacctcaacatctcagtggcttactgtagcaaaggtttatttcttcgttgtgctactgtccatccagggccttggctaaaggaggagcctctatcccaggaaattgacagtcatgggcacagacagaggaacacatgttaaaggtcctttagaaagttgtggctgtcacttctgccctcattcactggttggggccagtcacatggccaggcctgccaccaggctgtgcagaaccttcccactgggtgggacagctcagcctggaacactgatccactctgccaggctcacctttctcttcttttgcattttagggtgctggagcagggaccagggaaaggagagagtcacttggtctgaactgggggtcttggatgtgatcatcttcctgtagatggtcggtatgggtttcttaaggggcagggttcagcttcaccctgctctgctcagaggagcagctgtgtctcctttggacgccttctagtggttgatgccctcacctttctcagctgccaaggcctctctcgacagggcaggctgggctgtgacttctcttccaccctccttgctccttcctgtggagcccctgagatcctttccccatgctcctgggtggaatggagggtgccctctcacattcttccaaggcatcttgcgcaagtccctccatgccctgctttctctggcggtccagcatgcctccatctcacctttgggactctctagcttggaagtgggcacacctgcagcccctgactccaggaccacaggctaggctctccccaaagcatcctcatcacacaccatgtggatggccaggtcagggcggccgtcagagcccaccctcggcaaggataccctctcaaaggcacctctgttggctcaaatcccttttggaagtagcccagaaagaggctttcttttttcttatcttttgttgttttatttattgttcttgcatctaagaacaccttcttggtcagaaaacagttttccagaaataatgttaagtaagtgtcacaactggtttagctccctaacctggtctaagcatataagagaggcttttgaggctgggcgtggtggctcatgcccataatcccaatactttgggaggccgagatggagggattgcttgagtccaggagtctgggcagcatagtgagaccttgtctcttctaaaaataaaaaattagctacgtatggtggcacatgcctgtagtcccagctacttgggaggctgaggtgggaagatcacttgaggccaggagttctaggttgcagtgagctatgatcacaccactgcaccctaacctgggcaacagagtgagaccctgtctcaaaaaaaataaaaaaggctttttgatttttgttttgcagaagtaccaaaatctatattagcatttattatttttatttctataaagtaaatttgagtattgggaaaattgatcaaaatgagaaatttcatatggagtttagtacttgaaatttggatccttcatctaaatttcagggaagtcagggctgggcatggtggctcacacctgtaatctcagcattttgagaggccgagatgggcggattgcttgagcccaggactttgagaccagcctgggcaacaatgcaaagcctcctctctacaaaaaatataaaaacaagccagacatggtagtggtgcatacctgtagtcccagctacatgacaaactgaggcaggaggatagtttgagcccaggagatggagattgcagtgagccgagatcatgccattgcactccagcctgggcgacagagcaagactgtctcaaaaaataattaaataagtaagtaaatttcagggaactcagagaacgagaaaggacatgaaattgttcatttatttagcatttgttgagtaccacctggagtgaggcacgagatcaggcacaggagacgcctataaataaggccctacctgcctgaagcttatgggaggtggaggagacacgcctacaagcagagaatggtcacagggcgtgaaggagcctgggcaggagctgctgcaggagagccagggagagaggatacagctctgaaggcttctccaggaggtgtgcccacgggcacaggaaaggaaagcaggagtttatcaggtgactgggtggttgaaaggagccacacctgcaagaaacgtgggcccagcagaggcagggtggttttgggaactcttgtcttttagtctgtcggggggctttgggtagcagatgggagggttgggctgaagactaagcagtgtttcctgctgggtgggtttgaactttgtttggaagacttagggggaacagtgaagctattgcagtggtctgagcaagggggtatcccgcctctgaccacagtggagaggggatggggctggagacgacagcagactgaacagaggcagtgacaaggatctggagggaagtggctgggcccatcccttagagggctgtgtgggggctgtggggtgtgggaggaagagaggaaggaagcccagggtaggttctgggttgctaatttgggggctgggaggatagcgtgtgacctaaacagagaatcagatttagatggaattacctatattaagcctggggatttcatatctatttgctgctgctttaccagttgaggctcaagaatgagaagcacaaaatttctggtcacattatttgcatgtgcccagactggggttaacagaatcggacagtgagcgttcctgaatcagactgcaatggggaatgaatgccttgggaggctggaagcagttgtattcgcagatattcatttggagatctctatagcgatcgaggcaaagataccccaaagactgcaagaattagccagtggaatttgaaatgccaaaattttttttcagaaaggtcaggaaagccccgtttaaaatctaaattttgccatctcaaggcagtgcagggatggattaggaggatgtggggtgacccttttcttcctttcagagccagtttctgccagacacaggaatcctccacatgagtcatagggtggagaggagacccctcagtcctttcagtaaggtgggagggcagtaccgcccggtggctaccatgaaccctgtttcagaatttctttcttaacttcgtgtgtgcccaggtgcacttgagattcactgatgttttctttagaccgaggagctcgcttcagcagttagtttcaggtgttggctctgctggcattatgcttcggcttaatgttttctgaagacttgttttctgttgtttttcattgttcttgttgtctggcttcaggccactaccttcaacctagcaagagctgagtggtgccttcagcagtgaggtagcttctgaaggccaccactctcttgctgtgtgactttggctagtttctccacctctctgtgcctcagtctcttctgtaaaacggagaacacaggagtatctccctcatagagttactttcaggtttcaatgagttaatctacataaaacaataaggatagagcctgacacaaaatcacactcaacaagttttcacaattatgattacttgacccagtaggagaaataaaaaacacaactaacttccttctaaggacatgcccaagaatccagttttagtaactttgaaggcattgtttttcaccgaaaatatctcctgccagattttttcatgtgtttgcagcttagctttaacaaggagctgaaggacggccaggcagcaaggggtggtgagtgccggtagagtgtgacgagctcgcccagccttcctccctgtaattaggagtcatgaaccatctacaccatctcccttagctaataagagatttttacatttacttacctcaaagtgacctgtctgggttttcttttcttgtggcccccactgtaggtttttggaagaagctgaccgcctgaaaagaaattataaaacatgaaaatcgctttgaggtgaccaagtccagaggcccctaactcctcccaagctggatctggggtgtaagaactgtgacttcaggtaacaaagtagtatcccctccctgccccctgtgaactcatgattcttggtagcttgcatggcagttcttcctttaggaagtgtagtttcttccaggaactctgaaacttggggtattctacctcatgcggttgtttggctggtcaaaaaagggagtgggggattctggaggtacttcatgtctgctgcatggcccaagggggccagggctccataaatcaccaagaccctgagggcagggctctgtactcattcctggccctgcttctgtaaatgttaatgacaaaataacaatgtcacccacccaacagggtctttaatatgattaaataatcatgaaatacttcttgaaggataaatcagagagaatagctaggaaatttccaaaaataaagagcagtaggagagtatttgttctgctagctattaaaatgtattctaaagcacagttgtaaaaacagtatagtactgtgatggaaataactagatcagaggaacagagtagagagtccagaaataggtgataaatcaataaaggtgtatttcaagttagtggcaatgggatgcatggactagcaaatggtgttagaaaaaatctcctatccattagagggaaataagaaattcctaagcttaggtagtatatcaaaataatttccaaatagcattaaattaaaaaaatcattaaaatcttagaaaaaagaatatttatattattttgggtaagaaaagacttaaaacatgtcacttttggtcccacatacaaatatcgtaaacaaagttaaaaagcaaaagggtgggaaaagtgtttacaacatcaatgatgaacaaagaattaatattcttagtatacaaatttattcgttcattcaatatttattgagcacttagtatgtactagaaagtattctgggcactaagggcacaagcagtaaataatgttcctgttctcctggtacttagaccctgatggagaggactgccagtgactatggtagattattgtaggtcacattttgataagggctaaggacaaaacattacgtaggtggctgggctagggaggcttggcagggtttgcattatgtggatattcaagggggcttcactgatggaatgacatgtgaagaaaaagggaaagtcattgaatgtcgagctgatagcacatttgctgtttttggaatgtcgagctcataggatttgctgatggattgaatgcgggttgtgaaagaaaggagtcagggtggcttctaggtttggggcctggcaaccagaaggattgacataggaatgactgagaggcttggcttggagatagagttttggttatggatgtttcagtttaacatctctcttgtatattcaagtgaggacgtcagggaggtggtcggccataaatatctgtaattcagggtgacatctaggctggagatataaatttgggaattgttgcagtgttgatagtatttgaaagaatgacactagctagagcccctggagagtgtgtgtagatacagaagagggcccaggacatccatgggaccctcccttagagttgagggagatggagccagctaaagagagcaaaaaggagtgaccactgaaatggaaggagtcccgtgagaagggggatctcccaagccaagagacagtgagaagggcgaggtcagctctcctctggatgtgctgatgggcaaggagagaactggccattggatctagcagtgaggaggtcactggtcaacccaacaagggctgttttatgggaatgatggggagagaatctgtttggagttggattattgagaataagaggaaaaaaactggagacagagaaatgggacaatagctggaggaggatggtattcaagtaagtttatttttcccaagatgggagttacataactcttgttttcacccaagtggaaatgattcagtagcgtggggagagtggatggtgcaggattgggctggggtgagggttctgaaatggtggtctcgaggaggtgggagaggtagaatccaggcatgagctggggaagggatcctaagtaggagcatctaaggaggtggtaggtgtgcacctgcctcttttctcagttcactaagaagcagagtcctcagcggagaatggagactaaggagacgatggaagtttgaggagagagggcaaagtatgaagtccttcatagcagaatgagaaaataaatggccaggggaatgaaggattgctgggcggcatgcaggcctctaaggggtatgtttctccagccatgtcctgttacacaggtgaacacggggtaggaggccattgtggtagaaaaacaggacatgagcagacacaacgtaagacagagaaacgcctgtaaagagaaaaagcaacatcagtaatagctgaagaatacaagtaaaaacaatgaggttttctttttttctctttagactggcaagagctcttgttggggatagaaattattgtcgcttttctggagcacagtgttacagtatgttccagaatacaacgtgtgtcccgttttgacctgtcagtcccacctttagaaatttattctaagaaataattgctcaaatgcaaggaaatatatgcacaaagatgttcaccccagcagtgcttatcaaagtgaaaaaatggcagtcatctaaacaggaggcagctggttcacttatctgtcggcctaacagtgatagtgggaaacagtagctcacactcaccctcctgttttgcagatgagggaagttgggtccagagaggggtagtgacagctccagtcctactccacggagctcagaccccctggctgtaggcaggcaccctgcccaacctcttcaactgggcttggagtcagagtcccttgcaaggcacttgtcaagcccttttcaagggccggtttgcttaatgcttttaaaatacgagttctcaaaatgttttgcaaatttgtttacaatgtcttcatttcatctcatggctttccttgcaaaggatgctgacagtggggggaaaacaggccgactgcctggccgtgatagaggggaccatattttcctgattcccaagtaagacttacagtggaagaaaggatattttctgctttcttacagtgtttacaaaagtcataacaggatgtgaggactatctggctgcaacatctgtcaccccattggtcgccagagttgattgggctgatctggctggttaggcaggtgtcccattcctccctcaccactccatgtgcgtccctcccaaagctgtatgctcagaaaggatgaccatccccgatagaggaggactggtctttggtcaagggtatatgagtagctgcaatcttctgctagggacccccaaacaagctctcaaaagtcataacaggagtacaaagataataaggaacttgcatttatttgtttccttgatcatatgtttattgattagaagaaaataaaattagcagccagccgtggtggctcacacttgaaatctcagcactttgggaggctgagacgggcagatctcttgaggtccagagttcaagaccagcctggccaacatggtgaaaccccatctctactaaaaatacaaatattagccaggtgtggtggtgtatgcctttagtcccagcttcccagcgttttggatggctgaggcacgagagtcacttgaacctgggaggtggaggtggtagtgagctgagattgcaccactgcactccagcctgggtgacagagtgagactttgtctcaaaacaaataaaaaataaaaataaaataaaattagctttgtgtgtggagaaaagggaggaaaaataattagcattgtcagagaacatctgggttatttggtcccctccgtgggaactgccctgggttttcacttctagagtttctggttctggtttaatttttccacgccacagcacagggaccgagaagctgctcagcttctctaggcttttatgtcttcaccagaaaaatgagcgggtgggcttaaatttcctacaaaaactcttaaaataaatatgatgctctttccattctatcacatgcctgttctgggtccgggggtgtgagagatgcattagtgctgctgtaaaccagccccgggtctccccccccggccccccaccaccaaacccccaagcaccaacctgggttctccaccacttttgagagctcatcgaaataaacacacctttgtgcctcttgtaacaattccagatcatccaatggcagaccagagaatggacatttcttcaaccatcagtgatttcatgtccccgggccccaccgacctgctttccagctctcttggtaccagtggtgtggattgcaaccgcaaacggaaaggcagctccactgactaccagtaaggcctttggggcatgtcttcctcttgttaaacttggtgtcagttctcgggcatggaacatctagcagccagctactgtttcatcctggaaaaggggatgggaataaaaaacccaactctaggtggcgacacagttggtttttggctttaccttcccctagtttgtaagcaagaaggagccttcagcagtgctgaggcatttaacttccacttcctgtccccaaaatgttctacacccagagaaaaagaacagccttaaggccaagttctgtcttttacccctttcttcgtcttctttctttgctcctttgagcaagagggttaagtctatgggtgtcatctcagggggttcaaagagagctttgcctgagggcctctctgaggaagacagcaagtgtcaggtgcttaatgaatgtttatggaaggaatgagtggaggtcctctctgaaaacaatttaggaacattgatgttgtccttaaacattatttaaattagtatgaacttgttatattaaatagtatttttgtttatttttagacttgttgacttttcgtttgagtaagtaaattttcacacttacagtcatcccttctatatatgtacaaacacctagggaataaggcagtgtagaatattcaaaggcacattttgttttgccgaagcacctgcgtggaatcttacccaaatgtccatttaagaggttttcttttgtttaatgagggaaaatctccgaggaggtataccccctacagcagatgtcctttctgctgaagttcacaggtcgaatttggggagcacaatggctggaggtcagatgcccactaggagatgctatgattaatatgtaagttatcccagatgattaagacagccaacacccaggggctggagagtgggtatgagggctgtgagggcgttcttccatagcagtaactccccagcagaaagactgcgagatgttggccacaaaccctttgtcttgagcaagcgctaagggagccactgatgtgttctaaggcctctgtcatctggacctgtgggttccagcctggtcaccacccaagatttcccttgtggactctggtttgctaatcttctgtaattcatggagactcaattaattaagcaaccttaatccctttcactatcattttaatgtaactgaagtcatctgtgactgtcaggcagagctttttctcacctgagattatcacctggcctcaaggaacagatagaattctagacaaaagggagaggggagtttttgtccttccgtgcggcctgcgtgatctctgaactttagaactagctggggaaactctctgcctgtgaggaaccccagggcgtctaattgggaacactgttctagaatgcccatgatatgatccagtgctcctagaaacagctatttttgcccttgggattacattgtttgaagggccatgctctctcctttcctgtgggataaaggaaaaaggagagaggcccagctggcagtccatgccctcctgataaatgtatggattggagaaggcggtgagggggatttggaactccttcctctggggatttcagtctgttttcttctactgaaccacaggatgcaacgaaacttggttttctgaagtctgtgaaagggagggagatccttgctgtgaccccaggacttctgtggccctcagccccactacgcccctccatcccaattcctaaaatctaggggttcccacctacctgagaagcagaatatttggcagtagtgcctttgaaaagctgcctggggctctgctcagtactttgttggtactttaattccaccctcctcacttcgtcccttccctgccaaatagatatgtatgcacatttatctttgatgctcaatatgttttgcaaacagaataagcttcatttatccagaatgatggggggggagaatgagaggttatatagatatttcaatcctatggttaactaagcatttttataaacactacatattcccaattttcaaacaatcagaatatggtaaaatatatgttaacacacaaactcttttgagatgataacttttgtttgataacctgagaagctggtccaggttttatagtaagttcaagttaattttcatttgttttacccttattatacatcattaattgatactgtggctgttcgaactttatgattgtttggtttctggataaatgagagccttctgtcttatgataagaagctcttctgtatgtctttattaacatgcagtcacattctcttttgttttttcagagaaagcatggacacagacaaagatgaccctcatggaaggtaccatgaacctagtaatttgaacttcagcatccttatagccattttctttgcactgttacacattctgttacttggggcagcacccatgtcctcaactggagatgagcaaggaggccgtgagcctgtgggcgctcactgtgtccctccaacccccagtccccttgtgtgtctgcagagagatgacaggatcaggcagaagaaaacagcaatgtgtaactttgccattcatctccagagaattatgtttttatcttttgctttttcctccccccaggttagaatatacagaacaccaaggaaggataaaaaatgcaaggtaagcttggaccttattttgtctacaaagcatcctagttctggttgcttagagagcagctgaggaggctctgcatgtttggtcctgtctaagagttctgttgggcactgtcacctccttagggaataggcaggtagtgggccttggccgaggtggccttctgccctccatgctctccatactggctggcctttactctttgctgtctaagcacctttaacctgaagtggatttgaaggtagcagaaatcaatcaaggctcaagtttttccccagtcttcagcagagaacgtcttcctgactggagcgccctccgcaggagacatggctcagtgatttggttcctgggctgggacttgcctctgtcaggggcccctattgcactgcgagttgcaactgaatgcaccacatggggcatgctcggtgtctcgagtagattctctgcctgggtctgtcctgcctccagccacacttgctgacctcttcccattgcgtcctcagttcttctgccgttagtaccaggctgtgttctgaggctgcgtcatgacagactgatacagggggctgcagaaattggctgccctaaggcttcaagctcttccctcggaggccagccttagcaggagctcccatggctctgtatctgcggcagctgcagcaaactacatttccatcgttgctgcacctccttaggaggaccatcaccaatggcaggtgcacatcagtcagtgtcaccctgcctcagcgggaggagtgtgacattcctcagaggaggctcctggggacagatgtagcatctgctgcacctaggtggggacctagttttgatccaaggatgacggcgttggttactgggtgccctagtcagtgaggctgtgactggaaagaattggtgccctgcccaggtcacatggccacacagcgggctcctcacagacctcagggacagcccacggggctctggatgctctgtgctatgaagccaccacctcccttctctttcctttcacccccatttcaaaatccaatttgacaaaggctgagaggaaaagaaacgaggagaaatgaacaattcagtttactctgaagagacaatttttgtagcttttctcctgaattctaaagatgaggtaaacataaaaaaattaatactgacctggcagtgagaccattttcttggagactttagttgaaaagtctaattttaaacattctgcaaattctaaatttgccttgtcagatgaacattgaaaacagttacaactcatttatttttgtcatcttttcttgatgcttggttacattttataagaaatcgtttttcatattgttgttcagggaagctcacagtcagattgaaaagcggcgtcgggataaaatgaacagttttatagatgaattggcttctttggtaccaacatgcaacgcaatgtccaggaaattagataaacttactgtgctaaggatggctgttcagcacatgaaaacattaagaggtgagaccctgggctctattgtcctttatgtccttgcccacaaatgttaccacccttgcctagaatgttcctatccctaaggcagatgtttattacttgcaattatgtagccttcagtagtatgcctttactcttcagcaacagccgtgatgccaaatgaagtgattattgagcttatgtgggttttgacatgcaattttgcagtcacacattctcagagcatagaaactgtgctttgcacgtctctgtatatgcatgtaatcaggctatgtgcctatcagagatgatactgctctgatgtctcacatcttgcctatgtttgtgcctggatcccatccttacaattataacacgcagaaatgtaggtgcacacagtgacacagaaaagtcagttcaaagatgaaaattcatcatggttcctttgaaaagtgagtcatgggttgtgggttctcgcgacattttgttgtcaggaatgaacactgaagatattttcatcttcctggaattttcccgaaccagatccactctttgtgagggaggcagtattttccttcttttctgagtgtggggagggtgagaaaacataggcagaaaagtggaagtgacttatccaaaccacaagagaaatctgaaatatatcaggcattttagtgaatgctgttcctggaattttccatagctagtcttggacttttggaggaaattggaaagtgggcgctcagtcagatctctgacctgcgtggtagaagaattgcgtctttttatatttgcacaaggccaccagaaataagaagtagctggttttgtctgactttagatcattacccaaaaatataaatgttgtatcctgtgctggaagaatggcatttaaaaattcatattagcaaagataacatgggttaaattattataaactaatttctattaaattggaaaaaagtggcaaatctcaagttacagtaaagagcagggatagggatcaataggatggttgcaacacgtcctgtctccttccctccccatggtactttgaattgttacagatccatttccttttattccttcactattctactcgctattctacagactccaaatcatttactgctggcatttttctctgttaagtgattgttctcctgaaaaatgccagattgacagccttttaaacctaagtcttgtcccctttcagtcctgggagtgcgagctgcattgactgaagcaatgcattcctccacattgccacgctcgtttaactcacccctgatgaagagtaactcacattaaatgccttccacaatatatttactcagggcctggaagactgaatggtttcccaagaacatttagagtggtgatttgaaggactaccagacaacccatttaatacagatcttaggaggagggaactctctgaggagcctctaccagtttacttccagagctgccttctttcttagaagcagattgttaaacttccttctattatctcttggttttccctgtaatgagaaaaacaggcttgttaggtctcctgtgggtaacagtgttctctcttccatggaattctctttggcttacaggattctgtccaaagccagatctaggctcatctcagttaaggcctaaacaataaaatttaaataccaggtcatagagactaggccacttacagaaggtttgaggcagcaagttagaatgagacattttctgaatatcaagtataccaattctttctctttttgcccctaaggtgccaccaatccatacacagaagcaaactacaaaccaacttttctatcagacgatgaattgaaacacctcattctcagggtatgttcaattatgggattgttttacaacgtttgtttttataaattttcaagtaagtaccagcatgtgggaatttgatgtttcaacactgagcttttttttttaggcctgcttcctctctcaggtccctccctttatcttattgtttggacaggcttcacatttcttccacaaaaccattctcctcctcttttaacctcgtctagacaaaaatggaaggtctatgccaccgcaatttaaaatcagaagagtcaggatttgttaaaaataagggggatttgagaatcacatttctgcatgaagattttaggaagggactgaaaccaacaacaattgagaatttctcttcacctgatttaaccactagcacaaaaaagtccacctaaatctttacaccaaaatctcatcaaaataacaaaactgtggctcacgcctataatcccagcactttgagaggccaagacgggcagatcacctgaggtcgagtttgagaccagcatggccaacatgttgaaaccctgtctctattaaatatataaaaattagctgggtgtggtggcagatgccttcttgggaggctgagacatgagaattgcttgaacctgggaggtggaggttgcagtaagctgagatcactccactgcactccagcttgggcaacagagtgagactctgtctcaaaaaacaaacaaacttacaaagactagtggtccaaaaaagaaaaataaatgcaagagatatatgctttcacctgcttgacttgagtgctctctctgtcttgctaaatctctgctgggagatggttgaggtggcactatgggaacctgttgtcttccatgaagaattaggtcggcacaaagctctaagttgtgttactaggtaaagtgagattaacttgggaattgaagggaaagaaactggattcagaaacgtgttcttgtagattgtaaacagatgaatagaaaaacgtaactaaaaggaaggatacccgcttccacctcccacaaagtcagggctgaccttacctgcacagccaacagaatcttcctacccatctttgagcagaagtttgcaaagctctagagtagagggtagtccatctggaattttgcatcatcactatccattttcagctctctataagcctggcctgtctgctcactccagcattctctatttatctcctcatgacgtgctatctcaaattggaaagcattcacctgcaaggaccagaagacctgatgaataaatagagtttaatttctcaagtataactggtctggagtaggttatgttgggttgctgcagtggttcaatgaggtcaataggaaccaggttctttgtctttgcactcagccacaccaagctagcatgctagcttgtttccttaatgtagccaggtacctttgccaggtctaagtagccagacccactgtaaaaacaggggtaaatgaagctctagtctggctgtcctttttatcaagaaaggatacaccttcctgaaaactcaacagtggacttcagcttattcaaaagtgtgtcacttggtcacgcctagctgcagggcagggtgcagaaacaagtgtttatagattttccagcctccctggtggagacaggcaagagagaaggggcctgggaatggtgttgggaattggcttccccaacagtgtttgccacacacactttccagagccacatgcatttgctcgattccttccagaagtgactcccacaacccaatatagtgcttcaactgtggtctgattggcctgaggttgaatgggactagtgccttccttgccaaaaaagccatctgattagtactgtatcatttggggcagctgcagtactgcctcctcccccttctctcctgaatatgaattattgttaggtcaggttttttacatcttgtataggtgcttttttgaacttaagataggacttctctttcatttctgtcaaaacctgtttgttgaatggccccacagtccagcttgtcattagtgacccttggaatctttgtgtgacttgtagatccaatacatgcctctgtgcctttcatccttgtttattcataaattcaacaaacatttttgtttacttactagatgcatggcattgttctaggaacatccaaatcaatgataaacactttagggtgggaccaggctcccgatcaagtgagtgatagtcttttggctaccactctcaggacacagttattcaaacacccaactttgcccacctctccatccttttcgtaaagatgtccgtgttctcagagaggatttgctgaggttaaaatatgaccgatgcctgtagcatctcgagagctgccgtcggtgccagcttcatgggcatgtgacctctgcagtttcacaaggccccatgcttggtttaatgccctgtcaccatcttgaaaacgtaatttttgaacaaggatccctgcattttcattttgtactgggccccacaaattatgtaactggtcctgattcccatactggtaacagatctgcagctgtagatgtgataggcctgcctctatgcctttcattcttgcgtattcatgaattcaacaaacccttttgtgtacttactagaggcttggcattgttctaggaacatccaaatcaatgacattttgggctggggtacaggcttgattattttaagaaaaagaatctatgtctttatttcatatatatatatatatatatatatatatatatatatatatgtaaaataattatcaagcagagtcctgtggatggacaaatttaaaaataaataaaacaagctccttttgcagtggcacgtgcttaatcgttttcttgttgctgcttttcttaataattttctatcagatacccatacttaccagggtatggaacaaggattatcatgctatctcagctaaatacttcatgttgggcttgtctcttctactcccttgtttatgcagcactcaagagtgatctctcttgcccgatgaaggttttgtcacctctctagcacgtgtcagtggctgtgaaatactgtccagtcccttatcacttccagggtcccagttccagggacttgcttccacagaaagccaggtctactcagatgatgttcagacagtttggccgcaggagctggacttctgcttttcctcagcaatgcaaaatggacaaactgctttctttactaagtgctttcaaaatatctttaataaagtgtatgtcagggatcagtcaactgtatcagtttacaatgtctacgttagtctacttccccatgttttgaaaactaggcagaccgtaccaaggcctctgtgtcttttattaaccagcaccatcttcccaagagtgaccctgccactggctggcccctgtggctctgtggtgctggtagtgttctcacagcttctgctccttagctgtccttcgggcccggctccttcacagatggtctgctggccagggtgctatggagttggaatgtccagagcctcccctcgctgatgcattcactgctttggaacctgctggctttcctctggagtactgaaatagctttacctgtgttgtcggttcaggcctgaccctgcccagcattacctccagggtgtcacagttcccttctgtccaggtacctttcaagccacattgccacatcaatgaaaagcctcaaaaacacttccatgagatacaagattatctgcaaggcaaacgaggaagtttttaataccctatttgttgacagaatgaggcttccagcagatggtgcttggaaagttacttccccctcactgtcatcccttgcccctgggccagcttagggacctaacttaggaaaggatcctccccagcttccttctggctgagtagcctgccagggtcttaagcaacagtgattctgttcccctctcactcatttcttctgtcccagcacaagtacatgcaccattcttttaccttctggcacattaattcatttcctagttctttgaattaaaccacatcatgaaggcccttttgtggaaaaagagaacagtttctctgtatttttccaaagagcagattaaggaccagtgaataaggtgagaaactagtccactgtgtattagaacgagggagggctgagtcataagagcaagggcatgacagagtggggcacaccctccttgtcaccggaagaccccagcaggagttgagtggttgtatgtctggaaggcagtgggtgggattcacacagcccaagctctcaggcactatagcttgggtatttacctgcttcagtctctttaccaaatgttgtcctatcttaatggctggctttattggaacatttagattttttcctgtatttaaactgaagaaggggtaagaagaatctaagcggggagttttgcttttctgaatgcaaatagtccggccctggatggagggataacatttgagagtagtagttctcagccctatgtacattagaatcacattaacgtggaagtgggatgggtttaaaaataccccagtgatcagccccatgccagaccatcagcataaaaacaaaaacaaaaaacactgctccgaatgttgagaaccactgttttagagagctccctgtacgtggaggttttcaagttgaaggcagatgatggctgagatgttggagaggggattcttgaagagtccttccaaatctcagattctctgactctccatagagttgttattattagagcaatgaaatatgattctctggaccatgataccttcaaaagaacacgtgcaagctgaattctgctttgaaatataacttactttaattggactttcttcctataataattagatgatatgcagaaacacacacacacacacacacacacacacacacacacacaatcttacagttcttcagagacgtttgttttcagcatcctgcactcaggatatcactgaaactgttagtgttcctgtgctttggatgcttagaaagcacatcctctatttgttatcagggtgattacaaattatgtttcctacagtatgagaaattgattatccatttctcctgattaggcagcagatggatttttgtttgtcgtaggatgtgaccgagggaagatactctttgtctcagagtctgtcttcaagatcctcaactacagccaggtattgttcatgctcctgttgatggtgggcagcctcacagcagtcagaagtgtcactcaattttgtcagaataattatagtatacaagtcacatgtgaacttcttccagaaaattcttaacttcttaacagataaattaatttagacttagaacaatcttgtaatatgttccgtattccccccattgaaagatctgactctgatctgatcgatagcattatggctttcttctattgctgcaaaataaatatcccacaatatgtggcaaggacagagggtaagaggctatctgacaagggagaaaggtaggcaggttaacacaataccagagaatacgtcacttggaaatccactccatactgtgtttgcagtgctgtgtcacttcttagctctattgaacctcagtttactctaaaaattaatgataacttataggatcaaataagagtaacatttataaacgcttctagaacagaacttttcacctattatgtcccccagagtttttattcatttattcattcactcacacactggtatttgcatggaagcttggtaggcagaagacttgaagaatcaaaatgacatttatgtaaattagaattaatgtaaatttaatttttccaaagatttctgctctttttagtctcagagcaaagttatggaggaagttgctgttatctctgttaatagacaaggtgactgaagcatatgatatgcgtgacttgcttgagaacagagaggctgaacagcagagctggaatcagagcccacccctatcttctgccttctgaggtcttacaggggaattccaagattgttgccttagaagagcataaactgtttatataattgagggttttcccgtcatgttatcaaaaccaacctccagatgcctccttcctggtgtcaggcaaagtggttggacatatgtacaggttcacataggaaaagtttgaggtctcatgcacaaaaacacaaaggcaacatgcagactgtgcatgcttacttgttgcataattgattttctgcatgcaattgacttgtcatgtttaacatttcatctccccagaatgatctgattggtcagagtttgtttgactacctgcatcctaaagatattgccaaagtcaaggagcagctctcctcctctgacaccgcaccccgggagcggctcatagatgcaaaaagtgagtaccagagaggcctcgcatttcctcagcagcccactcacaggcagccaaccctgagtgagcagagggcgggtgtgtgtgatgggctcagcctttccagtcctacttctctgtcctctttctggggcaccagagctatctttggctaaatggaattatttatgttctttggtcttttacataaaaagaagaaaaaaatctcaatgtccaaatttattgaaaagaagagctatttagactggattctttctgatttttagacttttcttttttctttcagaatctagaaaatcccagttgtatgctcctgagtttaaagggctaagtttgatttgttctcccagaacaaatgggctctatttacctgaattgcacacaggcagcctcataaaagtaagaaaacgtcaactataaatatggtgtttcttcaaccaaagtgttcctccttaggttggctcccccacctggctttcttcttttgcagtagtggaaccaccatccacatcgctccctctgcccccagcttcctgctactgcacacacttctgtgcaaggccccagtagctgtcatctactttagtcctgtgggaggctgtacactcctacagttaagaatgagagaatgaggactctggctgggcgcagtggctcacatctgtaatcccagcacttcgggaggctgaggcaggtggatctcttgaggtcaggggtttgcaaccaacctggccaacatggcaaaaccccgtctctactaataatacaaaaattagacaggtgtggtggtgcgtgcctgtaatccaagctacttgggaggctgaggcaggagagtttcttgaatccaggaggtgggggttgcagtaagctgagattgtaccactgactgcactccagcctgggtaacagagcaagactctgtctcagaaaaaaaaaaaaaaaaaaaaagaatgagaacacaagggagattactgggctcattccggctccaccattcactagctgtgtgaccttgagcaagttacttaacctctctctgtctcagttttctcatttatggaagagtacctatttctttgggttgttgtgaggattgaaagtgttaatgtatataaagcaggcagaacagttcctagcacatagtaagaacagtatcagtgtggcctaatgtcttgctcccaagctgtccacgttaatccctggaaaaaaataccaccagataatctccttcaagtcatctctttcattacagcacaccgcttgttcctaaaagtaaaatgcagactttggtatctgttgttctttatagtctagccttggcttttttaagtgaccttaggagaaaaatatgaatggcatttgggccttgcctttgaggctcttagcatatagtcagagaaatgagacagacagcaccctgcatagtaataggtacagccatagaaatagtgccaggcatagagaacggatgattaattctcatgtgggcgcaaggacaggcatcactgagtagatgacaaccgaggtgggtttgaaaagatgaattaatgtttgccaggtaatgaagggaggaacaaagaggaaacaatctgtgcacaggtgcaggggtgtggagccacatggcttgcttggtgctattggacaaaacgtgcacggaggggaagggctgaaccatgaagaccatttgttctgtggggacacagtgaagagctctgagttgggtggggcaggctcggattggcattctaggggagatcgcagagctggcaatgtgggaggtagatgggatgggaggaagcccagaaggagccctgggcagtggccattcctcggcacacttgctcgtgtgatggccatgggtgtgttttccctcggcttctgtactgacacctagccagtgtttggtaaggaggtgtgctcctcagaatcacctgggagcttttcaacatagtcatgctccacccccagagattctaatttggtttttccagacagcacagtccaataaaaacataatgcaaaccacaaacatgagccacatatataatttcatattttctggtagccagactttaaaaaataaaaataaatgtaaaattaactccaaaatatttcagcatgtaataattataaacaactaataagttcgttcacattcttttatttttctatactgtctttgaaatcctgtgtgtatttaacacttacagcacatttcaattcagaaaagccacatttcaagtgctcagtacctgcatgcagctagtggctaatgcattggacagcacagatctagaatggggtccaggaatctgtaggttgatcatgcatccagggtattctggcctacaagccaggttgagaacttaaggcagtccggctcccaccttgccttcccaatatccatatcctacccatccttcagtgccagcccaagttccttctcctctgggaagcacaggttgtctttgccatttatttggcactaatcatacatcaccctgtcctattattaatcttttcttggtgcacctccatttgccctttgttagccataagcgtctattgggcaagaaccccatactatatttcttttcatccccagagtacctaatccatttatttagtagcacactctgtgatttataaacatttccagactgacaacacacctgtccatgctgcatctgttaaagcctaaacttgggagatatttatctcatgtcatcattataaaacagtgaggcaggcaagaaaaggctttgctcaaggtcacactccccctcctgacagacaacactgctctcagtttatcacattttgtgtattgatttgcagctggacttccagttaaaacagatataacccctgggccatctcgattatgttctggagcacgacgttctttcttctgtaggatgaagtgtaacaggccttcagtaaaggttgaagacaaggacttcccctctacctgctcaaagaaaaaaggtaacaatttaacagtccattaaaaccctgtgacaggtgaagcatgctttctgcagcggagctctcagctgggcgttggttccatggtttctggctggccagagtggcaggtcccaggactgcagacaggaccctgcagtcctccctatgtgtagggcagttgggagcagaggagagagctgaaaagcctgatggcagagatttgtggagaggcctcctctgtttaaattgtgtttcttttaacatgattgaggaagaatactctcagccacaatcctaactgccttatgaacagccaccagtccaccaaaattactctgagctcaccagtgaccttgatgttgttaaatgcgatgaacatttttcctttgtcttccttcttgaagtgttctcttctcctggattccatgaaaccacattcttcttcctcctccccgaccccctgctgctacaggctctcttgctggcccctttgctggctgcccctctctgtcctgggctgcatctctgtctgcagtctctctctgttggtcatgtcatctactccctcagctttaaatgccaacaacttccacattcatatttccagcctagacttgtcttttgaactccagattcataaatatactgcttactaaatcaacctgctttggatatctcaggggagtctccaacaggatacgtgccgaagtaatcacctgagcctctcctccagcataaatggcactgccattcagctggctgctcatgctagaagccggggaggtgccctcacttctgcttcaccaccccactcttcaatcccgttagttatgaagtcctgccacaatgagtcccatctgcaaaagttctctgaaatgtttgtccctttccatgctgcctactttcactcagctccaggctgcccccaactctcaccaggtctcataaagtgtagacccacatgctccccacccccaacacagcagccaggatgatctttttatcagtccccttttaaaaacccttcagtgttccctattgttcttgaagaaaagctcaaaatatttaacgtgaccatgcagcccccgaccctgccactaagcacatgtgagccatgttgacttcctttgatgcctcaagccccttctgggcaatgcttctgcacatgctgtcgcttcctggttggaatttcttccctctccccatgaactcccttcacatggctctctccaacctcagactgccttatgtcttatagcaccctactggtttgctttctagtgctttcttatacttgctgttatatagttatttgtgcgattatttgtttaaagtctgtctcccccactaggctgtaaactccacaagggcatgtctgatttgtttttcactctattccagtaaccagcacagactccacgcttggcagacactccatagtggtttgcttgttggtgaagtctataggtgctccacatttaatgtgtcccaaatcgaactatcttttttctctctctctcttctagtctgttttctttcttctctgagtcagtgaatgacaccagcaaccacccaatccagaaaagttagagtcatcttcatttgtttctttcccttaagcctgatattcacagcaaatcccaacagtttgatctcagaaatttctcctgctttctttctctgctccctctcatcttcactgcactgccatagttcagtcctcctaatctcttgctgtattatagccactggcccctgaatcagccttcctacttctgttttctactgtcttccagttcatacgtcactctgctcctacagcatccaaaccacaatttgattttgctgtttctgcacttaaatacctgtagatgctctccatttcctgccttaaaaagacagaccaacattggttagaaagtaatccaaggcccttttaatcttcctccaacctgcctttccaatttgcccctcactcccagtacctccaatttcacttcaaccacacagagctcttggccagttcctatataggctgtgcctctgtgcctgtgtacgtcatcagcctttatacattctagtccctcagccactgctcatccttcttgatccacctcctctactggttttttgggggagccttcctctccctaggaagagttagatattccttccttggtgtatgtaatgaatgtccatggtataactggccctacttaagcattctgacactggatgacagtttgtttctctttccgtctgcccctttcattagatgcttacttctggagagtgaagccttgatttttttttattttttgactccctacctacatcccatcccaccatcggccgtgtacacctccatggcccaaacctagtgctgacactaaccacgaactttgctttctagcagatcgaaaaagcttctgcacaatccacagcacaggctatttgaaaagctggccacccacaaagatggggctggatgaagacaacgaaccagacaatgaggggtgtaacctcagctgcctcgtcgcaattggacgactgcattctcatgtagttccacaaccagtgaacggggaaatcagggtgaaatctatggaatatgtttctcggcacgcgatagatggaaagtttgtttttgtagaccagaggtaagagtctacatactacccttgagcaatgatggtagaggattttcaaccctgatctaaaaagcagagaagactgggccatcagctggcttttctaagaatgaagaaagaaagaaaaagctgggtgcagtggctcacacctcaaatcccagcactttttgaggccaaggtgggtggatcacttgagcccaggagtttgagactagcctgggcaacgtggcaaaaccctgtctcaactaaaaatacaaaaattagccaggcatggtgacacatacctgtagtcccatctactctggaggctgaagcaggaggatcagctgagcctcgggaggtcaaggctgcagtgagctgtgattgcaccactgcacttccgcctgggcaacagagtgagaccctgtttcaaaaaaaaagagacaaatgatgagagtctctgttaaaaaatgagattcaataggatatcatcataaatacagagatttttctgtcattctttggcatatagagacaattaagtggggtgccttgatgtccatggctaaaagaaaaacagtagggatagcatgctgtctgaatctatggaatgttccagaaccattattgtgattgaaattcttttgaatctaggacttggaagcaattatttagtcctgagctgtccaataaaatactcgttggccatggtagcctcccatgtggctaacggcacagacatagaacatttccatcatcacagaaagtcttgttggacagcgttgatctaatccaacctccttattttatggatgaagaacagaggccagcctggggactggtctcctgtaggattcacaattaattggtaatagacctggaccaaggacccaggtgtcccaaatttactgctgcctactgctttccctcagaatatgcacaggctaataatttttctggctactagagacagccacaacatgctggaaaaagagacagcctcagctgtcttgtggcctcagctgctgcagcttctggcatttggttgtcctgataaaaaggaggcagcaaaaactagaagccttgcactgaggtttagatttataccacattttaatctaattaatgtggttccttttttaaagacagatctcagtctgtcacccaggctagatctagtgcagtggcgagatcttggcttactgtagccttgacctcccgggctcaagcagtcctcccacctcagcctcccaggtagctgtgaccataggcatgtgccaccatacccagctcattgttctgtgtttttggtaaagacagggtttcaccatgttgcccaagctaatcttgaattcctgagctcagacaatctgcccaactcggcctcccaaagtgctgggatgacaggcatgaaccaccatgcccgactggttgcaatttttaaagccccctcagatttgatttcttgtgataatagtccctttacaaaggctttgctctgtttccctctatttttatagccttgattaaattcagatgcctgaaaaaaagagagaaagatccacacagtgagccctctgaaaatccatccagctcttttgcctgcagctttgaccttgctctcataggctgtagcagggtttatccattgcaaagttgcaattaatcatctgaatggctttttcttctttaaatattcctttattcccttttagggcaacagctattttggcatatttaccacaagaacttctaggcacatcgtgttatgaatattttcaccaagatgacataggacatcttgcagaatgtcataggcaaggtaagctaggatgtatgaaagatcttaagttgaaagtgtccccttgcttctagactagtcaacatgaccttccagggaaatctgtccactgaggatgtagagtcagccagcctaggactcttcaggtcagaacatctgtgtgaagaggaagctgatacctgcaggcactgtttatcccccttgtagttgccctgtgctgactgcatggcagtttctgaaagacatctcttgttcagagggttttcccagaccctgtaaagatttagtatggcccagactgatctgattctcttttccattcaagcctgcactacctcctgtgttttctgtcttgactaatgctgtggcttcatgtgcaggctcctgagagagaccaacattgaccccttctttcactgtgtctccaccagatcctgttcattcacctcagacatgcatttccaaaagtctactttttaccacctctgccatcaccctggttcaggccctcgtgcctacttagagacctgtgatagacttctcagggtttctctgatccctctcacccccagttcatcttccatagttatcctatttatccccagatagattgagcctggtaacatcagcctgcttaaaaacctcctgctttagactcaagcccaaatgcttttgacaggcaatcaaatgtgagaccttccaccttctggccccagcccacctcctcagtttcagtccccatccctgcctgcagaggcctgtgctccaggcacactgacctcactggcctctccccaaccagaccctgctgctcctcaggcactgctgggttcttccctccctccttctcttggcaaactcgtgttcatccctcaaggctctgatctcttctccctgtatagccttccctcactactcttcttgagggcaggagtcatagcctgtctcctcttgtatctccagtgcctggcacatgagaagggctcattacatgttacatgaaagaatgaggttgaataggtgagtagcctctgttgatttggatgttcttagaaatgagataagttctatattgcccttgggctttgtgattgagataaagcatgacattttggacagtgccttctcatttgctggtggtcatgttagagctgattccagttagatgtataacatgcagtcagtaattccctagagcctcaattttacagactatggaaaatcatgacagcttcacaaatgaattgaaaggctctgagttagaccctcagaaacaacctatttcctgagtgttgaccactgcagtttccttggcttactaaagagcgatgtcgttggagctcaagtacctttaatattttgtattggatgtcctgtttaatactttggtctgagaaaacaacaatgtccatgttttctttacattttcagttttacagacgagagaaaaaattacaactaattgctataaatttaaaatcaaagatggttcttttatcacactacggagtcgatggttcagtttcatgaacccttggaccaaggaagtagaatatattgtctcaactaacactgttgttttgtaagtacttttcctatatctgaagctccccttgcttcaaacagatgcctagggttcctcatctgggaaatggggtgcaggcaacatccagtatcacatcctttaatgccatcttgctaatacctgtgaagcctcaggactggcagaagctagaaaggattgttaacaaagggacaagcttcaggacttgtaccatgcaggccctggcttatgaaactgctccaggaaatagcaacatttccttccagataaagcagctaacctttgaattccacaggccctgcaccctaggcatccacttgtgctgctgtggaggaaggggttggcaatctatgaaaggctcattcaggcactagctcacactggccttggctgaggatggggaggtctccatacctgtcaggcagggggcccaagcactggcagctggaatgccatctcaaaaggctgctacctgctagatgagcagagggaggtgaaggagcctctctttggccaggcctgctccccacttttccttccccatagtgtccaaaaccccacctatggtaagagctgtgtgaggggccggggctaggtgcactgcaggctggcaggaggaggtgctgtaatgatggcagtaggttactgcagccaccacctctgctgaactgtgtcccacacatattaggaaggcctaggcaggcagtggggccaaaggccaggatgctatccattatattatcaaacagtgagacctgtttacccactcagacagacacttcattttctggcctgtccaggtccagagtggacaccggacaccttggccaagttgaatggtgcacagttctgagcaggcctgactcacgtttccttattgctgggatgttcacagagccaacgtcctggaaggcggggacccaaccttcccacagctcacagcatccccccacagcatggacagcatgctgccctctggagaaggtaactatgtgctgctggggccctggggcttgcccgtgggaaggtgcttgtggtcaaatatcctcccctaaagtattcagggtcccctccattcatattctgtggaacaagggaggcctcgaggggatgatgtgcggatttccccatgaatgcagaggacactgtcatgtcactttctctgttgagccggaatactaggagctcactgctgcacttcccaaagctgctggcccctggaagcccttgagctcgcaaactccctactccccttgtgctttcctcctgtgttggctagtggccatgatgtgaagtgctctttcgtgactgtcactaactcctgtggttggcaggcaggtgtctttcggcaccagggtgtgtaccatacccactgggctcccttctcaggctcagccttggccctgcccctgctgtccacgctggactcatccttcctgggaccatccccacatgcatggctgcagcccccatcgatgactcccacatccacatctcctggcccagtctctctcccgagctccagatctgtctctccaaatgcctcatagacagaaccacctggagtctcagaggcacctgaaattcagaatatcccaagctgattttctgcactcccctacctgattggttgtttaagccagaaacctggctgttgtctctcccccattatatctaaacacggagtcctgaaccttctatctcttaaacttcgtcaccactattgctatttcaccctcctcatctgctgcctggattattgcaaatcacttcgcaactctagtccccctctccccaccccatcctccattgtagttcattctccctgccgtggactttctaataacccagttctcatttgtgccttttctgtgtatcgtcctttggtactcctcattcccttgtggaaactgtccaaattcgttagtacggcatccaagaggcccctcatgatcggattggtacctgctgccccagtttcatctatcatgctctcatcatcatttatgatgaattccttggaggagtctcccaagttttaacctgcctcagtgctcctgcacgtgttggttgctgtgcctggaatgctttctcctccttacctctctgccaagctaattcatattcatctctcaagactcagctcggggttaacttgctccagaagctgcacctggccccagatgagttggttgcctcgtgcttgcctgtcaaacttacaacattttgctttagccattgttcatcttgttggttttcctgttaaactgtgagctccttgagggcagggacttgtctctgtaaccctggcacatacagtggtcttcaataaacgttttttttcagtgcatgaagggaaagaattagatgctgtatgaagggaaaaaactggcctcagatcctagaaggaaacttgagcctttccctgctggaatgccttttcctgacaagctgtagccctaaagtccctcaaggcacaactctgatgttgaactgcaaatggatcatgggataaactggttttactttaatacataatagtatttcttcctcagttttcccctttcctactctcagattcctttgttgtaggtggcccaaagaggacccaccccactgttccagggattccagggggaacccgggctggggcaggaaaaataggccgaatgattgctgaggaaatcatggaaatccacaggcaagtaacaccttctagttcctctgttaaaccagtggttctcaacccagggaaattttttcccccaggcaatattttgcaatgtcaggagacatttttggtcttcacaactgggtgggaggttgctacttaaacatcctgtggatagagaccagggatgctgcttgttaaacatcctacagtaaacaggacagttccctcctccccacccaacaaagaattatccaatccaaaatgttagtagtgcctagattaagaaatcctgccttaaataaagaagctaaaccaaaatagcccagcgctaaagagaattcttgagaagacttaactttcttatggctcaaggagcttctcagtgcggatagatgtacctttactttacaggaatgcaggagtagagctgtgaactatcagagtgatctggaccttaacaaaacattcactttttttcaatcaaagagctgcccaggattagtactagaaaccaagcagatcagctagttattactagctgtcttgggagagacttcctttccatatgaaagagaaggagcttagaagcagtccacctgggtctgagtcctgggcctgtctctctacctggctatgctgagacttacttaacctcttgctctctgttgatttaaaccataaaaagaaagcactatttcccaagaattgtgttaggattgtgagggcactcaggaaagttccaggaacacagcctgacatatagtgagtgcttaaaaattaattaaatctgtctttaagagcagtcgagagggaagcagttatcataagtctgtccaaatttggggaatagagaaggtggtaaccagattcttcagaacgaaacttaatgtaacataagaaaaggaagaaaacactgctgccgctggattctctcaggagaattagaggctggcctgttttccaattggccataaaggggctgttatccccctataggtaacacagctcttttccaaccccacaggattagtgggtgtgacttctgcatcaggaaggagacatgagggtagtgtgcagtgtaatcaggttcaaaccctatactttgcatttgcataccctgtattttgcttgagaccatccaagaacagtatcaaacagtccttgacctcaagaattttaaaatcttttataagtctattttctttatgataacaggaaaaagggagggtgcatgggccaaagcaagcaaaagaggaaagatttgaacttggccttagccagggtttgcaataagagtggatgttccctctagaaaagccagggctattcttgagtgggcatgtgagtggcaaattcagggtcaagaaacaagctacctaactgggcaggctttgtgtaggaaggagacacagagctatgataggcgattaagaaacacaagaaatgatactgtgcagtttggaagaaacctgtaagaccccatttgttgtaggatgctgaacaagcatccaaagtcttgtgttacgctttgtggaagttgcattggaatagggagagatgaaggtgggcatgtttgacaactcaggaatgaggccttatcctacagagatgacactgccaaaagagaaatcaatcatctaaggtctagcgtttgaagatgaaatcaggaatgatgaaacagcaattccaagatgagaaacctgggaaaatagtggtttcatagacataagtagagaaaggtgggggacactcagcaatttttccgtaagcaattagcagccgtttgtgcatgctgagaatacatgatatgtagttgtaaactgccgttaagaagcttctaatccagaaagaaaacttgttcactcataaatctagagaactaggcagtacaagaaccaaaagacttctgggtggtggaggagtggtctctgggtcacccaaaagctacattcatccatgtaggagctgagagtcctgtggttacacaactgccatcacactctccctaaactgtagctgcaatgccaagtgatggattctttcctgaggtccttcagcctgacaagtatttaggtggatttacagttctaagtcttcccttctataaatcttctgagagatatgctagataagaaaggcctggacccatttttcatcaaccactgccttcgaaggctgcttttcctgtcactactactaggctaccttttagaccctggtgccgtccatgtcctaagagtattcactagctaaacagtgtttgtggagaaggggacaaattgttttctgtggatcaaagatggaggttgatcttagaagttctcctccaattcacctggattctgtgaggaaataaaactggccacttacttgaaattcaccaactgaatgcaaactccaatccaagggctttgtcagtgagatgcttgactctagggactgcattctagatcaggtgcctgtagaacaaatccagcttgtcatctgtttttgtaaataaagttttattggaacacagccacaccgattcgtatctgtggctgctttcaagctgcagaggcagagttgagcatttgtgacaagacaccatatggcctagagagcctactatctggccccttacagaaaaagcttgccaaaccctaatctagatcttcatcccctttctcacctttaccccttaacaaagcacatacactccactgaaaaaagaaaaggcagtgtaattctcttttctgacaggataagagggtcatcgccttctagctgtggctccagcccattgaacatcacgagtacgcctccccctgatgcctcttctccaggaggcaagaaggtaagactgatgattcttagcctaagctagagaacctcttgcccaagatctgaaatgttgggggtgggagtatggaattgcaactgcgattgctgaaacaatttggactacttcctccttgaagtaaatgcatctgtgtgaggctggatacaaagcatactggtagggctagggaggcttgctgacatcctcagaggctttcttccatgtgagtggaagaagggagaaagaataaggaatggggaactgtcagttcatttaattgagggagcaattcaagagttcccatgagggaaagattattgagtacctcacatagaaaagtttctcattttctgccaggaattttcaagggagaaaatattagtgtctagggcaggcaatggaaacagcaatgccaccagcagtgctttggaaatcaagccatgctttatagctgcagaatacttggggatctgctgcctgggggttccattggtgtgacagcattggatccaagcagtggatcaatcaccagccctcatgaagagcttgctataagactacactataaataggtttaggaaccagtcatttgttttcatctttgctggagaacttataagcctaggcccatcttaatcgtaaattataaatctgtttatattgcctgatgccagtagagcttaggacagtttaaaggccatcattttggacacaatggcttcctttccccatctcctaaaacagagagagagaatatcaggaatttccataggcaggactcctagggcacaaaccatcaaaagcagggcaaggattttcaaaactgagctcctcggaggtttgttcaggttaccaagagctgtggtgttaccaggtgggatgggcgtggggatagttgctaaggagagagggtaagagtagaaatcctgcttctacaagggcagcaatacttcttttttatacaggaatcttctgcaaacatttctatttgaaaaagcgttttgctccccccaaaaaaggttgaaagttaacaaattaatgggtaagactacaaagtaagacctgggttcgaagcttggccttgccatgtgctagttatgtgaacttgtacaactttcaagccctagttttctttataatggagctaataatggttagggtagccagcatctttgcacgaggtcctactgtgagataatatatgtgaaagtgcttggcccaaaataccactgacagatgaagtctgagcttggtgtcccgtgacccccgcccccctgcccacaacacacacactgcttgccagctgtcttcttagctgttcttctgttatacctccaggtccttcctgcatattggatccaccatcttcttagggtggtcttccagtctctgcttcttaagttaacttttaggcacttgacttgactcctggtattaccaaggattctacttcttggttttgaaaggttatcagtccagtataggcttaaatattactcaaagaactttcatatacattgtctcatctcaccttcacaacattatagtgacaagatccaggctcctcagcgttcgttttataagtatggcccccaggctacaatcctgggctcatggcttccaattcttttcacatcaacaactaccagaaatcaaaagctgtgctctgcatcataaagccccagctatttttgaggcacttatgaaaattctcccttttctttgagaagaatggattataaaatggatctgtgagaagaaatttggatgtgttctcacgagatgagtcctgggcagcaggacttataagaaaagcagcttaaacaagacagttaaaactgacagcagtattaaatggtgcaccatacccagccctttccagtcactttcaaatttggaaggtccaaaaatgaaccatttagcctgcagttgtttgtcaggatcaagctaaaaaggaagcctaagtgagcctccataggtcgcaagagagtacagacatccagaagcactaaggaaaattcagataaagcagcagttctacaaatgtcatctgcagtctttttccagaaagagagggggcacaagatccttttaagggtctgcaaggttaaagctattttcttaataacattaaaacgttaattttttccctgtattgataatgtgcactattcatactaaaagcacggttgggtaaaattgctggcattttacaaaaatcagacaagtggcaccaaactatactagtagtcattgtattcttcaccaccacacactcacagtaaaaaaatagtttaaagccagtttcatttaagattgtccatcatggctaggtgcagtggctcacccctgtaatctcagcactctgggaagctgaggcaggcaaactgcttgagtccagcagttccaggcaagtctgggcaacatagagaaatcccatctctactaaaaaatacaaaaaaaattatccaggtgtggtggtgtacctgtaatcccagctactccggggactgaggtgggagaatcacctgagcccaggaggttgaggctgcagtgagctgagattgtgccactgtactccagcctgggcaaccagagtgagaccctatcaaggagggaaggaggaaaggaaggaagggagtgagggagggagggaaaatgtccatcattacttttataaaattctcaagcacacatctttttaatgctctgtgacaaaatgagaagtacacagaacttgtgctgcataccaaagtatgatgtttgtctcaaaaactacttgtgtgattaagttgtgagttgaactagctactattttcattggacaccatttttattgtatatggtcattcggttttgggtatttagaatactttttttttggaaatgaatgaagtgaacctgtcactttaaggaaaatgactgacatttgttgccaatgataaaatctgagctttcaagcaaaaattggaatttttagaaaacttgtctctgctactttgaccttgagatcttcctaaaacttaaaaaatgttgttgatgagatagggagtattaataatagtgatattttgatgctctataatgaaatgtgtcaatatatagaagatctgcataactcagtgaaccaatattttgtaactaaacaatgcaaggtatttcaaaatcatgtaagggtaaaagatccatcctaagtgccaagatataaagagtacaaaacattcattgatatggtttcagattccacattgcaactcacctttaagaaacttctacgtgtcaagttttgaagtggtatcaaaaaagaatacaattatttgaaaagtctattaaaatatgcctcccttttccaactacttatctgtgggaggttggatttccttcatatacttgaatcacaagacgtatctaaatagactgaatggaaaaacatatatgagaatccagttgaaaattattaagccagacattagatttgcaaaaatgtaagataatactctgcctggtaattttttgttactgttttagaaaatagttatttttcattaaaatactattcattatttatgttaacatgtagcgggtttattacatttaagaaatctattagttttaatttcaaatacagtaaatattgataaatacagcctacataagcaaaagttctttggagtcctcaatgatttttttaagagtgtaaaagggtccctagaccaaaacgttgctgtggaaataaagtaagttataatgccacctgctggcaaagcctgaaatcattgctgctcctgaaagcagcagctaccaaactgtttcctcacgtatatccagataggtctcaaagaatgctcttctttgagactcagccaggggaaggcagctggggtgagtgggggagattttgagacagagttctcttactgagtagtagtaataatcctccccagtagcctgtcttaacttaaaccacaggttactgaagttggcacctgtagtataagagatttacttctgttttcttcatttgactccttgagctgtgtctcttcacagcttgttaactccactttttcttcttcagaaatatctgtcactataagatgttttattcccttataggggaaacgtctagctgggctcattgaagtttaggcattggtcctaaagaaatatgtgggcatcatgattccaggcagttgaatgctcttgggattttattcagcctttaagttgcctctgtgggctcactaaaatggagagaaaagaatagttcgggggagaggttttttcttactctgaccatgtctgtctaacagttccttgtttgaaatcatccaatagaaaactgaagccatttgaagcttctccccaccccaccccatgcttcattttccttttggcattgctcataatactgattcaaacttcacacttccctccttttgtttgtagattttaaatggagggactccagacattccttccagtggcctactatcaggccaggctcaggagaacccaggttatccatattctgatagttcttctattcttggtaagtggcatcattattcgtttccattgcaatgagcttgcaaaacatcttacataaagtcaattttaagaactgaactgtgtgaaacaagctaatcctagataaatttgataggaacagaataaaagtttaaaatttgtttaaatctctaaaaagttgaccagtatttgagttttggtggaggtccaagtttgtgcctggaactcaagaggaggctacagctacctagacataggctttctcccatgtggggcataatctcttcagagagagaaggctaatgaaggttcagagataatgcctagaagggtgattagtaagcatatcagaaggtattaaaagtcattaagtgaaaagagtttgcttttcccatcacatccatctttttctcccctgggctttctagatctgtttttttcctaaactctcccttcctatttgcctttctttttgtaactcctcttaactggttacatcagattattaaaataagcttgactcaaatatttttaacatttactaaattttaagcgctttgtacttatttctaaaatgatcatttgattccttagagctgtctcttcacaacgtaaccccacttatttcttacgtatttttaaaaaattggttctttcctctaaaaaacagcgatataaaaaaagatagccatgcagcccaaaaagcagcatctcaccctaccattaaatgtaactttcttattaaaaatgtgcttaggaattgcttacttaatctgaagatgctttaaaaaagaaatcactgaccagtctttatctcctcccacaggtgagaacccccacataggtatagacatgattgacaacgaccaaggatcaagtagtcccagtaatgatgaggcagcaatggctgtcatcatgagcctcttggaagcagatgctggactgggtggccctgttgactttagtgacttgccatggccgctgtaaacactacatgttgctttggcaacagctatagtatcaaagtgcattactggtggagttttacagtctgtgaagcttactggataaggagagaatagcttttatgtactgacttcataaaagccatctcagagccattgatacaagtcaatcttactatatgtaacttcagacaaagtggaactaagcctgctccagtgtttcctcatcattgattattgggctagctgtggatagcttgcattaattgtatattttggattctgtttgtgttgaattttttaatcattgtgcacagaagcatcattggtagcttttatatgcaaatggtcatttcagatgtatggtgtttttacactacaaagaagtcccccatgtggatatttcttatactaattgtatcataaagccgtttattcttccttgtaagaatcctttactataaatatgggttaaagtataatgtactagacagttaaatatttttaataaatgtttcccttgttctataaa

SEQ ID NO: 15437 - DNA, 109484 bp, Homo sapiens
ggaaagtaggttagtggtgcgacatttagggaaggcagaaagtaggtcagggacggaggtgcctgtttacccgcgccggactcaccgccgccgccgccgcgggatccgagtgcgggcgcgggcgcgggcgctcccggcgagccacggtgagtgtcaggccggcggcggccagcgacgcgatcccgcgcaccccgtcgggggccgttagcaccctcgcgggcgctgcgcccctgccgccgccccgggggcaacccggccgccgaagaaccctgcccgacgtgcccgctgccggccttaaagggcccgtgaccgctccctgcccccacccgggccgtggggaggctgcgccccttaaaggcgccgcgcccgtccgcccccatcctcctcgcgggggctgccgctgcgggctagggcaggcagaggtgctgcaggagcccttaaaggggccgggaaagtgttcgctggagtacccaccgcccttccgcgggcatcgctacctggcggggggagggggcagctagctgcctcttaaagggatagctctgcccttgggggcagtgactcggccgaagaggactcctagatgtgtccccgggagcttcggggatccccgaggggaccatgcctggtggctgcccctcaagggcgttgggcgaacggtgccgcgtctgcccttcctccccgcttcacttccctttcgggagcccgcgaggctgggtgggggcggggagggcgtctccgtcgggcttggggagtccaagtccgcccgccccttcggccctgtagccagggctggcgctgcacccgggaatccccggccggcacggggccgaccccagcctgcgaactttcgtggggcctgtgccgtccaggtcctgggcggccctcaaggatgccccgtgggtctgcgggcaggtgcgcgtcggcctggggatgtcgcccggagcccgggtgcgggccggccttggagtcccagagctccgcggagggcgcagcgagcctggctccagctccgggtttgacagatgtcagggaagaaaaggttcccgctcggctattgccgggcgttgacatcccagagagcttcccgtttgcttggaagaagacgaggaaggtagaggtgaacgtcgaccttgtggggcgcatgttagcctccccgaggggtcgcgagagccggcagcggggtgagctcaggtgcccgccggcaggagctggggagggaaggggagtgctggacaccggcgcctgctgtcaagttctcgccggccggtgagagacccgctgccgccgcgcaccccgcacctcctgacccctctcccctctccgcctcggccccttcccggtcacctagcgttgttttggcgctttggcgcttgcggtctcttccttcttccaccgctactcctcagcgaggaattattagccaagttttctcacccagcttccaaaaatcagattccgtatttgtgaacaagcttttcttgacactacccgtatacccgtatttccagcatcgtcgttttattaaacatccataaaagctgccccttagatgcattcatttcccacgacacctgcttgcttgtcatttgtccttctgacatctgctgttgttcacccctttaatctattattaaatgacaactattattttaattcttctggtctcattgatatccggatctgtgaatttgggttggtggagtttttaattaatgtacccgttgaatcatgagcttaaaataatcattgctgctcctgagcagttttgaataatatcatgctctctctgcttgcaagacttaaaaaaattcgctggtgttatatttgatttccatatcaatggaattcccaaatatttttgaaaatacaaaattcagtctttcagtccatgttttgttactcagatcattttactgataagtctttaacgcagcttatagaacatatttagaaggtttggaaatttcctggacaggatttgaaattgcctgtatcatctgaagctggttctgtagaagcattttggttttgattgtagatgcagccagtgaatgataacaataagttaaaactgtagttaaatttgttctttattcaaccctctgaagaacgaacagatctggtagaaaagcactaacctgggagttaggagctggacatcctggttctagtttaggcttgggctctcatggccgttccagtcggggcaagttattaaagatttctaggttgtgtttgcctctgatggaaagtaagacggttgaactaggtgatctcaaaggttcctctcttttgaagttctgtaagtctctaaatatttaatacatttgaattcaggttggtatttacctcctggcacctccagaatatctgagctgaagccctattttcataagaaagttaagcagatcaacagatggtgttttgaagaatccatttcaaatgatttataaaatgatgactacttacgagtttgtctgctatttgcagaagaggtttgcatgccacagggcaggaaaaggaagtggccatgttttcagatttatcccttcacaccaacaatctctgtggaatttatatgctaaaagatggagaagcaccatagaaagatttggctgtattaacaaaactgcatatgaaaaggtaaaaactagatagttaatatctctctttggtgtaagggttataatgtatctgagctttctttgtgatttcatcatcaactctcactgtggtaggaaaatcaatattaaataaacagtttcagccccgtgattacatgcagtgattttaggaagcatcatgataactaaagtaggtacttgcagggaagtaaaatatcctttctagaccttgaggtttcgttgggagctagggacacaggcatgttatccttctccacagtcttttttcattgtcaccttatcacaagactcagatttatcccaaatacccaccttgtcttttcttctccctctcatgaaataagacctgctctgactcaaccccctcagcatctcttacttcccacccaaaatgtcctgtctctatccccatcgtcccctcatctcctcccaattcagagaaagcaagtggacctctcctctgttccttttcttggcctctcaccatgggcaagtgcctgggctctggtggcagaagaatccatggctcaggtttgggctttgtggtcttggatgtgtgcttgactcctctgacctcaggtttctcctcttggtgtaatggcagtgcctgcctcgtggagtctgtgtgaggattaagggagatggtgcatgtaaaaggcctggcacacaggaagcctttcctttgtgccagctgccattccttctcacctctacccgggtcctatcactagaatattatttgtgctgtttgtccttagtctcccctgccccaccctgaaaaccttaggcttgacttaggagaggaaggatggaagaggcagagtcagacttgtggtgagcctgctgtgtaccaggcaatttacatgtgtctttacttggtaccctgggttcgtaagcctctctttcctccctcctgccagcctcccccactctcccatctcctgctccattcttagtacctgccctctggcttctctcgctaccacctttctttatatttcttctcaaagttttctccaaaactttgtcgtgagttcctggggcccatctgcccatccttattcctgagtggttgttcttggcccctttgcagtatttcttttatttttttaaacatggtctcagtcttgcctggttggagtgcagtggtgcaatcgtggctcactgcagcctcccaagtctcaggtaatcctcctgcctcagcctccagagtagctgagcctacagacacgtgccatcacacctggctcatttttgtatttttattagagatggagttttgccatgttgcccaggctggtctcaaactcctgggctcaagtgacccacctgcactggcctcccaaagtgctgggattacaggcgtgagtcactgtgctcagcccctttgaagcttttacctcacttgttttttgtcctttgaaatcctttcctctctcagcctttgggtcatgctggtttcttgattctcttcctgcacccctgtaaagataaatgtctgtcctagcttctgctattcacactgtccgtggcctggggtcccctctctagccctgacctgtctctcctgtgttctgctagcaggtccgttgtggacatgaatggcagcctgtaatctgcatttgtggtctcggagttacaggtttgcagactgcttgcaagcactgtcacattgagtcctcatgacacactggagcctacatcccttcattccccaggctgtcctaaaaggcagtttggttgggtagtttagcatacagactctggagccagatttcacatcctaagtattccctactggcttcgtgacttgtggtcaattttcttttgctctctatgccttggtgtcctcatctataaaactgggatcatagtagcccctacatcagagagttgaggtgtggattaaatgagttaaagcattggaaaaagtgtgccagtctattcatggcacattgcaaacactcagtgaatgttgctgtcagtcttgctgctcttcgttgccttgccggggtgccttggcctggtttgtagtggtctccacattcagcctgcctgtctgccagaccttgccatgtgcctggacactgtagtcaagctgaggggctgtccattccctgtaccagcccttggcccagtccatccctcaattttcacgtgtccaaatcctcctctgcttttaggacccagggccttggtcctgcagcactatttcttcattttgttttccttcctccccacacctggcagcaatgtccacattgatttttctccaattctcttaggttctgctgcattccatattgtgttgggctgtctctgaaaatatctcacctgctcgctcagcctgagcattctgggagaagtttatcttgctttttccaaaatgacaggcacagggagcctttaggccatggttgtccaatgcacattgatcttgtggaggaggagatgggatggggtgggcactcagggacggagcaggtggagggaacaggatgcacactgcatagaggtgggggtgcaacagggccataagtggacatggccgtaagtacttaggtctgcatggaaggagggtttgaattggggacttaacctcagggggagataagattggataaggtttagtcatctttgctgcaggggaacgttgagtactggcatgtaatggagagtggtttttaccttagtatgtgctgtccttttaaatagtgtaaactaattctttatctagcctggttaaagaaggggatggctggtctgcctaatttaatatttggctattgctctacccactgggttttgtgcatatactgaatgaagcattggcttgtatttattccttcaatcactgtttgaaatgtctgacctgggcaagttaattagcttctctgagtgcaaaataggaataataattattacgataatagcagctaacatttattgaacactttctatgtgccagcacatatgtgagtcacctttgcttattaactcatttaaaccccataacaactacatgaggcaggtactattatccttacttcacaaatgaggtggttttataaactgcccaaggtcactcagctgttatggcttggggcagaatttgtgctggtgaactccagagtctgccctgtaacaccctagtagattcctactgggaggaaacaccccgttatatcccttacctcactcagccgcaccatgccaggagcctagtaggctgacagcaattgggaaccagtcttattgttgacaaacatggtatgagcctcttttagagcggagctgcctgaaaccctccgcataagggatgcggacctggatgctacctgagcagcagctccaggggcttgtgaacattctcctcacatcctgttatgcatggctgtctctctggcctccccctgctttctctgcagcattgctctgacccaggccccctgtggctcagccagctcctccccaggcagctccttgtgtgagatgaaccttttaacataactcactaaccccacctcccaccctcatctagccatctgcagagctcctcactggggaggggaccttttcaaaggtccctcaccttcgtccttttctccctgaagaccaacgtccacaactttggtatatccacagtgttggggtgtgtgtgtgtgtgtgtgtgtgtgtgtgtgtgtatatatatgtgtgtgtgtatatatatatatatgtgtatatatatatatgtgtgtatatatatatatgtgtatatatatatatgtgtgtatatatatatgtgtatatatatatatatgtgtgtgtatatatatatatatatatatatatatatatatttttttttttaatgccagttgttccccaaatacatttagatagtaagggacacattgttttatgtcaagaacctgttacataaaaatgtgttatataatgttcaaatatatactgcacagtgaaattagataccactttttttttttcaaagaataaaaggataataaacacaggccgtcctgaatataattaacctcagatttgggaggcatggaaggacgtgccctgccctcagagctctcgtcctgagctctgcctttcttgagtgcgccgggagcaggatggatgggaagttggcctgaatctgccatggtgtggtactgtgagatgctctggaaattgtcttttttttttggcggggggtgggggatgccttcgcatcttgctcacttgtatctttctcacacctaagcagagggaagaagctctttttgccccctcgtacttagaccacccaggtcatcttttgaccagttttctgctctgctcaactcctttcaatcttcccagatgacaggccagctttgcctgctaagaacagccctggtgccagtggcatgcaggtggcacccctgtgtccagtcttccaggctctccagggtctggtcctgttcctcctccccagccctgcttccccgctcaacctccattcccagccacagccctgtgcccgaggttcagtcctccttgcctctccgctgtcctccctaggccacctcacttcacactctccctctggctagcggggtctttgcttaaattgttcccttgaggcctctcttccttgcccgtgcctgccttggatctcacttctctgtgaggtacctctgataacatttgttccctttgtgtgtgctctcccttttgctcttgattgccaaccattcattcgttcagaagcaggggtatgtcataatgagcaaattaccatatcatactgaatcaggatggccagttgtctcattttttaattgtttcatggttaattatcttacgctcacttcccactctccagtttcactcagttactccgtcagtgaagtttattggatgcctagcactgttgtgggcactgaggatacagcagtgaacaaaacaaggggcccgcaggaggggacagatgatgaatagtgaaacacgttcatgccttgttgtgagaagtgctaggagtgctaggatagcaagcaaatagagtaaagcagtagcgatgaggtatggtgggagggagggtaccttatctagatcacaggggagacctctctgaggaggtgacatttgaacttagcttcagaaagatctgggggaaagtatcccaggaagagagaacagcacatgtaaaggccctggggttgaaaggtgcttgatatttttgaggaaagtaaaggctagtgtgactcgattatgagctgcttgtgtacagatgttttctgcctcttttatactccctttaaccctgagcccagtgttaggaaggccttgtaaatacttacatacagaattatagcatttgtcattggttatatattataaaatagtaattttataaaataataatttatcataccctgcttagaaggcttttaataaaacattatattgcatataaacaaattaagggtttgaagggttttcttataaatgcactcctagcatgtttcaccaaatattactgttttaattgtgtttagtgcagaactttagacctcataattctgcttcatgtgcacaaccatcttaaaaacaggttttgttccaaaagtttatttgtaaggcactaggtggaaacttgggataaatttttctataagaaacaatgaagtaaatagtgatgtagtttctaggcgagccctcaaaagctatttagtggtgactgtagctgaaaacatactggttggtatcagcagtcgtcaagccttctgctggtagaccctcctctcagtagcattgtacctcatttgctgttagcaatcataggacccatttacctcagtcacttctcctactgtattttcagtctgttaaagttttatagaagggattttttacctttatacctttaagatttggttgcatgtgttataaatgagacagtagtgcagagagtggggaaaactctggactgggagctgggagaggcctgggctccagactgggcccagccactgactggctgagtaaatttgagtaagttatcctctttgaactttgatttctcaggttcttcttggctgtaaaatcctattgttttctcaccatagcagggaaacgtagatatacttcgttgttcaaacctgccctcaaatggctgcctctgatttcttcttgaagaagtatatggcactcagcaatgaggaactcaagcagttccccatgtgcagagctctgcagtgacattctcagtaggaaccttgattttgatctgctatctttcttgatgagttgaaagaaattttgtcccagaacttttggtccagataagatttctgtgttcttggccaacttatcttccatataattatgtaaattgttttttctttttaactcttagggataaaaatggtgactctggcttgcctgcttataaaatatagttataagtgcccttagggaatggaatgagtttgcaggagagagcagagctgaaagagtgtgggatcaaaaacaactttaaatgttaaatgcaaagctattttcagtaccctgctggaagaaaaaatttttttcaaggttttagaggatagaagaggtttttgctccaaagaagaaaggaacctaaggttttgcagtggtgaaaagtacctgatcctttaaccaactaccaccctcccttcccacctctgagttttgttttcgacatcatgaaccacatttgccatttgagaggtttgatatttaagtgacgttagtggcagagctcaactggcagtgttcaaatgacttaggtgcagagtgctgtgctgcaaacttccccagtgcattctagggtaagggatgcctcatagagagtgacagagcacttttagctctgcctctatttggtcagttgtgaatggtgtgttcctttttttccttacttgaaggcatagcgaggagttggtacaagaagttattgcttcatggacttcactttggagctagagggtggcattagacctagcctgccttcttggatgctggaataccagtggcaatgtcatctcttgttctctgctatacccctagcaatgaaaacagtgtctgtacagaaaagtctctcaataaatacttgtttattccttcaaaaagtgaattcagctttggataaatttttaatttcctccactctctagcagtataggcttatgaggttggtcttgcaaggtactttggagtttaggttgccatttctttttgacatctgtgtttttcttattcttcaggttggtcaggtatcagtgtcttttactgatgatggttgtccctgccctgctgatgttcatcttctgttatctttaattggctccaaactgcagcaaatctatagctgagccacattaactaaaagaaaacttgttgcatatttatttaggcatagtactacacatgtatttattcagtcaacaaatatctgtgagtctatatgccaagaatgttactagacccaaaggaagagcagaaattgttgttgtgaccaaggagcctgcagtttgattgccttgtggaacatctttatgagcattgtagaagggaggaggcttcatagaactggtcaggttttcacctttaaggatggtaggatttcgattcacagacaaggtgaggacaggtatttccaggaagtggctgagcggaaacagcataattaaaaacacagaagtaggaatggaccagtttgcattcatggacacagacttgtctaaaatggaaggttcttaaataatggtgggaatttaagtatggaagatcactgaaggcccaaacctgaagccattttagacacctagtgacttgcctaaagtgacagctgataagtggtagatccaggcttaaaataaggccatgggagctctcgaccactggcactggacttggctgtttcccagcagtctctagatgcaggatttgggtttgattggggattttcttttttctttctttctttctttctttttttttcttttttttttttttgtgatggacactgagattgggggttttagagtcatgagctggaaataggcaaggctctatttagcccactctttcattttgcagttggggaaactcagtgaggttaagtggcaagtcggagtttacctagtgagtcagagactgctaggcaatggataaccactggatttgttttattatgattatgattttagtgacatgaaatatttctctctaaagcatcagtccagtgttagtgttccagttggattggagcaatgaaggactaaatgcagcagagacctgacaggaggctgctagatgaatccaggaaggagagagagaagccagaactgagaattaattgtcaattatgttaatcagcatggtgttatcagtcaccctttagatttctagagtgcggtgaacatctgcctgtgtgagtggctttcaagtgtgtgaatctgcactgtactgtgaccaagataccttaatgaattctccagacagaaagtgccactatggaagtcgaatgttttaaaacaaatgcccacattttctggaaagagcaccagattaggagtcagatgacctgcattttaggctgcttctgctgcttagtcaccatatagccaaagcaaatcacttaatgtctcaaactgagcctgactccttatctgtggaacaggtataacaattcctgttgagcccttttcagtgtatgtgtgatgcttgtgtgagctaaggaaagaataggcattttgaagctgtaaagttgctttctggctgcagggagcagcagtgcagttttaatagtgaagatgtactggcccttacaggaatagcctaggagaaccagaagaaagttcccctacctccagggcatgtttagggaatctggcgctgtccaccaggtgggtgctgatgtgtactactttattggatagggccatgttttttgtttatttgtttgtttttattatactttaagttctagggtacatgtgcacaacacacaggtttgttacataggtatacatgtgccatgttggtttgctgcacccattaactcatcatttacattaggtatatctcctaatgctatccctctcccagccccccagcccctgacaggccccggagtgtgatgttccccgccccgtgtccaagtgttctcattgttcagttcccacctataagtgagaacatgcggtgtttggttttctgtccttgtgatagtttgctcagaatgatggtttctagcttcatccatgtccctgcaaagaacatgaactcatccttttttatggctgcatagtattccatggtacatgtgtgccacattttcttaatccagtctgtcattgatggacatttgggttggttccaagtctttgctattgtgaatagtgccacaataaacatacatatgcatgtgtctttatagtagcatgatttataatcctttgggtatatacccagtaatgggatcactgggtcaaatgatatttctagttctagatccttgaggaatctccacactgtattccacaatgattgaactagtttacactcccaccaacagtgtaaaagcattcctatttctccacatcctctccagcatctgttgtttcctgactttttaatgatcaccattctaactggtgtgagatggtatctcattttggttttgatttgcatttctctgatgaccagtgatgatgagcatttttttcatgtgtctgttggctgcataaatgtcttcttttgagaaatgtctgttcatatcctttgggatagggccatgttttaaagatgattacatttcacccccgtaagcctgggcatggacggaaaagttaggcatggatagccatgtgaatctattatctgtagacacctttcaggatagtgacaggcagctgtgaaccagaaaaacaagtgtcagaatctagccagctggccagtctggcattcttggatgtttcatctgtcctggggcattaggcagcgatccagaggaaccttgattagcctgggggattcatggctgagccagcatgctgtccaggtaatacctggctgcaaagcctgactggagatctgccaaatctaaatttctgccagcattacaagtgtatatattattattattattattattattattattattaatagcagtatctaaccttgactacctaccatatgccagcaactgtgctaagtgcttacatactttttctcattcagtcttcacagtattcatataaggtgggtaatgtcagttctgttttctagttagagagactgaaactcagacgagcttcagctgatacatactaagtgtaaaagccatgattcaaactcagaacagtctcagtccagtgcccagctgcataactgctatgttcttctttctctcttttcctggtacctgaaaatacttcttgtctctggttttgaggtttctgactgtgttattggttgatggatgggttgccacacagaggctcagctcagcacagctcttttttcttcatagcttatgacggacatcctcctggatactctggctggtgagcaaatgggtgccagtggtgaatgcagcagaaagactaactcttgccagctagtgcatgtgggtgaattttaaagacaacaaaagaaatttctgtaggtcagtttttcaaagagtaactggtagcttgtagtctacttaaaggccaagtttgatgttcatcaaagtcaccctgtaaaaacctttccaaatgctgtgattctgataacaataccatagaacattcctgtgtaattgacaagtagtttttacatacaatgtcttgtttagtcatcatcacaaccctatgagggtttgcaactacatatagttgcaaagaagactgggagatatctttagttgggaagccatgagtctagcaaaatctctgtttttaagggtggcgaggggagtgaatgaggggagctagcaatctgatgtgttgtggtggtgatggaagggataagtagagtttgaagctgttgtcagtagagttgggaggatgcctcctagtctatgacatctcctagtgttatgacatctcctcttgtggactgggaaattgcttagagtttaagcaactgtccagggttctacaactggtcagcggcagaggcagcacttaagtattgcttttgtgacttaattcactctctattcaagtttcatctttgctttctctattgaagttcttaaatattctgattcactgtatttagaagtcggcaggaattattaaagtgaacttctttgtggtatacactgttactgaatcagagtaaataaaaggtcacatgattggttgttgtgttaggtttaattgacgtgtactctgtatgatacagaatactcacatatcttttgtgggatatcattggtccaacagctttaaaaatcccaaggctttaatagatgataaaacacggagtttgtgtaatttcttgaaaaagttggccatcgagttcttggtcaggaacacaagcttcaattgtaacagtttccatggagacattagccttggcttgcatcatttcagctttcagtgcctttcctaggaatggagtgaactgctaaaagaagagctctggttgtggttgtcacttagagctctctcccctactgtttctgctggaggctgatttgcttttctgggtcttctcagttttttctgtgacctaagcataaattgtctttgagatcctggtaatctcatattttaaaagttttccacaaaagacaactgaatggaacacttttttttttcacccctttaaagtatttaattggccatcaacggtggctcacgcctgtaatcccagcactttgggaggtcgaggcaggcagatcacgaggtcaggagatcgagaccatcctgctagcacggtgaaaccccgtctctactaaaaatacaaaaaaaaaattacctgggcgtagtggcgggcgcctgtaatcccagctcctcgggaggctgaggcaggagaatggcgtgaacctggggggcggagcttgcagtgagccgagatcgcgccactgcactccagcctgggcgacagagcgagactccatctcaaaaaaaaaaaaataaaataaaatgaaaaataaagtatttaattggtggcaaggggctttgctagaagaatggacacctggtctcactcaagcttcttgtattagttgggataccaggtgagtccctctgttaaagagacccacaggcacaatggctgaaaccaggtagaagttttctctctcatgtactagtccctagtagatagtggtccaggcctagtatttttaacacatggcttccatttgatggttgaaggtaaaaacttaccatctcccagaggaaacacccaagggggcacacatccagtcatttttaagggaaagacccggaagcagcacattctctttttccagtagccggaatttgcaactacatatagttgcaaagaagactgggagatatctttagttgggaagcaatgagtctagcaaaatctctgtttttaagggtggcaaggggactgaatgaggaaagctagcggtctgctgtgttgtggtggcgatggaagggataagtagagtttgaagctgttgtcagtagagttgggaagatgcctgagtcaagggtgagaatctaagcaggcacacagaaaccagggcatgtgcagccatctagaggtcagggaagctcttggctctgaaactaagcagtggggggcacccaggcatggaagggaatgtgaattactcagaagacattaggttgtcagtaaaaggaaattcaccagtgtgactgaatcagtagaaagagcacttagactaggagtcagaagacctaggtttgagtccagcccttttacttcataacctggggcaaaaaactcccataaatatttgctttattatttagataatggcaataacagtgatggcctttcctgcctcccaggcttagtgtgagaccaaagggtgaggaagtactgtgtagactgcagccccatggagatgtgcacagtgtctgcccagcccagggcctgccatgggtgtatttgttgaatgaagtgtgaactattaaaagagttgggaaaaatgcattatactaaggagatcttaatcctggacagtcttctctaccaggcagaaaggttctgctctccactggtcaaggccttgggcctatgtgtaaaactgggtacctaacaaacacatgggcagacgcctgcagctccttactgggtagcacatgacacatagtatgtccttggcaaggccatttgctcattcctctgtgtaggtaaccaagtgcaacagaagtggaggtatagcccatgaatgtgaactaatcatttttaaatgatttggtccatgggcaggttagaagatgaaaccttcccaaggccaccaaaacttgatttcttgcttgaaaatgataagatgcagttataaaatgcttctgttgatttggaaaaaatgtgtgacttgttcaaaacaatatgtattaatagaaaatgtaacataaataagaggatacaaaaaagagcttaatgtttctatcttctgggcctagcaatagtgatttttttttccttttggtaggaaaatgggggctcagtggaataatcagttttatttctttttcttttaacttcatgaagggtttgtattgttcattttgttatttaatttgttcatttgctaaggaaagaacttctttcttggaactctgcggagtgtttttagatggactttactggaaaaaaacaggaattgaaattatattcacagtgcgctctaaactcttttaaaatctcatgcatggatggaggaaaatgcactgaaatatcaatagtggttctcacctcatggaattagaggtgacttttattctcatctccttctctgtggtttcctatttttcaacgagtgtgaattacttttatcatcatgaaagaccagttaaaaattaatctcacaaattaacactctcaagccaaaccacgaatttttgtttttcacaacctggcttggactataaactgtcacactatctcagacctatgcagattcttttctgagtgaggcattgaggaacttgttataaagatgatgctttccttctggaaatcaagaaacaagccaagggcttataatgtgttaggaaagatgtcctgagtaactttcctcctggaatctgactagcctttattacagctacttaaggaaatgagttttgtgggttccctgttcactgtgtcaccatttttttctttatcctgtactcatatgtacctcagggtccccagattttcttatcctgggattgcatgaccttgtccttggctctctcgggcccctgccgtttccagtgttctctgttcatgttcacaatattgttgatttggctgtggcttcttcccgcagtgttcttgtagactgaagagagcacattgctgcccttgtccctgtgcagcttcctcttcctctttatcattgctcaggtgagtggcctgagcagtgctcctgggatgaggtgaagagaagcagtcaagactgcagggaagggctaggggtgctgagctggccgagcttccctgggggaaggcactgggccatctgtccagcagcagttggcccacagctggcagggcaggctcaggagtggctcttgaagatggctgcttggtgtttgaagacagttcccagggcatgcattcatttgttgagcaccttcaatctggcagcctgtgttctagatgctggctgatgaccaaggctgacatggctttggctgtcatgggagtttcattctagtggtagagggagagagagagagacgatgtggtagagggagagagagagagacgattagcaggggaatcaatgaagaagataattacaggttgtaagaacagccccagaggaggttacaggtgcctgtttgtcgagaagtgggagggccagagttgggataggaacctatgtccctgattgcaaggtctggctccttctgtgtcctctgggctttctggtgggaagggaggaggtggaggagaccccttgcgagggccgagcttctcccattcagccagtctggaccagcctggggccttcagatggagatagcaaaagttgagggcataagctagggactggctctcttggtcactccagttgcccatctctgtacttccccaggtgaatagccatgttttttaaagaacacggagcaaatttgcatacaagagtccagatttatgcatgctgcagctttgtctgaaggcaagcttatattttctctcctattattttcaacttttaatgagttaccagcatctcagtgcccctccagcaaggatattgggctggtgttttcagggaacaattttaattaactcctccttgcctccctctcacccagccacccccagtccccttcctggtggctcagagtctggctttggcatgcaataagaatatttttgccttggtgttagcctttctgaaactcttgattaccagtgctcacaggacctttctgcagcactgtctgcttggctgtggactacccagaggagcttggtgtcaggcaaacttaggcgatttccctgagcatccttgttgagtctgcctttgtacttctttgtcaggtctagaggcttggccgtttgtcctgctcttttgtcccctccttctgggaaccctcaggaccctcactccatggagactcagcacccttcctcctgcaaacatcagtgatggggctttcccagccctttcccctatcttccttttcaaagaacaaagcctttgaagcttgtctcatacctgtctgatgcagtatgggaatctgtaagttctttgcctcctgaaggggtctggggaatcacttggctttcagagctttcctcgctcctctcccacccacagaccgattttaaccagagagtaagtcattcatgctgtgcttgaatactccttccagtcccactaggaagactctttgttactaaattctgttttcttgggaaaggggagcttattactatctcattttgttggttgttattaccctcctttaaaaatgtatctacatacacgcatgtgtgtacctacatgtttctatatttcccttgtgaatgtggccctcagagggcctggatttaaaccctgggagtggtagtgaccctttgggaaatgtatactttttgttccaaatcttctctggcttaaatttgtgaagttttgtttcagccttggtttcatagtttttcccagtttccaagataagtttggggctcactgtaatcagcatgtaaaggagaatatggccatcagctctgccccttaaattcatagtcagactcagtggggaagccgttcctgtcccatcttgcgctcgtggctctgtcagcctcaggcagctcctgcaccgtcctcctgcctgtgacagtgttgtcaggagttcttggtacctgggtgctgcttggcctcagggtgccagggctcccatgtggagtgtgcttgctgcagtctctacagcccaggtgtctctgcagccctcctcttacatagccacagcgtggtaaagtacatccagtttgcgctgtagtaagcaattttattaaaaaaataagtttaatatgtaagtggtcccttagttcgtttgaatggctcccctctctggctttggtttgaatgagctacacctggctggagccctgctgctcccctcagcatggagtcacctccctgtgctatggaggaaaggaagaagttattcttaccttggttttgagacaagacaagcctggagaaggctgtagggatgaaggagttgcccatttgtccagcatcagttgagagtctactgtgtgcctggcatcataggaagcctctggagtgctgtgagcaagaaaataatacttgatttatgtttttaagggttcttctcgctgcctgtgggccggcagtgaggaggacaagagcgcagcagggagatgggttaggaggcagttgctccggtgcagggagcagtgccagcttgagggctgctggtgggtattggtgtgagggtgggcaggctgcagataggccttcgcccattgcccttgccatgtgtccccatgtgtccccaggggaggctctgggcatcccaaactgtgagcctgccctttcccaagtgtgctaggccctgccaagctcctgcttcatggcctatgctgttcattccatctggaatgctctcttccccctgctttccatcctagctgagtgacattgggcaagtgaccagatctctcttgagcctcaatctcttattctgtgaaagagtgctcatggaacctactgcatgggaccatgaggataagactatagttgagtgtggtgattgcagtagcctccaaagctgtctcctgcttccaatttcatcccgctactgtgcattctttacacagcgatcctgtgaccgagggtcagatcagggcaggcctctgctcagaatcctctccacagtagcttcctgtcccagtcagaggaaaagccaaatcttagcatggccctcagagcttcctggtacttctgacctcatctcccaccccaaggccatggtgtatggttgatcatgctgggttctgcacagctcattgtggtgcatgtaagtggcactcacttcctccccaacttatgcattgcacaacttgtgcagctgtacatgctgctcctacctgcgcctctctagctccactccagccacagtggaatccgtgttgttcttcaaacacaccaggcatgcttcctgtttaagctctccctactgcctgctcccttggcctggaccattcttcccccagaggtgtgtatggctagttagctcaccttcttcaggtcttttttcaaatgtcaccctatttaaaattgttccatctgggtcactgccccccaaatgttccctttttcccttgctctttatttttcctcctagcacttatcaccatctaatatattatacgttttccttatttatttggtttatttttatttatttatttatttctcaacagaacataagcttgatgcaggcaggcaccagtgttaattttgttcactgctgtatccccagtgcctggattggtgcctggcagtaggggttcagtgatgcatgagtgaatgagtttggatgcacaaaggtaaagtattgggtacggtgcttagcacactggaagcacctaatacatggatgccagtattttcattgtctctgttaactctccaggccctggctcaaatgtggctttctctgagcctttctgcagtcccttctcaggctgaattaagtcaccaccacctgtgctctgtgttccccttcattttgccttctctgtctgctcggcatttatcacactgcagtagtgggcttatctcacactttttcctgttccaattgcaattcctgtggggcaaagactggcctgttcagatttgtatctcaggcggtctgcgcccccagctggcatgtggtaggagcttaggaagtgcttgctgctggtggctgtgggaggtggaaagagctttttaatccatcaggacccttacaagggggactggctccagcatcactgccgtctgatgtttgtgccccctcccaaggggtgtcaagggagagcttggcaaccacttaaatgagagtctccagtggtatatttagagcaaattttggagagaggagtctcttggataacagcatctgggtgacctgattgtttcacatataagagtttggctttttggctactcaggctttgagaggttggggtcattcaagggaggcagtgtaatacccatgtgttcagaggtggctgggacgagagggtgcaggagaaaaggcttgagctggcctgtaagggatctgagttggtgaagggagcacagcttctgggggtggcagaaggaataggagagctgcccctgccatacctggggaggggtggttaggtaggtgccttgggaggcatggttaggtaggtggtttggggccatggggggaaaactgtaatgccagggcaattactttggcctcttgtatttggcaggaggggtccacactggggattgtggtggcgtgagggagagggccctgggagagaagctctagagtcattttcttttccagaggtggagttgtcttggggacctgcacgtggcacgcagagcccatgctctcaggcacctttggggtggcagagtttcaactgaaccaacagaggacaaggggctgagaagtcggaggccttggctgaggtgcccagtttcttggttcactttctttacctgccaggttagcagcaagtgagcaaatccctcctgcctttgctcagcattagcctcagagacttgaggagagctgggccttcaggtgggagcctggtggccacactggagaggaccaagcttgacattgagtgtccgaggggctgaaagttgttcgctcatccagagatggattcgttctgcaaacatagggaaagttcccttcccattcctcatggctgtttgaggatggaattcctgcattgaccttggcctttccctgatcttggcctttcccctgcactatggcctctctactcttaacattacgccccagcccttttccatgggcccctcgtcttccctatggccatctaaaatggccgtataatattctatcaagggaatgttttcagtaagccatgagcttgatatggagcatttagattgcttctaatttttgctctttcagctaatgctacattaagccatctctgtgtattatggaatcatttcattagttggcatttgtctagctaatggcaatggcccaagatttaatagcgaatcagaatttcttttttcaagaagaatgtcatgaggatatataaaaaatttacttaaaatgctaggaatcatctatgttggggttttcatgaatgaggaagcagggaaacagtaacatgaaattagttgtaagtgaaagactgtgtgtataaaagtaactcgtgacttgtttgttcctgagtgtggaggggagccaataaatccttggaaggagcaatctacctgtgaaaatcaaagagatctgtattcctgcatctgatgaaaacataacaaacagtgatctcttcttaaggatatttttagaaatgccctaaaacaagaaaaagtaaataagatttccgagaaaaaacatgtctccttaattccaaatgagcctctctggaaatgccatttagtagtggaagcaggttgtagacttgctgaaaggatttggttctttggttattaggaaataactagaatgaaattgacaaacagacaacactgacttggtccccagtactgctttgagcctgaggtatgtgttggctttggaatgatggggaaggcttcctctgacttgctgatttgttgtagttgttgttgttattgttttgagatggagtctcgttctgtcaccaggctggagtgcagtggcgtgatcttggctcactgcaacttctgactacctgattcaagcgattctcctacctctgcctcccgagaggtgggattataggcacgtgccaccacacccagttaatttttgtattttcagtagaaatggggtttcaccatgttggccaggatggtctcaatctcctgacctcatgatctacctgcctcggcctcccaaagtgttgggattacaggcatgagccactgcgcctggtctgttgttgtttttattgtttcagtctctggtggcttattatgtagacttgggctgtaagctttgcatttcagtttaaaccagcaaatgtttacactatataaggttgcaagggctaaaactttagggagaaagaacccagtgcacccctgtttctgagaagctcatgaccagggagtgggaaggataaagcaatgttaaaaccaatggttattcaagggagattaagaagggggccctgggagagtcagctccatccttttagagaagggaggagttctacctcactgctgggcagggtggggctaaggggcaggagaatcaagaaaggttttatggaactagttgcatttgtcaacatcttgaaggacaggctgaaatggaggctggacattctcagcaaaggtaaaaggcctgagtagaggagatggagatggaaggacatggggcaatgtttgggatttggctgaagaattgcatgcctgtagtaatggtcatagtagcactttatggagagtatcaggtgccaggcatggttctaagagctttatatgtagtaactcacttaatccatgcaatgaaccaaatgaggtactgttattatccccattttacagatgaggaagctaagataaatagcaaggaattaattgcccaggatcacactgctgtggagccaagatcagaccaagttcatctggctccaggctctgtgcttacgaccatgaagctgtcctgtctctgatttggggaaagaacagtcactagaatcagacagatggacagatgccgtatgtttagaggctgggattatcaacattcaggaatgcagaggtggaaaagagaccagagatggagatgaggggcattggagaggtggggatgggaggagggtttggtgagagccgtgaagggccacaggaagacagagctttaaggagaagtttgtcagtgaggcccagagctgcagacaatcccaggaggtgagacctgaggaataggtctgggctgaggagaaagctgtgagggcctcgggagaggggcagcagggtgacccaggctggagctgctgtggtgtcctatcctggctgcagagtgctgcgtgttcctgggggatcatagctgttgatgagtatcactgtccctgtcctcttatctgtagaaagaggtgagtgtgacagagggggcaggtgagagctggcactgctaatttggcaaacctggtgacttttctgcagcctaatgatttttgaaagctgtttgctatgctgaggcacaagtgtgacttcccccatctaaatgctgtgcaatcgctattttccctggaaaattgggcccatgtgggctctgtgtgtggtttatttgagttccatttttatagccttattaccttgtccccatgatgcaagaggcctctctcttttcttgagctttgctgtgaaaattgtttcttaaaaggcacaaagtgatctctcgtcatctgggtggtgctcgctccacaagcagcacttttctcagactccgcacacacttgtcatcgcccctgcccccacttggcaggttcctctgattgttggcaatttactgagaacttttaggcagctcttgaagctcactacctatgtgtttgtcttgatttcttccggaagagtttgtgcatgtaaatatccattcagcctctttctctccgagatgttgccctgccactgaccgtgcttggggctgaaacccagtcttgtcctctggcctcgagctgattaacaatagcagtcatcatgtacagagcctgagtggttatcaggcactaagctaagggatttacgttcgtgatcttaattattcccaatttctttgaggtaggtactattacttcccccattttacagataaagaaaatgagccttcaagggatagagtaagttaccccaggttacatagctagtacatggcagagctgggcttaagcgggcctttctaaccttagactccatgtgctccattcattcattcattggcaacaaatgattgtctgcaacaggctgagaactgttgtagacccagggtgtacagcaaagggaaaaaaggccaaactcccaccttcagcttatattctaacttggggaggtagagatcatataataaatgacatatacattatgctatgtggtaatgagaactatggagaaaaatgaagcaaggaggtcagatgggaagtgggaggattttgaggagtggtcaaagaaggcctcattgagagtacaacaaattgttaggttaacaaacaaacccccaaatctcagtgtagcaacacaacaaaactgcacttctctgcagaaaaaattccaaagtggctgctcctggttagcaggcagccttccttgcagtcatccagggacctagactccttttatcctgtgtctctgccttcttcaagggccttggtttcctttgcattcaaatgctggagcgtgaggaagaagaagagagggtagtttgtgaggaaggctttatggaccagtctggaggaagcatacctccctcccacccactggccagaattcagtcacatgttcactcctgactgcaagggaggctgggaaaggaagtctggccatgtgccgcctaaaaaaaggaagtgggttctggtgaactcatggcatggtgtgttgcagcgagtgaggtgaagaagtgagctatgtgtttagctggaggaagagcattttacacaaaaggagcagcaagacaaaggctgctggaatggagtggggaggagagaaggagagtgggagaagatgagggcatggagttgtgggggccaggccactggggtcactgtaaggatttggttgccttgggaatgacaagcagagccagaacatagagttttgaaggaggaacgacaggatctgaggcacgtctcacagggctcactctggctgctgtgttgagagtggactgagggagcaagggggatgcaggggagaagcgggcgtttgcgggtgttatccaggtatgtgaccagaagggctggccctgagccggggtggtagaggtggggagaagccgttagatttgagatcagttctgaaggtgggccagcaacttttgctgtgggattggtagtggggcatgagagaaagaaaggagtcaagattattctgaggttttggctttgcctaatgagtattagtctcacttcctaccctcagaagcaagaggggaaattttttggaaaaggatatctgagtgttctctgggccctgacctgtcctccataacctctttcactctgtgatacttttttcagcacagatgggcaattcccattcatgactaggctttcagacatggagagggcacttggagtccctcctggcacacagcagaggtgaggcagcactgggaattgtctcactttggggtctttgggtcaaaccttgggacccctttagagtgacatggcagggactgagtgtgccctctaggggggtgagatatgcctactggagtccacttccaatgcctgccatctgcaaacactggtgaggccctggctgaagggtaacaacccacaaaagtgcacaaaaggaggaagttctggaatgcgagttgatgctgccagcggtccggttggctccttgccttctgttctttgtgtgttgacatcagacctctctactgcagacaggctgccctacctgagggggcacagctgccagcagcctcagtttacaatcctagcaaaggaggagagcctttctctacatctaggtatcagtttaagggaaaagcctctgtgtttgagagtgggagcggaaactgtttcccacgtacttccttggcagtcatgacctgtcaaggctgaaactggagatgggactttttaatagaccatgatctcactgggagcatatggggaagaaagttcatcttagagatggcagggcgtgagctgtgaaaacagatagtgcacacctactagatgctgggcccccgctaggtattttatttcactggagagcaaaacaatatatcatccctgccctcatggcacagatggcctcaagtggctaaaccatagaatggctagctgagagaaatgatagttctttctttttttctttactgattgcgaatggggttgtatttttaattttggtatccatgtgttcattgctagtatatagaaatccaattgatttttttgtttttatgttgtatcttgcatgtttgctaaactcactaattagtcatagaaatttttttttgtttattccccaggattttctgcatagacaattgtatcacttgcaaatagggattgtttcatttcatcttttccaatctgtatgttttttatttctttttgttgcctgattgtgtggccaggacttctagtcctatgttgaacaagagtgctgggagtgcacatccttgccttgttcctagtcttggggaaagcatcagcctgtcaccattaagtgtaaggtcagctgtggatttgttgtagatgccacttgcactttgctggcatggttgtgagtaggactgtgggttttgtgtgtttgtgtgtgtgtgtgatgtttggctgaaatacagtggttattatctacaagttttctgtcttgaaacagggagatttgttggggcattttctctttgtgctccttggcatttctgagttgctggtctcctcagttccaagtctgagctatatgcagaaaaggaaatgcaggaagctcaccactgtgttgttccttggatcctgaggtcccagctggtctgccttcttcagactgccatttggagtcttcttatagtcatctagcatagaatgcccaggggttttcattgttcttagcaggtggaatcagggaaagtgcacctgctccatcctgctgggagtggaaatggttgggggaaattggagcgtataggtcggggctagtttagatgcaagggctccgttctgtaggtgcaggagggccgtggaggctcagccctgacagcagtgggagggggatgggaagagggggagtggagagagcctaggtggctgctgcctgtgtccaggcaggaggtcctgaagtcctgaggtcctggccgtgacagtagaactgcagcagaaagaaggacaggaagttccatgaggacagtgaggaagtgcaaggagaccaggttggtctgaggtttctagctagagcagctagctggttctgagataacagagacagagggaggggtctaagcgtggcagaggggtgtattctaggcattgtagagcagatctggaagactggacttactgtgcttcccctcaggggaggcttcacagaggaagtctggctgctggggaaaaatccagggagtgtgcattctgggcagaggaattctggctgctgggtaaaaatccagggagtgtgcattctgggcagaggaaacaacgtgggaaaaggcacagatacagaaaacggcgtgatgggcctgttgggactccagctagctgaggcataagtgggtagttactggttccatgactgggaaggatgctgtaggagtgcacaaaaggaagaagttctggaatgcgagttgatgctgccagcggtccagttggctccttgccttctgttctttgtgtgttggcatcagacctctctactgcagacaggctgccctgcctgagggggcacagccaccagcagcctcagttttacaatcccagcgaagggggagagcctttctctacatctaggtatcagtttaagggaaaggctctgattggcccaggttggtgatgtgcctgcctttggacccgtcactgttgcaagggagtggagagttctaatctaggccggatcgtctgcccacccctgttggggcaaccagagtcttttaaaggagaaggcagacaaaatgcatctggggaagataaaaaagactgtttaccatggcttactgtaatagattttgaagaatatgtagtctggcagtgcaggaactcttcatggagattaaagcaggggacttgatcaaagttaggttttattaaaatcattctggacactgtatggggttgtgattggaagtgaatgacaagaggtgtcaaggcgggttcgtaggccactgctttagctccaaggagcactgatgaggcctaagctagcttagaatcctgacttactttgtttgcacttcacctgtagcgacagcatcagtgaggtggagaacagggatagagtcctagagatgttagacaggcaagacttggtggccagatggaggcaaggagaagggggtcttatggaggattccccactgccaccaagggcataaagaatgagtctctggagggctagccttatctttggaaacactattaagtgttggcagactcgatgtaccttattgcttcttcagaagtgttagtgttgttggcttcttgtggtatccagctggaaaaggaagctgattgattgcatttccctccctttaaagagcttccttttttgagaaatcagaagataggtgatacagtcaggactgccagtggagaaataggttggggagagggagacactggcttggagactctcctgcccccagcctgccccgaggcccgcgagtctgctttaggcacattcgtccttttggcatcatccttgctgggaaggcttttaagggatttaaggaaagaaatgacacaatctgattcatattgcaccagatttcctcctctgttcagaatagactatgggtggaggtagagtgactccaagagtagcagcagggaagcagggcaccaattaggagactgtcgcagcaatctaggatggggacggtggaggtggtgagaaatggtcacattctgaatacattttgaaggtaagaaccagttttagtgaggattagatgcggagtgggagagaaaggagatgaaaatgactccaaatttttggtctgggcagctggaagaacattgtcttaaactgaggcggacacaacgctgggaggagcacgtcaggggtctgtgttggacatgtttaagtttgagacacccaccatgtcttacacaaagctcccatctacttcttacttgacacaaacagttggatgtactggtcaggagttcagagcaggggtccaggcttggagagaaatctgagcattgttagcatggaggtgatatgtgtgaatccaggagactagttgagatcaccaagggagtgacagagaagagatgaaaacaaggactgaacacgctgacataagaggtggggagatgagggagaataagcaaagataagccagtgaggtgggcggaaaaccaggagagctagagggcatgattaactggtgtcaaagctgcaaggtaaggactgagactttaccaatggatgtagcaaaatgcaagacaggccaaatgcatatgctgttggacctaagcttaactttgcaaataagtcatagttccttcccagaaggagaatataattttgcaaaaagggatcatttaagatttattaaaataaatctgagaaagatgtgaagatagtaccgtaggaatccagcagaaggaaacagtgcttctggcttttgtggggaggattgagtcagattcattcataccttcattcatttgtgtgttcattcatttggcaaaaacttattgggtgccaggggttgcggggaggagggaagagagagttgttatctagtgggtatagagtttcatttttgcagatgaaaagagttctggagatggcttgtggtaatggttgaataagaatatgaatgtacttaataccattgaactgtacacttaaaaatggttaagactgcaaattttatgtgacatgtattttctcacaattaaaaatggagagagattaaataaaaaacagagcactttttggggccccatcatgaacttggtctgggatatgatgtttgaaatggatgcgccatctcagtagatggaggtaatgtggagaagagtggaggaagacgtccagctcagagggttttgggaactatcagtcctgtttgtctggatggtagggtctatcgggggaaaccatgcaagctgagactgcagccgggccagttggtgcaggcccagcatcctggctgtggatttgggcctgccttcttagattctgggagcctctgatggtttctgcccaggggagtgtcattccaaaggtgtgtatttagattaatttcattagtccttcctgttaaaccattgcctattaaaagcagtggggttgaggcattcatttttatggtgaaaattctggcctagcagaattttagatatccaagcatgtgtcaatgaagtgagtaggttatttttccatccattttacaagtatttattgaggatcatctaagtgcccgtagtgttctaggcagttgggggtatgggacggggtgaatttaacaggtctcttctcttaaaaagcctacagtctagagaaaccccctctccttcctaaacaagaagttatgccacaacgtgccatgtgttaccataggcatgccgccacagttccatgggtactgagaggagggggtgcctggcctgcctggaacactggggaggcttacagggaaaaactgtccaatggatttaaaggacaagcagggattttctaggcaaagaagcagaatgggcatcccaggagtatggtaaatcaaaacttattgggtgctatgaatttaaagctaaacttttatttcattggcttttaggtggtgctggctagagtgtatacgtttggacccaagcttaacttttccaatgtggaatcctgggccttcattggtaagtttgtttgatgccttcttaccaaattatgctatcaaggattggtatttggaatgaaaggcaaggtagttatcattggcaagttctctgtggaggttaccagccctggacctggagaagcctgtagcacaggctgaaggggtacataggaaaagtgaaatctcactgtaggtttctgtggtagatgcagagagggaggccagaggaggggaaccaaggggtgcgggggatggatgcagcgggccttatggagaggtggagctttggctctgttttgaagggcaagctagattgaaaaaagtccggggaggagtgaaagaagattttcgggacttgagaacatagaggtgaggtgtaaacaaagtgggcctagcagcagtcccataggagcaaaatcttcatcgaaaggagtcacgggcaagaactgtggtgggatctgctggcgtctgatgattctagtccatcagcaaactttttctgtagaggaccagatgctaaatatttttggcttcgtaggccatgtggtctctgtcacagctactccactctgctgtggtaacatgcaagcagccatagataatatggaaatgaatgggtgtggcagtgttccagtaaaactttatttacagaagcaggtggtgggctggatttggcctgcgggatgtagtttgccaactccttttctagaccctaaatgcccggctaaggcacatagactttatcctgaaggcagtgggaagccattgaagttattttggataaagaagtgaagtggcagaagtgatgtttacattttaggaacattcatctgatagctggacaagaggcatgggccccttttggaaggcagcagcagtcatccaggcatgaggtcttgcggtgaacagtagtgaaaatggaagcaaaggatcaatggaggagatactgcaaagggagaaccaatagcgttttcagtcttcttagacttaagaggcaggagtcaaagaggatgaaagtttaagcttgcttgtttacggtggtatctttgacagaaatgtagatgttgggggtggaaaggatagctgatgcatctggttttagatatgttgaattcaagataacagtggttcatccataagaaatgtccagcagagaattggaaatgcagggctgaagcctggcctgagaagattaagtctagagatgtggaatggaagccataggattaaacacggtctccccaagatgagcagtgggctgagctgtggggaatatgcgtaactgtgggacgggaagacgatggaagagacccagaggccatggaggagagtcccgggaagggaagagaatggggcagcagagaccagggagaacggacctgaagggaggctgctgaatttgtgacaaggtctttgcagatggccttgagaaatgtaatgtcacaagaggggaagggaagaggaagccaggttacatggagttggacataaatgaaggataaagaattgagatgttacaaaaatagaccgctcatagaaggtttgggtagtaaaagaagggagacacataagatttagatacttgcttgtcagaataacctttgctttagctttgaggcaggcaaagcatgctgtgaccagttttcatttccttctttggagccaagctgtgtttgggagtttgtgtgtaccttgggcttgtgattgtgttcttatgctcccttttgaggtgtggtgttcgtaactctgccacaacttgcaccacggaatccagcccgtgtttggacccttgccatgagacaagatgtgatctgttggggaagtagttgcatttgtataagttggaggagaaagtagagtggaccaaaaattgaaataaaccttcttactacagagtctatccaagtatggggacttgaggataattcctccagtcatgatttaattatgtatcaatttgtgctctgagtattttgagtgtaccttctttggtttgaattctaagtagtttttgacttggtttgtgtgaatatagcagttagagagctggtaacaaaagcaacagttgtaactggtttagagccatgatttattgaacactcattatgtactaagtccagtgctaagtgctattgtgtatcatcccatttcatctttgcaatgacctatgtggggggaattattaatagtattcttatttcagccagaaataagtcatagatgagtaactatgcaaggttacaagggatttgaacccgggtctgtataatccctggcttatgctgcttcctactttatcttgcctgtgtctggaatttttcctcctactaatgtagaaggactagagatagatcgagtccctcaggttaaatattcagaggctgtagtgggtgtttccacttcttaggagtctattgaaagggcagaagaagtgtgggaagtctggaagagactaaggccaaacctcaaacacttactttaactgtttccccagataaaatttagttgaaggcagcagccttgggcttggaaagaaaatagcgctagaaggcatgagagtcagattccagtcctagcattatgacaattataatgtcatttttgtttaaactcttggcatttctctccaattacctccagctttgagctccaaaggcaggctcctattttgtcttgtttttcactgtatccccagcatcgtagcacagaatctggcatgtagtatgttatgtactcactaattatttattgcttcgaatgcaccaagggacttggtacaagacacttagcctctcaggcactgctcttggcatcatggttatagaggtgaaacaggacaaggtctctgctgtcgtgaagcagacgtctacatgtgtgagatgtagaatgtgacgtcaggtatgatcatgctctgaaataaaagacagtgagaccggggtggagagggaagggcctgtccaagaagtgagacagtgagctcgttgggggtaaaatccataaaattcctcttggggtgactacagattgtcagctgcgctgtcagcaccttgttttaattgttttacttggctgccattgccaatgcccagctgactgctccctgcagcgagaactcccacctcaggcctcgctttcttcagctctgctgagcgtgcctctcctgggtcggctcccggttctcctccagctgctgagattccagcctccacagcctgctctgctggttctctgttctttgtccttagcttctggtttggcttggtccctttcacgtcatccttaacgtcctccctgggtgagctcatccaccactcacctctgtcttgaagacacccggatctccatatccggtctgaacctcctcccagtccacactcctagtggtctgccccgagggcacctcaacctgtctgtcccctcctgagtgccacatgcgtctttctccctgtgctgcctgcttggtccacgcccctcagttgcttctgcttcatgagtcgtcctggccttgtcttttccctcatattcccttggttaccacatcctgaagagctcatcttctaatttgtcaactcagttcttctctgtctctccactcctgtgtttaggattcatcattttgttctatgacagcctcttaattggtcatcctgtgttcatctttttcctccctcattccactgcccacattcctatcaacgtgatctttctaacacatgtctgatcagagctttcttttgcttaaagctctccaagagctcctcattgcttagaaaataaaagctaacccccttcagcggggcctgcagtcttctcatcatctggcccttggccccctgcagcttttgctcccccacccccaccccactttgggttttcctttttccctaactcacatttctaacctcagcctagctaccaacagccatcacctcctagtgcctttgcaatgctgggccctctcctgggaatggcgtggtctctgttcaccctcttgggaactcaactccagtttcccccaaatcttcaggacaccatccttccctacccagcacctctccatgacctggaaatgaccttcctcctggctcccagaacaccctcatgtctctcttgcaaagcacttatcggtgttactgttgatttacttacctgttatgctcagcaacctgagctccttaagggtggagaccacacacacacacacacacacacacacacacacacacacacactctgtctctctctctctgttccaagtgccagcatagtttacctggctcaggaagtttttgttgtaagagtgaggagtggtctgtttgtgcagccaagcaacagattcataatgtgataaaatgtacctgaaatgggaggttcattggccattgggtttattggggtgctcttcttgtcagctttgagtgcaggacaggttgtgttgggcttgagtttgtgacgcctgttgtgtctcccagcatgctgagacctcaggaatgtctcttctctatattctttgcccctgactttttatttttttagctcttgtttttgatggaccgataatagcaattcaaaatgaaaaataatccatcaaggaattctcaggaatgaggtccacccaccttggtcctggatgaatcccaaatttcctaaataagccagaatatctattcttgcgaactactgtctgacagcctttttcccccttaatccagctgagaatgcttttcttgaagggtaaggatacctagtggcccttcatgggggtgcctgagggcctctttgtcttcattttaaaccttgtaaagtccccagtgaatactgaggagtctaacaaataggaagaagctctgaccccaggggtcccaagtcagcatctgtactttgcatgggagctagcacaatgcacctagccaatagcatataaactctcctgttttcattcagtgccttaagcttgttgcttgttgtgtcttcttcacttcctatctctgccagagacctgagaagttgtgccaagagtgcagcttttatttggggcctcacagtaatctaggaaagcttttcagaagagagccattctcagcaccgaggtgtcctgcagaccaggacactccagcaggctcttggaactgctttcctgggatggaaatgcttgtgatgctgcctccccttgtagggactttccatatgctgttccctcagcctggaatgcatttttctcctggtttgcctagctcatgcctgttcaccctttggaactcagctgattggcctgcctcctcctcagaagcctccccaacctccctgataagaaggctaggtcttgtcctcaccattcccatgccagcatctagcgcttatggactgctcaccttgtgtcaagtactgttagaatgcttcatgcgtagctactttgtattaggggcttggtagatgttggctgaggtaagtgtcatcattgtcccaaagacactgtgtgaggaaactgaggcctcgacccattgagtaggtgacagagcaggagtttatcccagatgctggactgtgggtttacgctctgacccttctatacgccaccgttccctctgctccaagtccttgcagtctgtccttttccagcacttgtcatggaggtcatgacctcggtttgtgtggttatttgattaatgaatgtttgttccctcactgggcagcccttttgagccccaggatggcaggagtacctaggactctaggcaggtgcgcagcctggagttgaccgagagcatgtgggactgcccacttgcccacagctgcttcttgccttttgcatcacaggagggtgggctaggaccataaaagagccagcccaggcctccccctttctggagctcactgagtgcgtgcatggggtttggccgtcaccctcacttccatggttctgcatcagaaccagctgtgctgaggaaacatctgtgccttgttaaggtctgttccttctgcccactccctttgcccttttctctaccttacaacccctttgttgtccttcttcaaggaaaggggccccctttgtctctcagggcagagccagctgcccttctcctggtcctcttgatctgcacacactctgaggatgactgcccatggcaggtcatgatggtccgtctgccctggactgtggtttctgtggcagagcaatactttgtacagtcagggcccatggccctacggaaggctgagggagagcctgaggtcattgccttaagagaagctgcttcatggtgcagttggtatgtgtgcatgtgtgtgtggatgtgtgcttttttcatgcatgatgtttttatttgtgttatttatccccctgctatatctccctctctcaggggtctaacatggagctttgaatagtagatacatcatagctcttggctaaatacatattttctcccccgctgatctgaaggcacctcccttttcccctacccctcactttggtaccttggtgacttcacagggttgttatgacttcccagacctcattgagattgcagtgatgtgaaaaccctacctagattccagccagctgggcaggggccttggcagcaggggaagcccagttccctagggcaactcaccaggcctccagggctctctagggccaggctggctgagcttcaactgactcatactgtttttgactgggaaaaataaaaattttaaaatggcttctgaccaaatggggaaagtggatgtgggaggaggagaagggggacgttagccacaccctaggtacatttgccagcagcaaactgagatgggcttaaagtgtggctggcctctaagacgcctgcttcaaagggcattcggcacactggtctcaggctttggaggcccacctgcttcagaacatcagctccctgtctgtctagcgttgtgacttaagacaaacccaccaagctcccttagcctccattttctcatctgtaaaatgggattgtaatcattagaataacctttataaggttcttgtgagagtggaatgaagatgtgcttagcaccgtgactggcgtgtagaaagcaccaaatatttattatctgttaacattgtttttgtttgtcaaagtattattgttaataataattataagaagactttggaacagatataaagtctaaaatgcaggctgtgatgaaagggagatggtatataagaaaagtgctttttgaattgcacattatgtccagatattattattagcacaagtatgtttattattgttttgtctttgaaaaaaatgctggagcacaattttatgatgttgagtctatgtcctttgttgttttgttttttgttttggaaaaaggtttgtcacattggcctttattggaatcttgtccagtggatgtatgacccacattggtgaccctgggtgccaaatgcctggacagcacctggcaaagaagagccattatttcaatggtcactattgtttaaaatcgttatggtaaacaatacctgacagaagttcttagaggttcattgacagtaaattgtgggcaatgcactgagttattatttactctagacctgagaaattctccctctccaagttttgtgccttgtatagctaaataaatataaacaatttccttagaatttgatacaaacagctaccattgtcttcacaagtatgttagaaatactttcttaatagcaactacttgactgttttgttttttatctccattccctgccattactctgcctcttcccatctttctgaaataaaagtgagccaaattagccatttaaaaaatacgtagatactttcaggcagaggttgaaaactgtctaccccctggctgcatctggcttgcagatgtgttttgttcagcactcatagtgttttaagatgtttaaattagtggccaacatttaaaaatgggtagatttttgaatcaaaatccagatttccagctcttcataaaaaatcaaaggtctagtgggcctgggcccgtcttccttgtggcagtgcggaagagtggtggtccctcccctgggagcttgtttctccagcctgcctccggctggcccagcctcactgtacctttccatggcctgcttggcccctgtaggaatagagtttgtagtctctgcttaatataactaataccccttagatactgtgtatcagtttagaattatttccactagcaactgtgaccataggtaggaaggatattttacttgctaagttgtcattcttatgatagcccaaatggctataatagtattttaggctcttttggatttaatagaattaccttctctcctctctgtgggatttcctcattaacaatttttaaaaagtgttcagcaaggcttatatagcaacataaaattttaaataatgcaggatataaatttctatagctgctattgaaggggggttgcaatcaagtgaactgctttaattcaacaatttatggtgttgtaaatttgaaaaataaaagacacttagttttttttttttttttttttttttttcagaataaaataattaaatagttgacctttggcagagtctttgttgaaataggcaagggttttgagcttctcagaacttgagaccattgccttctggagtctttcctcagatgagtctgtgcctccttctagctagtgcactctgagcactgtggccacatctggagggtggagaggagacttagcttccaatggtggtcactctaggggaggggggcccttgcaaataccaaaatttttttaaattattattttatgagcttttaaaaacttttttgtttttgtcatcacaaaagtaataaacacttgtgataaattcagacaacactgaagtgctttaacataagcaacaaaatcttctgtgacctcccccaaccttttccaaccattccccaaacataagcacttttgagagtttgcttcttatactcctggacttttgcatttgcttgtttctctccacccctaccctttgccctcaaccacgacatagatactttcccttttgttttctaaagatagactgtccctgtgcatggtgttctgcaactttctttttacagctgtcaattattatggttatttttccaagtccatatgtacagataaatgtacttgttacttttaaaagttgtactccatgttatggttgtatgttaagtaaatttcgttttgtattgatagacactcaggttgtttctgaccttttgccattgcagtcattgctgctgtggaaatttttgtgcacacgtgtgaacttttgcctgagattttctttggtatagatacatagaagtaggacttttggtttaaatggtttgctgtttaaaatttgaatccataatgccaaattaccctccaaaaaggctgtaccaattcatgctcttcctaggagcatcccattatggctttgctaatctagtttttgcttacacatgtgtaagaaagtaaatcttaaaagcctcacaaataatgccatcaaaattacacgtttatcttagaaaagcattcagaatatatgtctgtagatttaattatatgatttttatatcttgactttgatggtggttatcatcctgcaaggtgacaaaaagttccctaaatactgtacacaattattaaataattattaaggatatcagttgtgccaggtagcctttggaagaattacagccaaatcacagcttccttttccacagctctgccaggctggcttgtctttcccaccaagggctgagccattaatactgaggctgggtcagcatttgaaggggccctgccagggagtgccaggccttgggccccagagacctggggagtgggagatggcaagtgactgctgtgaggctgagacaaagtttttgcctacaacaccccatggctgtttcctttactgagctagatgaggaaagcaaagggaagtgatggtccaagacttctggtggtcacttttgttcatagatttctcacaggagtgctaacatttaggctcatgtttacgaaggtttgaaaccttagcatttgggaaggatctgcaaattctcagccaggggccttaactgatcacaggtagttgtgaactcttggtccaggctgtatctcaaggcttcttcttagaaggacaggtcagcttaccacctgctaactgcatgtgaaattttgaattctgccttctctagctctcctctctggctctgagctggtatctggcatttgcaaacagtttaccctttgttgacttcttagcactaacctcacttttatgagtctgagtagacttgatacccaggccatttatcctttgagggtgccctcagcttcatcagacccatgctgggcagtctggcatagtggtaagaggcacttggagccagacagacctgggttcaaatcctgacatcatcacatttactaacagtgtgaccctttggctgatgacctcacctctttgagcatcagtgtctccttctacaaagtagggacagtaattctttcccaggggtattttgaaggatatacgaattaatatttgtcaggtgcctctcagatgttcagcacaaaataaacagtgtataaatatgagtcctctcttatcttcctgctgtagagagaaagttcgttggggatgctccaagttggtggctactggctgaggatcctggagtaagaggaaggctaccatgtaaacccagagatgaatcatgaacaatgtgtattctcaggagcttagtatttgatatgggagcctaacaagcaaatagtgtgtccagtaataggaactgattaatagaggaaagattaattaaccttctaggtgggtggggtggaaaagtaggtggggtattgaaggttcaacaggagttcgacagagaagatagaccataaataataaatatacggctgtatccactagagataaagttacattgttttttatgtacatgttgacttcttttggccttgccaatgcactgatatattcaaattcagctcctctctttttctcttcccttttcccttcactctgcctttcctccagccctgccttgaaatactcagccactgaaaatttcttaaagaatttctttatactttagtaagtcctcagaggataccagttcaccctactgagattttacaagaactttggtgtagctggggttttttttgcattcctttttctacggtagatataagttcttttgggttgcccatcaatgaacaaactaccaaccatttgatgtttactgcgtgactcctgtataccaagcacatgtgccatttcacttagtccccagaatgtcagagcagctttgtgaaatgggctgcccgttctttcttatggatgaagaaactgaggcttaggtaggttaatatactgaatattatacatgtagtgagtgggaaagccacagttcacctccagggtctttttctccctctttgctgccttgcttggggtcctgctcatagtaggtggacagcagatgtttgtctgaacatatgagaacactgcctgccacgtgccggtcagtttgatttgtgctgctggttttgtaacccacatggggcaatgacagctgctcaggtactttcctacctattagtggggccccagggtcacacatcagtcataattgacaaaaaacacaatttccctttcctctcaacttttatttctaaggtacttgtaagcaggtagattagattgttaacttttcattttttgctttgtctctctcctttaaagactatgtgaaagaatacacagtgccctgagagcctggcctgggaatcagaaacttagattccagcttcggttctgctggtaactcctcagtcattatgggtaaataatattccctctccagaactactagattgtgtccttggtgcagtctggggttcgggtggtcctagggaccctgcctactgcatgaacctgttatcaccatgtgaggctggaaggatctcagcgttggtgttgggcaggcctgagtgagcatcctggctcctgtacttcccagctctgtgacctcgggctaatcacctgactccctgatgcttgttcttgtctacgaaggagggctaagaggacctgcttcccaggatcactgtccagattgaatgagaaggaacgtcggcttccttccttctgtctccaactcctgagtgcactggttttagactaactgggtgtttctgcagttgaaaccaaaacaccttcattaggtacaatgttcattatacctcgcaacaccctgagatactcaactcttagatttcttgaagctcttttttgttaagaaactcctcaaaggaagatactcttctaccccattgagctttattagtgcttcaatgacagcaccttattttttcacttttttcccccttgcagacagaagctgcagtgtgaatcagtttgcatttatataatttcttttgcatttctttgcaaagaggaaaactccattcatttagcaaatgtccgtcatgcccaggccttatgttaggtgaagggatttggagagaaatagagtcactgacctcaagaagcttacagggaggaaaggtgtaaatacataaagtgacacatgggtttgtcctgtcaccaaggtatgcagtagatgctgtgggagaagagaggatgacacaggttctctcttggaagacctcatagagaagaggtgacttgtgagcaagtctttttttttttttttttttttttttttttgagagagggtcttgctctgtcacccaggctggagtgcagtggcatgatcctagctcactgcaactttgaaatcttgggcttcaagggatcttcctgcttcagcctcccaagtagctggaactacaggtatgtgccacttgcctgtctgatttttttttttttaattttttgtagagacagcgtctagccatgttgcccaggctgatcttgaactcctggcctccagtgatcctcccaccttggcctcctaaagtgctgggattatagacatgagccactgcacccagccgttgtgagcaagtcttaaaagatgagtaggaaggagtctgtcagctgtagaagtaggaagggcccaggcagaaggagcacagggcagaggctagagccctggtaggaggtgacacactgggtgcatgtctggagctggagccaagaggtggaggacctaagtggctacatcttggcagtcacccatatattggcaagccccaaatctttgtaaccagcccagattgtcttcctgagcccccaactcccatacccactgcccattcagcagctagctgcatgttgaagtgtagtggtcttcccagacctaacataactaaacagaagtcttgatttgttccttcaaaaacaaacaaaaaactagccttgctcctcctcagtcttccccatgttatgaggtccccatcatttttacctggctacccaggcctaaaatgtgggcatcatctttgattctgcttcctcctgtgttcttcacatcatctgtttgcaattctttttttgtttgttttactggttttaaaaattatttatttattgagactgagtcttgctttgtcatccaggctggagtgcaatggtatcatcttggctcactgcaacctccgcctcccgggtttgagaaattctcgtgcctcagcctcccgagtagctgggattacagtcgtgcgctaccactcctggctaatttttgtattttcagtagagatggggtatcaccatgttggccaggctggtctcaaactcctgacctcaagtgatccacccgccttggcctcccaaagtgctgggattataggcatgagccactgcacctggccaatttatttatttttaattaacacataataattgtacatatttatggggtacatagtgatgtttcaatacatataatctgtagtaaccagatcagaataattaacatatctgtcatttcaaacattgcagttcttgacaactcttactgtatgtcctggaagccaccactgctccttattattagtttgtttctttatcaaccaagcaggccagaccactgctctaccctcgttcaaacctccactgtctttcagcaggtctcttgtcagtttgctacataggcaaagaggtcttttaaaaagcaaatttgtgtcatttccctgctctaaactctccagcggctttctggcatctttggaatggaatctaaacatctcgccttggcctgccagcccctcctgctcatcttctctggtctcatcccttggcactctctgctcactccatttcagctgccgcatcttttcttactgttccccctgttgtctcatgggctttgcacttgctgtcctccgcctgagctgctcttccccagacaccgcctgtctcaccttcactccacgctggcctctattcaagtgttctcccacctgtctgaaaaagcaccgttctgccccctctccccgctgcttcaaccattctgtcctacctcgctttggtttctctcattagcactcatcactctctgactttatatgatatgtttgtttgtcttcttatttagtgtttgtcttaccccacaagaatataaatccatgaagatgggacctggtcttatctattgcattcagcactctagggcctaaaacagagcctggcacacagtgggtgatcctgaaacacgaggtgggtggatggacaaatgactgagttaatgcatgcctgcatgcaagcgaagactttggagtttatttcataggcagtgcaaatctagtagacatctttcaggaggtgagtgacgtggtcagcacttttattttagaaagccagctggtggcagtgtgggggctggactgtaggagggaggcagcagaattactttagcggctgtgaaaatcgtccaggaaattgatgctgagtgttgtgctagagctgtggggatggagaagaggggacagatgacaggacctgaagatctttgagtgtctttgatttctattgggataacttggtatagtgattcctttataagaaaagcaggaggggacgaactggtccagggagagactgttgacactctgtggtgtttttctcaccaagaaaacctaagccctgggatgcatgttctctgtagtggcattggctctctggggagtgactctgctgctccgcagcctcccctgttccattttttaataagagaatagtcaagatggtggtgtcagtgagtgggagtcttcttcatgcagatggatccattgatctttgcatactccaagccacactaagtcattggttcttttctcgcagtgggtacatttcaccttatttgattctgatctgacaaatgctgctttttttcttttctttttttttctttttttttgtttaaagaatacctagactgtgctcaagttccaggtggggtttacagataactggggttccagcatctcccttcttacaaacacgaacaggagcctttgccgtccttgggtctcagggaggcagaccggcagcaggcacacattcctggcccaggcgtagccatgctgtctggtgctgccttttgagaccttttgtgtgtgtgtgtgtgtgtgtgtgtgtgtgtgtgtgtgggcttgaatgattccttctttcaaaaattcaaccctctccaaattttgatgaaaaccttttcatctctgagtaagcacattatttcccatcttgatgaggtgtgtcccctctgtgtccctgagagtatgtcatcccagccttttaaattttattgtatttttttattttttattttttcatactagtcaagtgcagtagtgagaagcggggaaagagtagaacaaggggccgggggcggtggctcacatctgtaatcccagcactgtgggaggctgaggtgggtggatcatgaggtcaggagattgataccatcctggccaacatgatgaaaccctgtgtctactaaaaatacaaaaattagctgggtgtggtggcacacgcctgtagtcccagctactcgggaggctgaggcaggagaattgtttgaacccgggaggcagaggttgcagttgagccgatatcatgccaccgcactccagcctggcaacagagcaagactctgtctaaaaaaaaaaaaaagagtagaacaaggagtttgatctgttacagactgaactatcaatggagataactcactaccttcggaccagcctcatcccagtcttttaagcctggtccagaattcctaatcctgcttgtcaggcccttcaaagtgaaatgctgtaccatctgtatagctggattctcacctcctacctctcctctcccttccaaaggttccgatgtcataggaatctacgctagagggcttcctgtgtgccgggcactgtggtaagcacttcacatgcattctctctaatccttaccacttcggggatgtaaggattataatcttctttttacagatgaggaagctgaagcttgccactgcttagtagttaagagtatgggcttacagccaaacagaccctggattgattctcaactagctggggaccttgggcatgctacttaatttttttaacctttttcacatttagaagataaagataatatatagagagataatatagaagattatataggtattatatatatatatatcttctatattatgaagataatacagagttgtgataaaaattaaatgaaatgaccagacatagtggctcactgttgttttgttttgttttgtttttttgagacagagtctcgctctgtcgcccaggctggagtgcagtggtgcgatctcggctcactgcaagctctgcttcccgggttcacgccagtctcctgcctcagcctcccgagtagctgggactacaggcgcccgccaccacgcccggctaattttgttgtatttttagtagagacggggtttcaccgtgttagccaggatggtctcgatctcctgacctcgtgatccacccccctcagcctcccaaagtgctgggattacaggtgtgagccactgcgcccagcccatagcggttcactcatgtaatcccagcactttgagaggctgaggtgggaggtcacttgaggccaggaattcaaggccagcctgggcaacatagcaagaccacttctcttttatgaaaaaaaaaaattaagaaaaataaaaattaaatgaaataacatgtaatttcctaagtacattaagtacgtgcctactatgcgccggacattgtgctgtcagcaaataatagctcatcgcagatgctgttatcatcatcatcatcccaaagccacagattgagtctgtaggtgaggccctgcctggctccaaagattgtgtttttttctcctgttgctcccaagttcacctgtcccaaactttctagcccctaagtttgcttccttgcgcttttctggttgtgccatttgtccctgtctgggcagtgggctcaagctaaggcacagcagttttccagtccctttgagctactgacctcttttctgtcattgactgaacagtttccggtggctgaatcgtctgtgtaagagcttggacaattttttctgattgttaccatcatcgtgtttactgtgaaagggcttcctgtatagttgtttgtgttagcagcattgtctaaatgaaacaagagtggcaacagaaagggttggtgagcagtcctagtcttttggggtcacagatcactttgtgagtctgaagaaatttatagactctctcaaaaaaataaacgacaagacaaatacaagcccagcatttttcatgagacgttttccctgaagttgatctggaaggctatgtgctcttttgtcattgtgctactccacattcacagccatgaagggtgtcatgtttctgcagggtgtttgtatttaagggttgttgggcaatttggcaacactatacctgtttcattgatactatgtgctatttgcatttatttcccatatctgagatacgtattcacacatgagaactggcctggccattttgatgagatgtacctgctgatttgcacataaacacaagccatggcctgcatctagaggatcgactggagaggcttttttttggcccaaaacatcagactagtaggaattttattatgagttatagactaaaaggggggataaacttagcttcagcagggtttaatattctcaattcaggtaagtgtaaatctctacttttcattttaaacatttttgaaatttcagtctttaaaaaaatgcttgttttttttccttccaagttttaaggtatgggtttgggagaaggcagattccaaacactttaactcttcgacctcagacttgcttatgagcctctctttggaacatttccagtgaaccgtggagcaagcctgccacatccagcagccgtaggcatgatgatcactggtgccgatggcccctccactccctgcctggcttttgaggccccgcagaaagaaaggaacagaatcctttcataaggaaggccccagaatcctttctcctgctgtagctatgctgccagtgtcctctgtagatggaaatggaacttggattttgggtgccagaactgaattcatcacagataagattagttgatataaagctgtttctgatgagcagtttttcctccagagttttcatttttgctttttctaaattatacaaaataatagacactcattacaaagggaggatcataatgctccatacctggttttgaattccacttctatcacttattagatgcagccctgggcaaaacacacgccctctctgagccttgatttttctcattgaatgggagatctaattattttacctcataatactgctgtagggattgaaggagattggtataaataatggttttctgagagtctggtgtgtatttgctttttttcagttaatatgaattgagtacctactaagagctggtcactgttctagttgatatggaaccagtcaagagcaagacagagagggtctccgctctcatggtgctcacattctaatcagaggaggcacaagaacacaagatcacttcagttattaagaaattagaacccaggggtagcatgagagtcacaggaaggacccctttacgtcggatggccagcagaaccctccctgaagagctcaatgctttgtgacccccccggtcccaagttttccaggactcctacttttaaaaacactgcccctccaagtatataggtctcaattttgagtttggaaaatctgaccacatattagttctcttgttcattaatgggcttcccatttagagagtgagttcctggggcaggagccatgtcacaggaccttttgaaggtctcagggccaatatggacgacacttctcttgaacactcacccagttgggctgacatgaaaacctcatggtgggaggtggggggtgattagtttccagccagagcccattttgctccattgctgctttgaacattctggtttctaaggagctggaagtagtttctctcagcgagaatgtggcacactgtcatctcctgattctctgcatgcagttcttcaatggcttgttgaggctgcgtggaagcccagaggtcggggcagttccaactcacacactggcatttgaacggcagagcagtaagccctacacctgacataactgcattgccttcttggggtacggtacggatttttaaatgaccatttcagcctgctgggctgggcaacggtgatccaaactgatgagtcaggaagccactgaacagaaaggcaggctgcatctgactcacctgtcatgtcgatagttgacctccttttgtttgaccttgatttgctcagtgcaattaaagatgctgttgtgagtgcacttctgctacctgatttaaataaagtctaacatgtgacagctcagggtcttaaatgcacacacgacttaggcagacggacagatgggtgagtggttagcctttcacttacctctgaattgtaattctatcacaaggaaagggcttaatttcaggaacacggagtaattatttgagactagatacaatgccaaagcagcaggccttgattccttgctacagggcagcttaatcaggaaatggcctagatggccgcctttcaagtaggtccttgcagtagcttggcaacaggcacagggtcataattggaagaatttggctgtgagtgtctgtgggtgtttacagtgcactatagggcagggcttctcttatttatagaatattttgagcaacaagcagcagaaggctgaaaagccactaaaatctcgatttatttttaacaaattccatttttctcctcatcccagaaggagaactgagttattaaaaaacagttaaaaaatacatcattgcagagcatgccatatctaattatggggttgccagcatcggcctgcagccacatttcaagggcttcgtaaatcaaccatccattcaatctgtgaacttatatgactcctgttctccatttagatgtagagcgaaattattggcaagtgggtgctgatcagaaaaagttcttccctgtctaaattaggagatgggagggataaatatagaatagtatacttatgttctcaaaaggagataaaatcattcttcattgtccattatacttagctgcacaaacatccatcccattgcactaaatagccactttagagttttcacacattgcaatggcagttctgtgccactcaaaggcgcagtattgtgatatctcgctgagcctaaacctgagtgattattgctcacgtagtcatgaagagacataaacccagtgcttttttgcctgtgttgtcgtagtgtactagagctacaaggtgggccttcagagagacactagttttaagtatatctcattgtaggtggggaagcagaggcctaggcaagggagtgacttgcctagggtcccattaagagtcatggcagaggtgggctggggcggcagtctctgtgcttctcttgacagtgccctgctgtgctcactggagctactgtattaaacagatacccttcaggggttcacagtcttagaagacacaggcacgaagatggccaaacaatcagcccatgcataagcagaccaagatatgtgtatataacagattagttgagtggtagagaaaatgagagtggggaattttggaatctatttggatagcaaagcaaaggtaacatcagttgctctctgacccacttgggaaaagcttatagagatgctatgaagttttctaatggaaaaaggtgcagtacatttgccatgtgttagtgggaaggtaagtatgatgcagtggtgggtggtaggaggcagtgaagataagtattgcaactttggaggagccctgggaatggattgttgaggtgatttcataggaatacgaaagggagcataggaccagggcacaggccagagacaggcaatcccaagttccctggagtaccctgcccttttctgggaaagcaagtgggtggcatgagtgctatgttcccaatgctctggccccacccctggtagaagaataataactgatcatggtgggttttttctgagcctctgtatctttgagtagcattctggtagccaatatcagtggactggtgccagcctgtgtggtgaacctctatctctttcttgccctgggctgcatgtcaggcacagtgcctaagccggagtgggctttggggagttacttctctttctgaggctggaaggggcagagggacgtagggaaaactttgctagggagggcaaactgtgaaagcctctggagaagtcacctgttgggataccaaaggccagcggttttagaggatgcgaagaggccgggcggggttggtctgggcctaaactaaggctgtagcggctagcatggagaggaacaagcgacggggagtgattacggatgaggaagacgtactaggatttggctacagacagacaaccaaccagagagtaaaagacagtgacatgctaggatgtgaaccacctactacagagaaggtcagaggtggggagggaggaatcagggctgtgggcagatccagcagctgggatccaaagctgaagcccttgggttattgaatccattctttctgagaagagatggttgatcttcctgcccagggagttcctagccagactggacagtggttctcaaacatggtgccaggtgttgtcagatagcaaacaattagtttgtacacagaatgtccccaaggtcacctacacatatttgtttttcctaatctttgatacctacagccacttacctgctttcgagttctcagagttgagaacatataaatttgcagtaacaagtgcacaggaaatacttggaaaatggctgatgagctttagtttggaaatttcatttttttcttggatctggattataatttcagtacaagctagcaatttttcttgttggtaaaatagtttctagttttaaaattatttctgtagttaataaagttaacactatttcatgatggaggctgccccagctctgaaccaattttcaaaaggcagattctcctctttctctctcttatttcttgctcttgaacatttcactgtgttctagcaacttttcctgtgtgtgactcggccaggagactgacttgagtaagatccaggtcaaggggttgtgtgggtgggtcggtggtaaggaggtgctgaagaacactaaaacctttgcctgagaggagtctgggaagtagcctgcgaactggaatgaccccaggcttcctgtcacggtcatagcccatggagttggcagacttgatcactctatattgtgtgcccccaggtaatggcattagtcatcgatactgtcttttttttttttttttctttgagagagagagtctcagtctgtcgcccaggctggagtgcagtggcgtgatctcagctcattgcagcctctgcctgctgggttcaagtgattctcctgcctcagtctcccaagtagctgggattacaggtacatgccaccacacccagctaatttttggatttttagtagagacggggttttgccatgttggccaggctggtctcgaactcctgacctcgggtgatctgctcacctcggcctcccaaagtgctgggattacaggcgtgatccactgcgcccggccaatactgtctttaaatcgtccagagtaagaaaatgttgatagcttgttgtcacagccctgtcattttacacattccctgaattattgtctggcaccagcaggtgttccagaaacacttttggttctttgagccattactggtcattcctgtcaccactgccaccaccagatgtggttctgagagcattaagtaaaagttttgaaggttgtgtatgttaagactggtgcaaagtccatcctccttccttcgggctgatcagccacaccctggctatcagcacttatttactcattttcaaagtgacagaatggtccagtgggcaggggcataaggggtcacttcctctaaccacccgccagtgcaggaggatcccatctgcgcagtggctgcccatgacaggcagttccctagccccagtcggacatctccgcaccaggcatcctgctcctgctttatggacatctttggctcttaaaaatcctcctttattctgaccgcagatctgccttttggcagtgtttccttagtgacctagttctgctttttgtggcaacacagaacaaaggtcggtaggcatggcacaattccagcttagaagtttgaaggtagtgctcatggacccacatcctttccctctccacccactctatctccctccacaaggtttatgttctccagtgccttcagccattctttctatggcatggcagtcagtattaatcccagtaaaggtaacatgtatccagagagtgcttgccatgggccaggcactgttctaagctccgtacgtgaattgtcttatttatgactcaaaatcaccatatgaggtgagccctgtcatcatcctcattttaccaatgaggcaactaaggaacgagggctcacatcttgtcccgagccatgcagtcaagcagcagagcagagatttggggctaggcagtgtgactccagagcccgtgctcttagttgtggtgcaagactatcttacagcctttcctgcatagtgccaaaaataagcccatggtgcactagacttgggctggccctgctttaacttattttgcaagaaatcattagacaggagccttagttgaaccattttctgtgaaaccttcagagtttgttttgacagaacagactgcagggcagaggcatctgcactgtccccaacaaatgggttcatcctgtagctctgccaggccccacagggttcataaaatggtagctttagatcaaggtgacaaatacagggctcttgatgttttttttttttttcctgaacatggtgcctgagcaataggtttcttgtttaaagtgcttagtcatggttttatggccagaaagtagaaggagagaggtacctaagaattgcaaaactgggtcatctcttcaagtgcctaatccaatattcagtctcagagaacaactccagcagttacgggggtggaaggatgtgatgaccacctaccatccaaaactgggatgtaggtgccaaatacacattctcctgaaatgatccctggtgcctctagccaggctcttccaggagtctagagaaagatggcccatgacttcatccagagtctttgcttcctgtgctctgggatgcctgggcttttctggccacagccatacactgacagggccagaagggctgagatgctgggattgaaccatctttctctttgtgagttgctttccagatagcacgcattccggtcactattttccagagatttaagcagcaaagtgagggaccctcgggcatcgactcagagacctggaggggagcagcttgaagcaatgtaaaaagcactggataaaatctggttctaccaaaaatagggctatgagagttacctcacctccctgaaaggtaatatctttatctgaaaaatggggatgataatactactaacctggaagattgacaggaggattagatgagattctgcatggacataacagtccttggcatgatgtctagcagtgaagaaacataaatatgagaataataacttccttcttcctccgctgtctattccttctcttattctagtcctgtctgctgttgggttttgtctgttgttttgggtaaatagctaacctctctgcctctttttgtctgtagaaatgctactggttctgaatgggtacttcgcgccccctataggacatcgtgggaatgtgtgtgggtgatctggatgtcacagtgacccagacgaggcttttactgggggaagaggggaaggcaggggtgctagatataatgcttggggaacaaaagattgcccaacatctgcatagctgcctaatgctcagtgcattcttgtgggcaaaaccctgcttaaaattatctgggcctagagtctgactccaattaacacataaacacaaataatttttgcatgtttttaatatatactgaattttctgcgaacacagctaccaagtatataagatttacctatttgttatgaataggtgcaagcatttcatatatctttcatgatgttttctggtgtagcggtgccccaatacttacatattgatttacatgttgtcttatttttaactatatttcctttcttctttgtattacagttagggcattatattgattatttttggaattataagtgttgtaaggttatattacttacagatttcaagagagctaaagacatatttaaaatatttttattgcatttttgacaatatgaaagagcaagagagagagagtgtgtgtgcgtgcatgcatgcacatgcttacaaattagctagaaaaatcctaagacagactttaaatgaaaagaaatggtttcatagctcctagaaatgtccttttacataaggatatgtagtagaagtccaaatttttaactgcattcattgtcagagaaatgaggtgttttgatgtttcccctgtcccttttagaaagtatatgatcctaaaagagcctgaaacagtttccattgtcatattttttcatttttgcaatctctatttttttcactcctcccacctgtgcatatatatatttaaaagcgtccccatatagacttttaaagaaagaaaagccagccaggctccccactctttactaagtttgttttgattgttttgtggcctctgcctgcacctcggcctgagtcagactgactctgggagctgtgggcaggtccaagggaaagtcaaggaggtaatgaggcttctcgtgggggcaacttgtaggccaagttgggtgggttgaagtcagtctaccagaagcttcctgcctcaagcctgggcctctacctgtcctgaaacctgagggctctccagttggaccacgagggtctgacatccaggaggatccccaggagagagcaaccgtcactagggaatatgctgcccagcactgactgtactgagcagcagtgttgtgtgcctgttgggttgatgccatggatagccaggcgttcagaactgaacacgacacctaaaaggcaaacacgaactgtgaatgtgccagtgtcagatgctgccttggtggtcatgtgtgggctggcagtaagcttttggtcccttaacactcgctgttggaaatttcccaaggctttcatctagggtagctggtgtgtgatttccctgtcctttgttactcctatctggaaactagttgaaatcttttctatgatattgatatagttacagaaaatctgaatacttactactaagttttatagttctgcttagttcaaagtaacacaacctcataagagaaagtttgaaacaggtagagaaattgaaagatgaaaatcactacccattatctcagcccacaaagatagctactatcagcattttggtttgtttcctttcagtcctttctgtgtttatgaaattttattatataaataattcatgtccaatatagaaaaagatggaaaattgagaaattataacgttaaaacaaaactgacccatctcaccagttggagatgtcttaatattctggtgaatttttttttgtcttttttctatagacacataagaagactgggaaatattgtgtatatacgtttgtaccctttttcaccaatgtatatcaatgtatatcagttcactaatgaatactaattaaatgaaaatttattaaatgtatatctatttatatctattgatatattaacagatgccagtgcatatctattaaaagagtactatgtaagagatgatgttcttaaacataaaatttaatttaggcatgaaattactttgtcaaaagatatatcagtttatattcagatatacagtgtactgacctgcccatttaccacatcttcactaatactggtattatctttaaatagaatctttgctaatatgagcagtgaaagtggcatattatctattaaattttgacggttatgagattgagcatgtttttgtatacttactggtctttgtgtttcatcttttggggtttcctattcatagtctctgcttagttttccactgaggtatttgcctttttattgatttataagagattttgttttgttttaactcagaaaaggtagtattgcttcagttgtcacagagctttggagtcagacagagctgggtttgaaccctggctttcctacttgtgagctgagggatttcaggcaatttatctgacccctctcacaattaattagttcttctttgagaactaaacgaaacaacactgactagcatgaaaaaaaagcctggtgtgtggtttctgccaatagtttttgtgttgttatttttgttgtgattcctgcactgagtattttctcagaaaaatgaccttgagctgtacgactcatgcctgttcagacccacagacacatgatactcactatatccaaagctcagaaaaatgaaactgaaatcactgaagtttgtgggttttttttttaaattcttcttgccagaaggagacaaatgaaggaaaaaaaacaagccgatttcattttcattaagaggaatttgtagagttatttctggggtcaggcaggatacattcagacgaacattttagatctagggctgggaagatcccgagactcgttatagattacatcatcttcctccaagtgcacttgccaggcaaatggacaagtgcattttagaaaggttttcagttgttcacgtttaaacagaaaggatcacctggctaacttttagttaacccattgaacagatgtgccattcccccagcccattggttattcatgtccttgttactggtttttgatatccttgccccgtaggtgggaggagggatgggtatgagcctgccctgccctctttctcctacttgggacagagctgttgcttttatttgctgagtcactgaagcaatagagcatgtgcagagtcccagcctggaggtgggcatatctgggttccagtccctgctctagcccttctcagctgtgtgatcttggacaagttgccatacctctctgagcctcagtgtcatcttctatgtgatgtcgatgcctcccccaaaaggtcgttacgaggaccaaaggagacacgtcagggcaggaaccatcctaggcacgtgtttgatgctcagtaaacgggacgtggtcagtgttcagagttgtgggggtggcaggtgactgctctgtttcacctccactcacagcaacagggcctgtggtgtcacctagacatctcataggcatcccacactgaacatgtcccaaaccagcagctcctccctggatgggtggatggtgtacagggacctcttcctccagctgtcacatggggcatgtacctggcaagtggctttgcagccctagctgcccccttggctgggggcctttgtgcagttcatggactgggagtcacccccatgtctagaccgtcaggaaacccattggcttttcctttagagcataccaagaatcaacttctcagaacatagcaagagttgactttttgtcaccctgccgtggccactcagactgactcctcttacacctcacatcccattgatcagcacagcccctggaaatatgtctagaatccagctgcttctcatcacccccacacctaatacagagggctgagtcatagcatctcttccccggactgttgtagccgtctcctaactcagcttcctgccctgcttttacacacacacacacacacacacacacatggtatcttctcaccactgcagccagacttaaaacctaagagggatcatgtcactccccattttactcagagtcaaggccaagatccttactggggtctgcaggcccccacacctggccctctgactgcacccctaccttccttagctgtctcctctccctagcatgccccaggtcgctggtcccctagcactgggcagctccctgcggccctgttcactagctgtcctctgcctggaacacatctgtcacctctcacctcctcctgtccagcctccttggggcctttctaactgcctccctcctgtggtctgcctcctccccatctctgactttcctcccgagcacttactgccatccagcacccgacataacttacttgtttcgtttgcttgccttcctcaccaggaggtgtgccagatgaggacaaggatttttatatccctacccccatctgcagcactgccatggagaacagtgcctggcacttggatgccctcagtaaatatttgttgagagactaataagtgatcgtgggccagcatgccaacagtgtcttcgttattacaaaattgtcccgaattgaaatttggctactacaagcagtttgtggtggaaatttactcaaattaccaattctttcactgaagaaattacctggcatatgtgggttctcaataaactgtgttggattgcctcaaggctttggggcagtggtagccgtctgaggcctccttgccagtcaaccaaaccctgtgctgggtgggacataagagatgcccccagcatccttagctgatgctactatgtcaccccagaatccctggggcagcccacccctcagcagcagctgtcaccctgctgggttccgcttttcctcctgtgggcttcgtctccctaaggaaatcattgtccttgctttctacatcttatctccctgagcagctccaaaattctgttattcatatcccactgacctttctcattgtcctagtccaagcttctcacaggaggagttgtctctctgttttatattaaaacaaagcggttggactcttaaaactctattcacttttcagattctttggagtcctcaatgcttcctgctatgaaatgctgcgctctggaatgccttccagacccacccccaggatacctgtagccttccctgcagccactctcctcaactccctcctcgttcccaggggtcaatgtcctggatctctccagctttaagttccttcatgtcctcttgccacccctgctctcaccatctctgagttcttgtatccccaggatttcaacctgagtttgcatctcctgacatcacttttcccagccttctcccttttcaaccagcacaaggccatccacttccatggccatagtggacgccactgagcatgctaggtgttttcttctattcaactcatgtggtctgcacaacaacccagtgcggggaatccacccctttcacagatgaggcatctctagctcctggaagtcacctaacttgcctaggacatgcagctagtaagtggcagggctgggattggaacccaagaggccccgccctgaccaccatcctgccctgcctctcctcgggcacccagaatcccctcactctattgtcaaaacccaccttgtcctgcctgtctggtacctaggggagaaccctcagcctcttcttctgctgccacttgcttcctcttctgccaggaaggtcccacgcctggccagcctgctctggagacacgcccactgcctggccttgccaggaggctctgatgctctgcaggcttcctgtcccacggatcccttcctgcctgtcctggggtcccaccaccccactttgtagttggccttgctctttattgtggtgaaaggtgcaggccattccatccaagatcctataatattccttttctctgctgttgaatgttcttcccattccccccacattctcaaagaaggcatgtggctttcttcactgcgtctcggcctgccctgagtccagcccctgctgcctggcccagcctgtcttgttggcatcccctaagccctagccagaaacacaagcacctttcaggtgctccatcctaactccaccctccctcacactggcctctctccctttgccaccagataacagcagtgcattcttttgtttcctttagaacaagatgcagatgttttccagaattttcttcaacttcaggcagtaagttttttggtgaaaggagtattactccctgagtctgtagaaccaggctctctcctcttattctgtagcaattaaagacaaagacaggcaagaaaacaatgaaaagaaacaggagccaggctgatgcaccttcatttagctggtccttgagcatgactcattgatccttcttgcttccatcagggattgcaccctgtgccctctttgaatgcaggggcatgtcaaggccaagggtcaggaagagagctttggcctcgccagcctggtccccagagtggaagtggcagggcaggaggggtgtggcagacagagcacatatcgcccccagccttgcccccagatgttgagtgctgggtgccggagtgcagaggggaacaaggcctggaccctgcctggggagaggcagcacctgggagatctttgtggcttcagatcccatgtggtcctccaggtaaagcagagcatctctggggtctaggctgggggaaaactcttgcaaaaaattcctggttctgggacagaatgcatggggtctgcgtgaggggcagaggacagtgccaggccagtgagcacgcactgggcaaaggaagtggccagagaccactcataagaaaaagtgggacatgaacctcagagcctgggctgctttcagaggagccaagagcctgggaaataagcatcttctggtgaggaaatcagcagggggaggggagggtcatacaggaggggacttttaatcctgaatggccttgcagggcatggttcccctagtgtgccccatggaacccttggctgttagatgtgaggtgataaatggtgtgtggatgcatacacttgggactcagactctgctgcccttagactttcaccctccacagggctgcgtttaaaggtccaagaagccctgcagaagaaaaacctaactattgaaccagcattccctatacgtatttggcccctgattttttcccccgaataacatcattacaatcctatgggattagtgttccatggcagaactttgggaagtgttttttgaagaatttgtaaatccctgcaccctctggactgtgcccatttcttagattgcatggaggctgtgctgtacagtggaaggagtatgggctttagatgggactggcctgtgtttaaatctgctttcccattatacaaaatctctgatcttgatcaagttacttactctctcaaacttagtttccttatctgtaagacaggggatgaaacattagctagttgtcttatgaggctgttgtgatggttaatgggaagataataatgacacttacagagggcttgttatgctccagacaccattctgagcactttatatatctcacttacttttcaccacaactgtgaggcaggtaatgttatccttatcctacaggtcaggtcaggagaccaatgacacatacaggctaaatgttgtgcccaacatcacacggctggtaaatgtgggacctaagatttgaaccctaggcactcatacatgatggggtcaggatttgaaacttgaccgtcatctcccatcagagaacatgctctgaatcagtatgttctaaagggtctagagcagtaaaagcactaattggtatcagttcccttttcagatggttcgtggatatgttagggggattgatggttcctgggactccaagtcattctgcagtcattaaaatcagccctgttgaaagagtaatctcctcgatctgcttgcccactcagatgctcccattgtgaccattttgtttgctctgctgcctcatcctgggccacttcaatttgggtggctgctcagcgttcaggtggagtcgggccactttccacagccatctcatctgtggcctgtgcctccacttccaggaccaagagtccccccaggatgcccagtgagttggtagcttgttctctttctacacctcagtgatggacttgacaaagggttaagaagacatcccttttatcattcagcaaactgagtgcctttactgagctagatgcatgccctgggggaactagcactgtttggtgacttagttagacctctgaatccctctaccaaccctcagtagctgtctgggagactgggattctgtggactctcctctatcaacgatattgggggtcttttccacaaagaccagcctggttttgattgacaaagtgcctcagatttacaaatcttaccccttgcaggatcctctcaactgatcaagccccatagctccaaatgccgtctccttgattgatgtttaatttggggatccacaagcatctagagctaccagttgaatttgggtacccaagggccacaaatgggcccccctcacaccctgacccctgacaaccagcacctttgagactgaagtaccactgcatatagtgctgtcctctgctcagggcattctccctaccagccaggccacccggcaaacccctgcaacacctcataagacctcttcgctggtctcatctccttttattaacacctcctcagcacccctccacacacacccaagcccacaagcaaatcattttttcatctgttttgctcttgtaccttacctatgctccactaatacaaaaaaagcacgccttcctcaagacacttgactgccacctgctggagagttgtcatcatggctcaacaaatatctgccacttctaaacccccaggcacctctggagtagggcagtgcattgcttgtacagctgtaaacatggcctgcctgttgaattggtcatgctgtcatgtacttattaaaacactcgtctttctaactggactgaggacatcttgaacgtaaggactgccgatttctgtcttcgtccccattgtggcttctgctaggggctagagaaatgcttattgaatgatccttgtgcaaacacctgttaccttaggttcagggcatctgctgtcattcagtgaaggtcttctaaatctgtctgttgcaaagcaaggctcgccacaggctgtcagagtaaccatggaggtcggacaggacttgcagtggggacagggccccatcagcctctcacctctgctcagaggcaccaccctctgaacagatcagagcataaacaggtcagagcaattcagcattcattccctctacagacatcagggcaggcaccatgtagtggagagtggggccaggggccatctgccatggctgtttgggctggggaaggagagcagtacttctggagcatgtgctgtgctcagggccagctccctgtaggtaggttgtgggaatgcagaggtggcaactcaagcacccctgctggggattcagagttttgtggagaagtagatcagtaagcacatggataccagatagggttgtcaaggatgttgattcactgttgtccctattttcctaagctcgccacatcatggaaggctgctacccaagtgacattcttgggcttcaccaagtgttttaacagagctccacccagctgtcacactaggggtaacacagtgggccagaaggagaggcaggccttccctggggtcccattttaaaaagggggaagtcctctgttcttttacaacacttgtttaccccaagccattcagcatagtattacttaggtcccatacagagaaccttccaacagatagctctccttgctcaggcctgtcctgatgaactccctgatattcttccaggtcttaaaagagtgagagctgagcatttccctctctgccctggctgccaggaagctcagagataacttgtttgctcagttcctgtagctttcctgacccaggacttctttttcttataaattctccttgttccttttccaggaatgcttgctttttatgttttgtttgtttatgttgcttttgtctctgtattatactttggggggtggtttttggaggcaggattggcagcagccatggtagttagaagcaccagcagtaaagctggacacacctgggtttcatccccacttgctagctgtgtcattttaagtaagataagttgcctcttcagttctcggttcctcaccttgaaaattgggataatgatcataatgaatggataggttattgtgaaaattaaacttgtttattgtaaatgcattgtttcctgttcctgctcttggatcaggcttgatctgtggctgtagaatcctagtcttaatttccttcttcctgcctgtgtctgtcagcatatgatgagttgtacaatagtagtgactaggggaccaaccatcccggtttgtctgggacggaggggtttcctgggatgcaggactttcagtgctgaatgggaaggtcccaggcaaatggatgagtcggtcaccctggtaataaacaacctcaacatctcagtggcttactgtagcaaaggtttatttcttcgttgtgctactgtccatccagggccttggctaaaggaggagcctctatcccaggaaattgacagtcatgggcacagacagaggaacacatgttaaaggtcctttagaaagttgtggctgtcacttctgccctcattcactggttggggccagtcacatggccaggcctgccaccaggctgtgcagaaccttcccactgggtgggacagctcagcctggaacactgatccactctgccaggctcacctttctcttcttttgcattttagggtgctggagcagggaccagggaaaggagagagtcacttggtctgaactgggggtcttggatgtgatcatcttcctgtagatggtcggtatgggtttcttaaggggcagggttcagcttcaccctgctctgctcagaggagcagctgtgtctcctttggacgccttctagtggttgatgccctcacctttctcagctgccaaggcctctctcgacagggcaggctgggctgtgacttctcttccaccctccttgctccttcctgtggagcccctgagatcctttccccatgctcctgggtggaatggagggtgccctctcacattcttccaaggcatcttgcgcaagtccctccatgccctgctttctctggcggtccagcatgcctccatctcacctttgggactctctagcttggaagtgggcacacctgcagcccctgactccaggaccacaggctaggctctccccaaagcatcctcatcacacaccatgtggatggccaggtcagggcggccgtcagagcccaccctcggcaaggataccctctcaaaggcacctctgttggctcaaatcccttttggaagtagcccagaaagaggctttcttttttcttatcttttgttgttttatttattgttcttgcatctaagaacaccttcttggtcagaaaacagttttccagaaataatgttaagtaagtgtcacaactggtttagctccctaacctggtctaagcatataagagaggcttttgaggctgggcgtggtggctcatgcccataatcccaatactttgggaggccgagatggagggattgcttgagtccaggagtctgggcagcatagtgagaccttgtctcttctaaaaataaaaaattagctacgtatggtggcacatgcctgtagtcccagctacttgggaggctgaggtgggaagatcacttgaggccaggagttctaggttgcagtgagctatgatcacaccactgcaccctaacctgggcaacagagtgagaccctgtctcaaaaaaaataaaaaaggctttttgatttttgttttgcagaagtaccaaaatctatattagcatttattatttttatttctataaagtaaatttgagtattgggaaaattgatcaaaatgagaaatttcatatggagtttagtacttgaaatttggatccttcatctaaatttcagggaagtcagggctgggcatggtggctcacacctgtaatctcagcattttgagaggccgagatgggcggattgcttgagcccaggactttgagaccagcctgggcaacaatgcaaagcctcctctctacaaaaaatataaaaacaagccagacatggtagtggtgcatacctgtagtcccagctacatgacaaactgaggcaggaggatagtttgagcccaggagatggagattgcagtgagccgagatcatgccattgcactccagcctgggcgacagagcaagactgtctcaaaaaataattaaataagtaagtaaatttcagggaactcagagaacgagaaaggacatgaaattgttcatttatttagcatttgttgagtaccacctggagtgaggcacgagatcaggcacaggagacgcctataaataaggccctacctgcctgaagcttatgggaggtggaggagacacgcctacaagcagagaatggtcacagggcgtgaaggagcctgggcaggagctgctgcaggagagccagggagagaggatacagctctgaaggcttctccaggaggtgtgcccacgggcacaggaaaggaaagcaggagtttatcaggtgactgggtggttgaaaggagccacacctgcaagaaacgtgggcccagcagaggcagggtggttttgggaactcttgtcttttagtctgtcggggggctttgggtagcagatgggagggttgggctgaagactaagcagtgtttcctgctgggtgggtttgaactttgtttggaagacttagggggaacagtgaagctattgcagtggtctgagcaagggggtatcccgcctctgaccacagtggagaggggatggggctggagacgacagcagactgaacagaggcagtgacaaggatctggagggaagtggctgggcccatcccttagagggctgtgtgggggctgtggggtgtgggaggaagagaggaaggaagcccagggtaggttctgggttgctaatttgggggctgggaggatagcgtgtgacctaaacagagaatcagatttagatggaattacctatattaagcctggggatttcatatctatttgctgctgctttaccagttgaggctcaagaatgagaagcacaaaatttctggtcacattatttgcatgtgcccagactggggttaacagaatcggacagtgagcgttcctgaatcagactgcaatggggaatgaatgccttgggaggctggaagcagttgtattcgcagatattcatttggagatctctatagcgatcgaggcaaagataccccaaagactgcaagaattagccagtggaatttgaaatgccaaaattttttttcagaaaggtcaggaaagccccgtttaaaatctaaattttgccatctcaaggcagtgcagggatggattaggaggatgtggggtgacccttttcttcctttcagagccagtttctgccagacacaggaatcctccacatgagtcatagggtggagaggagacccctcagtcctttcagtaaggtgggagggcagtaccgcccggtggctaccatgaaccctgtttcagaatttctttcttaacttcgtgtgtgcccaggtgcacttgagattcactgatgttttctttagaccgaggagctcgcttcagcagttagtttcaggtgttggctctgctggcattatgcttcggcttaatgttttctgaagacttgttttctgttgtttttcattgttcttgttgtctggcttcaggccactaccttcaacctagcaagagctgagtggtgccttcagcagtgaggtagcttctgaaggccaccactctcttgctgtgtgactttggctagtttctccacctctctgtgcctcagtctcttctgtaaaacggagaacacaggagtatctccctcatagagttactttcaggtttcaatgagttaatctacataaaacaataaggatagagcctgacacaaaatcacactcaacaagttttcacaattatgattacttgacccagtaggagaaataaaaaacacaactaacttccttctaaggacatgcccaagaatccagttttagtaactttgaaggcattgtttttcaccgaaaatatctcctgccagattttttcatgtgtttgcagcttagctttaacaaggagctgaaggacggccaggcagcaaggggtggtgagtgccggtagagtgtgacgagctcgcccagccttcctccctgtaattaggagtcatgaaccatctacaccatctcccttagctaataagagatttttacatttacttacctcaaagtgacctgtctgggttttcttttcttgtggcccccactgtaggtttttggaagaagctgaccgcctgaaaagaaattataaaacatgaaaatcgctttgaggtgaccaagtccagaggcccctaactcctcccaagctggatctggggtgtaagaactgtgacttcaggtaacaaagtagtatcccctccctgccccctgtgaactcatgattcttggtagcttgcatggcagttcttcctttaggaagtgtagtttcttccaggaactctgaaacttggggtattctacctcatgcggttgtttggctggtcaaaaaagggagtgggggattctggaggtacttcatgtctgctgcatggcccaagggggccagggctccataaatcaccaagaccctgagggcagggctctgtactcattcctggccctgcttctgtaaatgttaatgacaaaataacaatgtcacccacccaacagggtctttaatatgattaaataatcatgaaatacttcttgaaggataaatcagagagaatagctaggaaatttccaaaaataaagagcagtaggagagtatttgttctgctagctattaaaatgtattctaaagcacagttgtaaaaacagtatagtactgtgatggaaataactagatcagaggaacagagtagagagtccagaaataggtgataaatcaataaaggtgtatttcaagttagtggcaatgggatgcatggactagcaaatggtgttagaaaaaatctcctatccattagagggaaataagaaattcctaagcttaggtagtatatcaaaataatttccaaatagcattaaattaaaaaaatcattaaaatcttagaaaaaagaatatttatattattttgggtaagaaaagacttaaaacatgtcacttttggtcccacatacaaatatcgtaaacaaagttaaaaagcaaaagggtgggaaaagtgtttacaacatcaatgatgaacaaagaattaatattcttagtatacaaatttattcgttcattcaatatttattgagcacttagtatgtactagaaagtattctgggcactaagggcacaagcagtaaataatgttcctgttctcctggtacttagaccctgatggagaggactgccagtgactatggtagattattgtaggtcacattttgataagggctaaggacaaaacattacgtaggtggctgggctagggaggcttggcagggtttgcattatgtggatattcaagggggcttcactgatggaatgacatgtgaagaaaaagggaaagtcattgaatgtcgagctgatagcacatttgctgtttttggaatgtcgagctcataggatttgctgatggattgaatgcgggttgtgaaagaaaggagtcagggtggcttctaggtttggggcctggcaaccagaaggattgacataggaatgactgagaggcttggcttggagatagagttttggttatggatgtttcagtttaacatctctcttgtatattcaagtgaggacgtcagggaggtggtcggccataaatatctgtaattcagggtgacatctaggctggagatataaatttgggaattgttgcagtgttgatagtatttgaaagaatgacactagctagagcccctggagagtgtgtgtagatacagaagagggcccaggacatccatgggaccctcccttagagttgagggagatggagccagctaaagagagcaaaaaggagtgaccactgaaatggaaggagtcccgtgagaagggggatctcccaagccaagagacagtgagaagggcgaggtcagctctcctctggatgtgctgatgggcaaggagagaactggccattggatctagcagtgaggaggtcactggtcaacccaacaagggctgttttatgggaatgatggggagagaatctgtttggagttggattattgagaataagaggaaaaaaactggagacagagaaatgggacaatagctggaggaggatggtattcaagtaagtttatttttcccaagatgggagttacataactcttgttttcacccaagtggaaatgattcagtagcgtggggagagtggatggtgcaggattgggctggggtgagggttctgaaatggtggtctcgaggaggtgggagaggtagaatccaggcatgagctggggaagggatcctaagtaggagcatctaaggaggtggtaggtgtgcacctgcctcttttctcagttcactaagaagcagagtcctcagcggagaatggagactaaggagacgatggaagtttgaggagagagggcaaagtatgaagtccttcatagcagaatgagaaaataaatggccaggggaatgaaggattgctgggcggcatgcaggcctctaaggggtatgtttctccagccatgtcctgttacacaggtgaacacggggtaggaggccattgtggtagaaaaacaggacatgagcagacacaacgtaagacagagaaacgcctgtaaagagaaaaagcaacatcagtaatagctgaagaatacaagtaaaaacaatgaggttttctttttttctctttagactggcaagagctcttgttggggatagaaattattgtcgcttttctggagcacagtgttacagtatgttccagaatacaacgtgtgtcccgttttgacctgtcagtcccacctttagaaatttattctaagaaataattgctcaaatgcaaggaaatatatgcacaaagatgttcaccccagcagtgcttatcaaagtgaaaaaatggcagtcatctaaacaggaggcagctggttcacttatctgtcggcctaacagtgatagtgggaaacagtagctcacactcaccctcctgttttgcagatgagggaagttgggtccagagaggggtagtgacagctccagtcctactccacggagctcagaccccctggctgtaggcaggcaccctgcccaacctcttcaactgggcttggagtcagagtcccttgcaaggcacttgtcaagcccttttcaagggccggtttgcttaatgcttttaaaatacgagttctcaaaatgttttgcaaatttgtttacaatgtcttcatttcatctcatggctttccttgcaaaggatgctgacagtggggggaaaacaggccgactgcctggccgtgatagaggggaccatattttcctgattcccaagtaagacttacagtggaagaaaggatattttctgctttcttacagtgtttacaaaagtcataacaggatgtgaggactatctggctgcaacatctgtcaccccattggtcgccagagttgattgggctgatctggctggttaggcaggtgtcccattcctccctcaccactccatgtgcgtccctcccaaagctgtatgctcagaaaggatgaccatccccgatagaggaggactggtctttggtcaagggtatatgagtagctgcaatcttctgctagggacccccaaacaagctctcaaaagtcataacaggagtacaaagataataaggaacttgcatttatttgtttccttgatcatatgtttattgattagaagaaaataaaattagcagccagccgtggtggctcacacttgaaatctcagcactttgggaggctgagacgggcagatctcttgaggtccagagttcaagaccagcctggccaacatggtgaaaccccatctctactaaaaatacaaatattagccaggtgtggtggtgtatgcctttagtcccagcttcccagcgttttggatggctgaggcacgagagtcacttgaacctgggaggtggaggtggtagtgagctgagattgcaccactgcactccagcctgggtgacagagtgagactttgtctcaaaacaaataaaaaataaaaataaaataaaattagctttgtgtgtggagaaaagggaggaaaaataattagcattgtcagagaacatctgggttatttggtcccctccgtgggaactgccctgggttttcacttctagagtttctggttctggtttaatttttccacgccacagcacagggaccgagaagctgctcagcttctctaggcttttatgtcttcaccagaaaaatgagcgggtgggcttaaatttcctacaaaaactcttaaaataaatatgatgctctttccattctatcacatgcctgttctgggtccgggggtgtgagagatgcattagtgctgctgtaaaccagccccgggtctccccccccggccccccaccaccaaacccccaagcaccaacctgggttctccaccacttttgagagctcatcgaaataaacacacctttgtgcctcttgtaacaattccagatcatccaatggcagaccagagaatggacatttcttcaaccatcagtgatttcatgtccccgggccccaccgacctgctttccagctctcttggtaccagtggtgtggattgcaaccgcaaacggaaaggcagctccactgactaccagtaaggcctttggggcatgtcttcctcttgttaaacttggtgtcagttctcgggcatggaacatctagcagccagctactgtttcatcctggaaaaggggatgggaataaaaaacccaactctaggtggcgacacagttggtttttggctttaccttcccctagtttgtaagcaagaaggagccttcagcagtgctgaggcatttaacttccacttcctgtccccaaaatgttctacacccagagaaaaagaacagccttaaggccaagttctgtcttttacccctttcttcgtcttctttctttgctcctttgagcaagagggttaagtctatgggtgtcatctcagggggttcaaagagagctttgcctgagggcctctctgaggaagacagcaagtgtcaggtgcttaatgaatgtttatggaaggaatgagtggaggtcctctctgaaaacaatttaggaacattgatgttgtccttaaacattatttaaattagtatgaacttgttatattaaatagtatttttgtttatttttagacttgttgacttttcgtttgagtaagtaaattttcacacttacagtcatcccttctatatatgtacaaacacctagggaataaggcagtgtagaatattcaaaggcacattttgttttgccgaagcacctgcgtggaatcttacccaaatgtccatttaagaggttttcttttgtttaatgagggaaaatctccgaggaggtataccccctacagcagatgtcctttctgctgaagttcacaggtcgaatttggggagcacaatggctggaggtcagatgcccactaggagatgctatgattaatatgtaagttatcccagatgattaagacagccaacacccaggggctggagagtgggtatgagggctgtgagggcgttcttccatagcagtaactccccagcagaaagactgcgagatgttggccacaaaccctttgtcttgagcaagcgctaagggagccactgatgtgttctaaggcctctgtcatctggacctgtgggttccagcctggtcaccacccaagatttcccttgtggactctggtttgctaatcttctgtaattcatggagactcaattaattaagcaaccttaatccctttcactatcattttaatgtaactgaagtcatctgtgactgtcaggcagagctttttctcacctgagattatcacctggcctcaaggaacagatagaattctagacaaaagggagaggggagtttttgtccttccgtgcggcctgcgtgatctctgaactttagaactagctggggaaactctctgcctgtgaggaaccccagggcgtctaattgggaacactgttctagaatgcccatgatatgatccagtgctcctagaaacagctatttttgcccttgggattacattgtttgaagggccatgctctctcctttcctgtgggataaaggaaaaaggagagaggcccagctggcagtccatgccctcctgataaatgtatggattggagaaggcggtgagggggatttggaactccttcctctggggatttcagtctgttttcttctactgaaccacaggatgcaacgaaacttggttttctgaagtctgtgaaagggagggagatccttgctgtgaccccaggacttctgtggccctcagccccactacgcccctccatcccaattcctaaaatctaggggttcccacctacctgagaagcagaatatttggcagtagtgcctttgaaaagctgcctggggctctgctcagtactttgttggtactttaattccaccctcctcacttcgtcccttccctgccaaatagatatgtatgcacatttatctttgatgctcaatatgttttgcaaacagaataagcttcatttatccagaatgatggggggggagaatgagaggttatatagatatttcaatcctatggttaactaagcatttttataaacactacatattcccaattttcaaacaatcagaatatggtaaaatatatgttaacacacaaactcttttgagatgataacttttgtttgataacctgagaagctggtccaggttttatagtaagttcaagttaattttcatttgttttacccttattatacatcattaattgatactgtggctgttcgaactttatgattgtttggtttctggataaatgagagccttctgtcttatgataagaagctcttctgtatgtctttattaacatgcagtcacattctcttttgttttttcagagaaagcatggacacagacaaagatgaccctcatggaaggtaccatgaacctagtaatttgaacttcagcatccttatagccattttctttgcactgttacacattctgttacttggggcagcacccatgtcctcaactggagatgagcaaggaggccgtgagcctgtgggcgctcactgtgtccctccaacccccagtccccttgtgtgtctgcagagagatgacaggatcaggcagaagaaaacagcaatgtgtaactttgccattcatctccagagaattatgtttttatcttttgctttttcctccccccaggttagaatatacagaacaccaaggaaggataaaaaatgcaaggtaagcttggaccttattttgtctacaaagcatcctagttctggttgcttagagagcagctgaggaggctctgcatgtttggtcctgtctaagagttctgttgggcactgtcacctccttagggaataggcaggtagtgggccttggccgaggtggccttctgccctccatgctctccatactggctggcctttactctttgctgtctaagcacctttaacctgaagtggatttgaaggtagcagaaatcaatcaaggctcaagtttttccccagtcttcagcagagaacgtcttcctgactggagcgccctccgcaggagacatggctcagtgatttggttcctgggctgggacttgcctctgtcaggggcccctattgcactgcgagttgcaactgaatgcaccacatggggcatgctcggtgtctcgagtagattctctgcctgggtctgtcctgcctccagccacacttgctgacctcttcccattgcgtcctcagttcttctgccgttagtaccaggctgtgttctgaggctgcgtcatgacagactgatacagggggctgcagaaattggctgccctaaggcttcaagctcttccctcggaggccagccttagcaggagctcccatggctctgtatctgcggcagctgcagcaaactacatttccatcgttgctgcacctccttaggaggaccatcaccaatggcaggtgcacatcagtcagtgtcaccctgcctcagcgggaggagtgtgacattcctcagaggaggctcctggggacagatgtagcatctgctgcacctaggtggggacctagttttgatccaaggatgacggcgttggttactgggtgccctagtcagtgaggctgtgactggaaagaattggtgccctgcccaggtcacatggccacacagcgggctcctcacagacctcagggacagcccacggggctctggatgctctgtgctatgaagccaccacctcccttctctttcctttcacccccatttcaaaatccaatttgacaaaggctgagaggaaaagaaacgaggagaaatgaacaattcagtttactctgaagagacaatttttgtagcttttctcctgaattctaaagatgaggtaaacataaaaaaattaatactgacctggcagtgagaccattttcttggagactttagttgaaaagtctaattttaaacattctgcaaattctaaatttgccttgtcagatgaacattgaaaacagttacaactcatttatttttgtcatcttttcttgatgcttggttacattttataagaaatcgtttttcatattgttgttcagggaagctcacagtcagattgaaaagcggcgtcgggataaaatgaacagttttatagatgaattggcttctttggtaccaacatgcaacgcaatgtccaggaaattagataaacttactgtgctaaggatggctgttcagcacatgaaaacattaagaggtgagaccctgggctctattgtcctttatgtccttgcccacaaatgttaccacccttgcctagaatgttcctatccctaaggcagatgtttattacttgcaattatgtagccttcagtagtatgcctttactcttcagcaacagccgtgatgccaaatgaagtgattattgagcttatgtgggttttgacatgcaattttgcagtcacacattctcagagcatagaaactgtgctttgcacgtctctgtatatgcatgtaatcaggctatgtgcctatcagagatgatactgctctgatgtctcacatcttgcctatgtttgtgcctggatcccatccttacaattataacacgcagaaatgtaggtgcacacagtgacacagaaaagtcagttcaaagatgaaaattcatcatggttcctttgaaaagtgagtcatgggttgtgggttctcgcgacattttgttgtcaggaatgaacactgaagatattttcatcttcctggaattttcccgaaccagatccactctttgtgagggaggcagtattttccttcttttctgagtgtggggagggtgagaaaacataggcagaaaagtggaagtgacttatccaaaccacaagagaaatctgaaatatatcaggcattttagtgaatgctgttcctggaattttccatagctagtcttggacttttggaggaaattggaaagtgggcgctcagtcagatctctgacctgcgtggtagaagaattgcgtctttttatatttgcacaaggccaccagaaataagaagtagctggttttgtctgactttagatcattacccaaaaatataaatgttgtatcctgtgctggaagaatggcatttaaaaattcatattagcaaagataacatgggttaaattattataaactaatttctattaaattggaaaaaagtggcaaatctcaagttacagtaaagagcagggatagggatcaataggatggttgcaacacgtcctgtctccttccctccccatggtactttgaattgttacagatccatttccttttattccttcactattctactcgctattctacagactccaaatcatttactgctggcatttttctctgttaagtgattgttctcctgaaaaatgccagattgacagccttttaaacctaagtcttgtcccctttcagtcctgggagtgcgagctgcattgactgaagcaatgcattcctccacattgccacgctcgtttaactcacccctgatgaagagtaactcacattaaatgccttccacaatatatttactcagggcctggaagactgaatggtttcccaagaacatttagagtggtgatttgaaggactaccagacaacccatttaatacagatcttaggaggagggaactctctgaggagcctctaccagtttacttccagagctgccttctttcttagaagcagattgttaaacttccttctattatctcttggttttccctgtaatgagaaaaacaggcttgttaggtctcctgtgggtaacagtgttctctcttccatggaattctctttggcttacaggattctgtccaaagccagatctaggctcatctcagttaaggcctaaacaataaaatttaaataccaggtcatagagactaggccacttacagaaggtttgaggcagcaagttagaatgagacattttctgaatatcaagtataccaattctttctctttttgcccctaaggtgccaccaatccatacacagaagcaaactacaaaccaacttttctatcagacgatgaattgaaacacctcattctcagggtatgttcaattatgggattgttttacaacgtttgtttttataaattttcaagtaagtaccagcatgtgggaatttgatgtttcaacactgagcttttttttttaggcctgcttcctctctcaggtccctccctttatcttattgtttggacaggcttcacatttcttccacaaaaccattctcctcctcttttaacctcgtctagacaaaaatggaaggtctatgccaccgcaatttaaaatcagaagagtcaggatttgttaaaaataagggggatttgagaatcacatttctgcatgaagattttaggaagggactgaaaccaacaacaattgagaatttctcttcacctgatttaaccactagcacaaaaaagtccacctaaatctttacaccaaaatctcatcaaaataacaaaactgtggctcacgcctataatcccagcactttgagaggccaagacgggcagatcacctgaggtcgagtttgagaccagcatggccaacatgttgaaaccctgtctctattaaatatataaaaattagctgggtgtggtggcagatgccttcttgggaggctgagacatgagaattgcttgaacctgggaggtggaggttgcagtaagctgagatcactccactgcactccagcttgggcaacagagtgagactctgtctcaaaaaacaaacaaacttacaaagactagtggtccaaaaaagaaaaataaatgcaagagatatatgctttcacctgcttgacttgagtgctctctctgtcttgctaaatctctgctgggagatggttgaggtggcactatgggaacctgttgtcttccatgaagaattaggtcggcacaaagctctaagttgtgttactaggtaaagtgagattaacttgggaattgaagggaaagaaactggattcagaaacgtgttcttgtagattgtaaacagatgaatagaaaaacgtaactaaaaggaaggatacccgcttccacctcccacaaagtcagggctgaccttacctgcacagccaacagaatcttcctacccatctttgagcagaagtttgcaaagctctagagtagagggtagtccatctggaattttgcatcatcactatccattttcagctctctataagcctggcctgtctgctcactccagcattctctatttatctcctcatgacgtgctatctcaaattggaaagcattcacctgcaaggaccagaagacctgatgaataaatagagtttaatttctcaagtataactggtctggagtaggttatgttgggttgctgcagtggttcaatgaggtcaataggaaccaggttctttgtctttgcactcagccacaccaagctagcatgctagcttgtttccttaatgtagccaggtacctttgccaggtctaagtagccagacccactgtaaaaacaggggtaaatgaagctctagtctggctgtcctttttatcaagaaaggatacaccttcctgaaaactcaacagtggacttcagcttattcaaaagtgtgtcacttggtcacgcctagctgcagggcagggtgcagaaacaagtgtttatagattttccagcctccctggtggagacaggcaagagagaaggggcctgggaatggtgttgggaattggcttccccaacagtgtttgccacacacactttccagagccacatgcatttgctcgattccttccagaagtgactcccacaacccaatatagtgcttcaactgtggtctgattggcctgaggttgaatgggactagtgccttccttgccaaaaaagccatctgattagtactgtatcatttggggcagctgcagtactgcctcctcccccttctctcctgaatatgaattattgttaggtcaggttttttacatcttgtataggtgcttttttgaacttaagataggacttctctttcatttctgtcaaaacctgtttgttgaatggccccacagtccagcttgtcattagtgacccttggaatctttgtgtgacttgtagatccaatacatgcctctgtgcctttcatccttgtttattcataaattcaacaaacatttttgtttacttactagatgcatggcattgttctaggaacatccaaatcaatgataaacactttagggtgggaccaggctcccgatcaagtgagtgatagtcttttggctaccactctcaggacacagttattcaaacacccaactttgcccacctctccatccttttcgtaaagatgtccgtgttctcagagaggatttgctgaggttaaaatatgaccgatgcctgtagcatctcgagagctgccgtcggtgccagcttcatgggcatgtgacctctgcagtttcacaaggccccatgcttggtttaatgccctgtcaccatcttgaaaacgtaatttttgaacaaggatccctgcattttcattttgtactgggccccacaaattatgtaactggtcctgattcccatactggtaacagatctgcagctgtagatgtgataggcctgcctctatgcctttcattcttgcgtattcatgaattcaacaaacccttttgtgtacttactagaggcttggcattgttctaggaacatccaaatcaatgacattttgggctggggtacaggcttgattattttaagaaaaagaatctatgtctttatttcatatatatatatatatatatatatatatatatatatatatgtaaaataattatcaagcagagtcctgtggatggacaaatttaaaaataaataaaacaagctccttttgcagtggcacgtgcttaatcgttttcttgttgctgcttttcttaataattttctatcagatacccatacttaccagggtatggaacaaggattatcatgctatctcagctaaatacttcatgttgggcttgtctcttctactcccttgtttatgcagcactcaagagtgatctctcttgcccgatgaaggttttgtcacctctctagcacgtgtcagtggctgtgaaatactgtccagtcccttatcacttccagggtcccagttccagggacttgcttccacagaaagccaggtctactcagatgatgttcagacagtttggccgcaggagctggacttctgcttttcctcagcaatgcaaaatggacaaactgctttctttactaagtgctttcaaaatatctttaataaagtgtatgtcagggatcagtcaactgtatcagtttacaatgtctacgttagtctacttccccatgttttgaaaactaggcagaccgtaccaaggcctctgtgtcttttattaaccagcaccatcttcccaagagtgaccctgccactggctggcccctgtggctctgtggtgctggtagtgttctcacagcttctgctccttagctgtccttcgggcccggctccttcacagatggtctgctggccagggtgctatggagttggaatgtccagagcctcccctcgctgatgcattcactgctttggaacctgctggctttcctctggagtactgaaatagctttacctgtgttgtcggttcaggcctgaccctgcccagcattacctccagggtgtcacagttcccttctgtccaggtacctttcaagccacattgccacatcaatgaaaagcctcaaaaacacttccatgagatacaagattatctgcaaggcaaacgaggaagtttttaataccctatttgttgacagaatgaggcttccagcagatggtgcttggaaagttacttccccctcactgtcatcccttgcccctgggccagcttagggacctaacttaggaaaggatcctccccagcttccttctggctgagtagcctgccagggtcttaagcaacagtgattctgttcccctctcactcatttcttctgtcccagcacaagtacatgcaccattcttttaccttctggcacattaattcatttcctagttctttgaattaaaccacatcatgaaggcccttttgtggaaaaagagaacagtttctctgtatttttccaaagagcagattaaggaccagtgaataaggtgagaaactagtccactgtgtattagaacgagggagggctgagtcataagagcaagggcatgacagagtggggcacaccctccttgtcaccggaagaccccagcaggagttgagtggttgtatgtctggaaggcagtgggtgggattcacacagcccaagctctcaggcactatagcttgggtatttacctgcttcagtctctttaccaaatgttgtcctatcttaatggctggctttattggaacatttagattttttcctgtatttaaactgaagaaggggtaagaagaatctaagcggggagttttgcttttctgaatgcaaatagtccggccctggatggagggataacatttgagagtagtagttctcagccctatgtacattagaatcacattaacgtggaagtgggatgggtttaaaaataccccagtgatcagccccatgccagaccatcagcataaaaacaaaaacaaaaaacactgctccgaatgttgagaaccactgttttagagagctccctgtacgtggaggttttcaagttgaaggcagatgatggctgagatgttggagaggggattcttgaagagtccttccaaatctcagattctctgactctccatagagttgttattattagagcaatgaaatatgattctctggaccatgataccttcaaaagaacacgtgcaagctgaattctgctttgaaatataacttactttaattggactttcttcctataataattagatgatatgcagaaacacacacacacacacacacacacacacacacacacacaatcttacagttcttcagagacgtttgttttcagcatcctgcactcaggatatcactgaaactgttagtgttcctgtgctttggatgcttagaaagcacatcctctatttgttatcagggtgattacaaattatgtttcctacagtatgagaaattgattatccatttctcctgattaggcagcagatggatttttgtttgtcgtaggatgtgaccgagggaagatactctttgtctcagagtctgtcttcaagatcctcaactacagccaggtattgttcatgctcctgttgatggtgggcagcctcacagcagtcagaagtgtcactcaattttgtcagaataattatagtatacaagtcacatgtgaacttcttccagaaaattcttaacttcttaacagataaattaatttagacttagaacaatcttgtaatatgttccgtattccccccattgaaagatctgactctgatctgatcgatagcattatggctttcttctattgctgcaaaataaatatcccacaatatgtggcaaggacagagggtaagaggctatctgacaagggagaaaggtaggcaggttaacacaataccagagaatacgtcacttggaaatccactccatactgtgtttgcagtgctgtgtcacttcttagctctattgaacctcagtttactctaaaaattaatgataacttataggatcaaataagagtaacatttataaacgcttctagaacagaacttttcacctattatgtcccccagagtttttattcatttattcattcactcacacactggtatttgcatggaagcttggtaggcagaagacttgaagaatcaaaatgacatttatgtaaattagaattaatgtaaatttaatttttccaaagatttctgctctttttagtctcagagcaaagttatggaggaagttgctgttatctctgttaatagacaaggtgactgaagcatatgatatgcgtgacttgcttgagaacagagaggctgaacagcagagctggaatcagagcccacccctatcttctgccttctgaggtcttacaggggaattccaagattgttgccttagaagagcataaactgtttatataattgagggttttcccgtcatgttatcaaaaccaacctccagatgcctccttcctggtgtcaggcaaagtggttggacatatgtacaggttcacataggaaaagtttgaggtctcatgcacaaaaacacaaaggcaacatgcagactgtgcatgcttacttgttgcataattgattttctgcatgcaattgacttgtcatgtttaacatttcatctccccagaatgatctgattggtcagagtttgtttgactacctgcatcctaaagatattgccaaagtcaaggagcagctctcctcctctgacaccgcaccccgggagcggctcatagatgcaaaaagtgagtaccagagaggcctcgcatttcctcagcagcccactcacaggcagccaaccctgagtgagcagagggcgggtgtgtgtgatgggctcagcctttccagtcctacttctctgtcctctttctggggcaccagagctatctttggctaaatggaattatttatgttctttggtcttttacataaaaagaagaaaaaaatctcaatgtccaaatttattgaaaagaagagctatttagactggattctttctgatttttagacttttcttttttctttcagaatctagaaaatcccagttgtatgctcctgagtttaaagggctaagtttgatttgttctcccagaacaaatgggctctatttacctgaattgcacacaggcagcctcataaaagtaagaaaacgtcaactataaatatggtgtttcttcaaccaaagtgttcctccttaggttggctcccccacctggctttcttcttttgcagtagtggaaccaccatccacatcgctccctctgcccccagcttcctgctactgcacacacttctgtgcaaggccccagtagctgtcatctactttagtcctgtgggaggctgtacactcctacagttaagaatgagagaatgaggactctggctgggcgcagtggctcacatctgtaatcccagcacttcgggaggctgaggcaggtggatctcttgaggtcaggggtttgcaaccaacctggccaacatggcaaaaccccgtctctactaataatacaaaaattagacaggtgtggtggtgcgtgcctgtaatccaagctacttgggaggctgaggcaggagagtttcttgaatccaggaggtgggggttgcagtaagctgagattgtaccactgactgcactccagcctgggtaacagagcaagactctgtctcagaaaaaaaaaaaaaaaaaaaaagaatgagaacacaagggagattactgggctcattccggctccaccattcactagctgtgtgaccttgagcaagttacttaacctctctctgtctcagttttctcatttatggaagagtacctatttctttgggttgttgtgaggattgaaagtgttaatgtatataaagcaggcagaacagttcctagcacatagtaagaacagtatcagtgtggcctaatgtcttgctcccaagctgtccacgttaatccctggaaaaaaataccaccagataatctccttcaagtcatctctttcattacagcacaccgcttgttcctaaaagtaaaatgcagactttggtatctgttgttctttatagtctagccttggcttttttaagtgaccttaggagaaaaatatgaatggcatttgggccttgcctttgaggctcttagcatatagtcagagaaatgagacagacagcaccctgcatagtaataggtacagccatagaaatagtgccaggcatagagaacggatgattaattctcatgtgggcgcaaggacaggcatcactgagtagatgacaaccgaggtgggtttgaaaagatgaattaatgtttgccaggtaatgaagggaggaacaaagaggaaacaatctgtgcacaggtgcaggggtgtggagccacatggcttgcttggtgctattggacaaaacgtgcacggaggggaagggctgaaccatgaagaccatttgttctgtggggacacagtgaagagctctgagttgggtggggcaggctcggattggcattctaggggagatcgcagagctggcaatgtgggaggtagatgggatgggaggaagcccagaaggagccctgggcagtggccattcctcggcacacttgctcgtgtgatggccatgggtgtgttttccctcggcttctgtactgacacctagccagtgtttggtaaggaggtgtgctcctcagaatcacctgggagcttttcaacatagtcatgctccacccccagagattctaatttggtttttccagacagcacagtccaataaaaacataatgcaaaccacaaacatgagccacatatataatttcatattttctggtagccagactttaaaaaataaaaataaatgtaaaattaactccaaaatatttcagcatgtaataattataaacaactaataagttcgttcacattcttttatttttctatactgtctttgaaatcctgtgtgtatttaacacttacagcacatttcaattcagaaaagccacatttcaagtgctcagtacctgcatgcagctagtggctaatgcattggacagcacagatctagaatggggtccaggaatctgtaggttgatcatgcatccagggtattctggcctacaagccaggttgagaacttaaggcagtccggctcccaccttgccttcccaatatccatatcctacccatccttcagtgccagcccaagttccttctcctctgggaagcacaggttgtctttgccatttatttggcactaatcatacatcaccctgtcctattattaatcttttcttggtgcacctccatttgccctttgttagccataagcgtctattgggcaagaaccccatactatatttcttttcatccccagagtacctaatccatttatttagtagcacactctgtgatttataaacatttccagactgacaacacacctgtccatgctgcatctgttaaagcctaaacttgggagatatttatctcatgtcatcattataaaacagtgaggcaggcaagaaaaggctttgctcaaggtcacactccccctcctgacagacaacactgctctcagtttatcacattttgtgtattgatttgcagctggacttccagttaaaacagatataacccctgggccatctcgattatgttctggagcacgacgttctttcttctgtaggatgaagtgtaacaggccttcagtaaaggttgaagacaaggacttcccctctacctgctcaaagaaaaaaggtaacaatttaacagtccattaaaaccctgtgacaggtgaagcatgctttctgcagcggagctctcagctgggcgttggttccatggtttctggctggccagagtggcaggtcccaggactgcagacaggaccctgcagtcctccctatgtgtagggcagttgggagcagaggagagagctgaaaagcctgatggcagagatttgtggagaggcctcctctgtttaaattgtgtttcttttaacatgattgaggaagaatactctcagccacaatcctaactgccttatgaacagccaccagtccaccaaaattactctgagctcaccagtgaccttgatgttgttaaatgcgatgaacatttttcctttgtcttccttcttgaagtgttctcttctcctggattccatgaaaccacattcttcttcctcctccccgaccccctgctgctacaggctctcttgctggcccctttgctggctgcccctctctgtcctgggctgcatctctgtctgcagtctctctctgttggtcatgtcatctactccctcagctttaaatgccaacaacttccacattcatatttccagcctagacttgtcttttgaactccagattcataaatatactgcttactaaatcaacctgctttggatatctcaggggagtctccaacaggatacgtgccgaagtaatcacctgagcctctcctccagcataaatggcactgccattcagctggctgctcatgctagaagccggggaggtgccctcacttctgcttcaccaccccactcttcaatcccgttagttatgaagtcctgccacaatgagtcccatctgcaaaagttctctgaaatgtttgtccctttccatgctgcctactttcactcagctccaggctgcccccaactctcaccaggtctcataaagtgtagacccacatgctccccacccccaacacagcagccaggatgatctttttatcagtccccttttaaaaacccttcagtgttccctattgttcttgaagaaaagctcaaaatatttaacgtgaccatgcagcccccgaccctgccactaagcacatgtgagccatgttgacttcctttgatgcctcaagccccttctgggcaatgcttctgcacatgctgtcgcttcctggttggaatttcttccctctccccatgaactcccttcacatggctctctccaacctcagactgccttatgtcttatagcaccctactggtttgctttctagtgctttcttatacttgctgttatatagttatttgtgcgattatttgtttaaagtctgtctcccccactaggctgtaaactccacaagggcatgtctgatttgtttttcactctattccagtaaccagcacagactccacgcttggcagacactccatagtggtttgcttgttggtgaagtctataggtgctccacatttaatgtgtcccaaatcgaactatcttttttctctctctctcttctagtctgttttctttcttctctgagtcagtgaatgacaccagcaaccacccaatccagaaaagttagagtcatcttcatttgtttctttcccttaagcctgatattcacagcaaatcccaacagtttgatctcagaaatttctcctgctttctttctctgctccctctcatcttcactgcactgccatagttcagtcctcctaatctcttgctgtattatagccactggcccctgaatcagccttcctacttctgttttctactgtcttccagttcatacgtcactctgctcctacagcatccaaaccacaatttgattttgctgtttctgcacttaaatacctgtagatgctctccatttcctgccttaaaaagacagaccaacattggttagaaagtaatccaaggcccttttaatcttcctccaacctgcctttccaatttgcccctcactcccagtacctccaatttcacttcaaccacacagagctcttggccagttcctatataggctgtgcctctgtgcctgtgtacgtcatcagcctttatacattctagtccctcagccactgctcatccttcttgatccacctcctctactggttttttgggggagccttcctctccctaggaagagttagatattccttccttggtgtatgtaatgaatgtccatggtataactggccctacttaagcattctgacactggatgacagtttgtttctctttccgtctgcccctttcattagatgcttacttctggagagtgaagccttgatttttttttattttttgactccctacctacatcccatcccaccatcggccgtgtacacctccatggcccaaacctagtgctgacactaaccacgaactttgctttctagcagatcgaaaaagcttctgcacaatccacagcacaggctatttgaaaagctggccacccacaaagatggggctggatgaagacaacgaaccagacaatgaggggtgtaacctcagctgcctcgtcgcaattggacgactgcattctcatgtagttccacaaccagtgaacggggaaatcagggtgaaatctatggaatatgtttctcggcacgcgatagatggaaagtttgtttttgtagaccagaggtaagagtctacatactacccttgagcaatgatggtagaggattttcaaccctgatctaaaaagcagagaagactgggccatcagctggcttttctaagaatgaagaaagaaagaaaaagctgggtgcagtggctcacacctcaaatcccagcactttttgaggccaaggtgggtggatcacttgagcccaggagtttgagactagcctgggcaacgtggcaaaaccctgtctcaactaaaaatacaaaaattagccaggcatggtgacacatacctgtagtcccatctactctggaggctgaagcaggaggatcagctgagcctcgggaggtcaaggctgcagtgagctgtgattgcaccactgcacttccgcctgggcaacagagtgagaccctgtttcaaaaaaaaagagacaaatgatgagagtctctgttaaaaaatgagattcaataggatatcatcataaatacagagatttttctgtcattctttggcatatagagacaattaagtggggtgccttgatgtccatggctaaaagaaaaacagtagggatagcatgctgtctgaatctatggaatgttccagaaccattattgtgattgaaattcttttgaatctaggacttggaagcaattatttagtcctgagctgtccaataaaatactcgttggccatggtagcctcccatgtggctaacggcacagacatagaacatttccatcatcacagaaagtcttgttggacagcgttgatctaatccaacctccttattttatggatgaagaacagaggccagcctggggactggtctcctgtaggattcacaattaattggtaatagacctggaccaaggacccaggtgtcccaaatttactgctgcctactgctttccctcagaatatgcacaggctaataatttttctggctactagagacagccacaacatgctggaaaaagagacagcctcagctgtcttgtggcctcagctgctgcagcttctggcatttggttgtcctgataaaaaggaggcagcaaaaactagaagccttgcactgaggtttagatttataccacattttaatctaattaatgtggttccttttttaaagacagatctcagtctgtcacccaggctagatctagtgcagtggcgagatcttggcttactgtagccttgacctcccgggctcaagcagtcctcccacctcagcctcccaggtagctgtgaccataggcatgtgccaccatacccagctcattgttctgtgtttttggtaaagacagggtttcaccatgttgcccaagctaatcttgaattcctgagctcagacaatctgcccaactcggcctcccaaagtgctgggatgacaggcatgaaccaccatgcccgactggttgcaatttttaaagccccctcagatttgatttcttgtgataatagtccctttacaaaggctttgctctgtttccctctatttttatagccttgattaaattcagatgcctgaaaaaaagagagaaagatccacacagtgagccctctgaaaatccatccagctcttttgcctgcagctttgaccttgctctcataggctgtagcagggtttatccattgcaaagttgcaattaatcatctgaatggctttttcttctttaaatattcctttattcccttttagggcaacagctattttggcatatttaccacaagaacttctaggcacatcgtgttatgaatattttcaccaagatgacataggacatcttgcagaatgtcataggcaaggtaagctaggatgtatgaaagatcttaagttgaaagtgtccccttgcttctagactagtcaacatgaccttccagggaaatctgtccactgaggatgtagagtcagccagcctaggactcttcaggtcagaacatctgtgtgaagaggaagctgatacctgcaggcactgtttatcccccttgtagttgccctgtgctgactgcatggcagtttctgaaagacatctcttgttcagagggttttcccagaccctgtaaagatttagtatggcccagactgatctgattctcttttccattcaagcctgcactacctcctgtgttttctgtcttgactaatgctgtggcttcatgtgcaggctcctgagagagaccaacattgaccccttctttcactgtgtctccaccagatcctgttcattcacctcagacatgcatttccaaaagtctactttttaccacctctgccatcaccctggttcaggccctcgtgcctacttagagacctgtgatagacttctcagggtttctctgatccctctcacccccagttcatcttccatagttatcctatttatccccagatagattgagcctggtaacatcagcctgcttaaaaacctcctgctttagactcaagcccaaatgcttttgacaggcaatcaaatgtgagaccttccaccttctggccccagcccacctcctcagtttcagtccccatccctgcctgcagaggcctgtgctccaggcacactgacctcactggcctctccccaaccagaccctgctgctcctcaggcactgctgggttcttccctccctccttctcttggcaaactcgtgttcatccctcaaggctctgatctcttctccctgtatagccttccctcactactcttcttgagggcaggagtcatagcctgtctcctcttgtatctccagtgcctggcacatgagaagggctcattacatgttacatgaaagaatgaggttgaataggtgagtagcctctgttgatttggatgttcttagaaatgagataagttctatattgcccttgggctttgtgattgagataaagcatgacattttggacagtgccttctcatttgctggtggtcatgttagagctgattccagttagatgtataacatgcagtcagtaattccctagagcctcaattttacagactatggaaaatcatgacagcttcacaaatgaattgaaaggctctgagttagaccctcagaaacaacctatttcctgagtgttgaccactgcagtttccttggcttactaaagagcgatgtcgttggagctcaagtacctttaatattttgtattggatgtcctgtttaatactttggtctgagaaaacaacaatgtccatgttttctttacattttcagttttacagacgagagaaaaaattacaactaattgctataaatttaaaatcaaagatggttcttttatcacactacggagtcgatggttcagtttcatgaacccttggaccaaggaagtagaatatattgtctcaactaacactgttgttttgtaagtacttttcctatatctgaagctccccttgcttcaaacagatgcctagggttcctcatctgggaaatggggtgcaggcaacatccagtatcacatcctttaatgccatcttgctaatacctgtgaagcctcaggactggcagaagctagaaaggattgttaacaaagggacaagcttcaggacttgtaccatgcaggccctggcttatgaaactgctccaggaaatagcaacatttccttccagataaagcagctaacctttgaattccacaggccctgcaccctaggcatccacttgtgctgctgtggaggaaggggttggcaatctatgaaaggctcattcaggcactagctcacactggccttggctgaggatggggaggtctccatacctgtcaggcagggggcccaagcactggcagctggaatgccatctcaaaaggctgctacctgctagatgagcagagggaggtgaaggagcctctctttggccaggcctgctccccacttttccttccccatagtgtccaaaaccccacctatggtaagagctgtgtgaggggccggggctaggtgcactgcaggctggcaggaggaggtgctgtaatgatggcagtaggttactgcagccaccacctctgctgaactgtgtcccacacatattaggaaggcctaggcaggcagtggggccaaaggccaggatgctatccattatattatcaaacagtgagacctgtttacccactcagacagacacttcattttctggcctgtccaggtccagagtggacaccggacaccttggccaagttgaatggtgcacagttctgagcaggcctgactcacgtttccttattgctgggatgttcacagagccaacgtcctggaaggcggggacccaaccttcccacagctcacagcatccccccacagcatggacagcatgctgccctctggagaaggtaactatgtgctgctggggccctggggcttgcccgtgggaaggtgcttgtggtcaaatatcctcccctaaagtattcagggtcccctccattcatattctgtggaacaagggaggcctcgaggggatgatgtgcggatttccccatgaatgcagaggacactgtcatgtcactttctctgttgagccggaatactaggagctcactgctgcacttcccaaagctgctggcccctggaagcccttgagctcgcaaactccctactccccttgtgctttcctcctgtgttggctagtggccatgatgtgaagtgctctttcgtgactgtcactaactcctgtggttggcaggcaggtgtctttcggcaccagggtgtgtaccatacccactgggctcccttctcaggctcagccttggccctgcccctgctgtccacgctggactcatccttcctgggaccatccccacatgcatggctgcagcccccatcgatgactcccacatccacatctcctggcccagtctctctcccgagctccagatctgtctctccaaatgcctcatagacagaaccacctggagtctcagaggcacctgaaattcagaatatcccaagctgattttctgcactcccctacctgattggttgtttaagccagaaacctggctgttgtctctcccccattatatctaaacacggagtcctgaaccttctatctcttaaacttcgtcaccactattgctatttcaccctcctcatctgctgcctggattattgcaaatcacttcgcaactctagtccccctctccccaccccatcctccattgtagttcattctccctgccgtggactttctaataacccagttctcatttgtgccttttctgtgtatcgtcctttggtactcctcattcccttgtggaaactgtccaaattcgttagtacggcatccaagaggcccctcatgatcggattggtacctgctgccccagtttcatctatcatgctctcatcatcatttatgatgaattccttggaggagtctcccaagttttaacctgcctcagtgctcctgcacgtgttggttgctgtgcctggaatgctttctcctccttacctctctgccaagctaattcatattcatctctcaagactcagctcggggttaacttgctccagaagctgcacctggccccagatgagttggttgcctcgtgcttgcctgtcaaacttacaacattttgctttagccattgttcatcttgttggttttcctgttaaactgtgagctccttgagggcagggacttgtctctgtaaccctggcacatacagtggtcttcaataaacgttttttttcagtgcatgaagggaaagaattagatgctgtatgaagggaaaaaactggcctcagatcctagaaggaaacttgagcctttccctgctggaatgccttttcctgacaagctgtagccctaaagtccctcaaggcacaactctgatgttgaactgcaaatggatcatgggataaactggttttactttaatacataatagtatttcttcctcagttttcccctttcctactctcagattcctttgttgtaggtggcccaaagaggacccaccccactgttccagggattccagggggaacccgggctggggcaggaaaaataggccgaatgattgctgaggaaatcatggaaatccacaggcaagtaacaccttctagttcctctgttaaaccagtggttctcaacccagggaaattttttcccccaggcaatattttgcaatgtcaggagacatttttggtcttcacaactgggtgggaggttgctacttaaacatcctgtggatagagaccagggatgctgcttgttaaacatcctacagtaaacaggacagttccctcctccccacccaacaaagaattatccaatccaaaatgttagtagtgcctagattaagaaatcctgccttaaataaagaagctaaaccaaaatagcccagcgctaaagagaattcttgagaagacttaactttcttatggctcaaggagcttctcagtgcggatagatgtacctttactttacaggaatgcaggagtagagctgtgaactatcagagtgatctggaccttaacaaaacattcactttttttcaatcaaagagctgcccaggattagtactagaaaccaagcagatcagctagttattactagctgtcttgggagagacttcctttccatatgaaagagaaggagcttagaagcagtccacctgggtctgagtcctgggcctgtctctctacctggctatgctgagacttacttaacctcttgctctctgttgatttaaaccataaaaagaaagcactatttcccaagaattgtgttaggattgtgagggcactcaggaaagttccaggaacacagcctgacatatagtgagtgcttaaaaattaattaaatctgtctttaagagcagtcgagagggaagcagttatcataagtctgtccaaatttggggaatagagaaggtggtaaccagattcttcagaacgaaacttaatgtaacataagaaaaggaagaaaacactgctgccgctggattctctcaggagaattagaggctggcctgttttccaattggccataaaggggctgttatccccctataggtaacacagctcttttccaaccccacaggattagtgggtgtgacttctgcatcaggaaggagacatgagggtagtgtgcagtgtaatcaggttcaaaccctatactttgcatttgcataccctgtattttgcttgagaccatccaagaacagtatcaaacagtccttgacctcaagaattttaaaatcttttataagtctattttctttatgataacaggaaaaagggagggtgcatgggccaaagcaagcaaaagaggaaagatttgaacttggccttagccagggtttgcaataagagtggatgttccctctagaaaagccagggctattcttgagtgggcatgtgagtggcaaattcagggtcaagaaacaagctacctaactgggcaggctttgtgtaggaaggagacacagagctatgataggcgattaagaaacacaagaaatgatactgtgcagtttggaagaaacctgtaagaccccatttgttgtaggatgctgaacaagcatccaaagtcttgtgttacgctttgtggaagttgcattggaatagggagagatgaaggtgggcatgtttgacaactcaggaatgaggccttatcctacagagatgacactgccaaaagagaaatcaatcatctaaggtctagcgtttgaagatgaaatcaggaatgatgaaacagcaattccaagatgagaaacctgggaaaatagtggtttcatagacataagtagagaaaggtgggggacactcagcaatttttccgtaagcaattagcagccgtttgtgcatgctgagaatacatgatatgtagttgtaaactgccgttaagaagcttctaatccagaaagaaaacttgttcactcataaatctagagaactaggcagtacaagaaccaaaagacttctgggtggtggaggagtggtctctgggtcacccaaaagctacattcatccatgtaggagctgagagtcctgtggttacacaactgccatcacactctccctaaactgtagctgcaatgccaagtgatggattctttcctgaggtccttcagcctgacaagtatttaggtggatttacagttctaagtcttcccttctataaatcttctgagagatatgctagataagaaaggcctggacccatttttcatcaaccactgccttcgaaggctgcttttcctgtcactactactaggctaccttttagaccctggtgccgtccatgtcctaagagtattcactagctaaacagtgtttgtggagaaggggacaaattgttttctgtggatcaaagatggaggttgatcttagaagttctcctccaattcacctggattctgtgaggaaataaaactggccacttacttgaaattcaccaactgaatgcaaactccaatccaagggctttgtcagtgagatgcttgactctagggactgcattctagatcaggtgcctgtagaacaaatccagcttgtcatctgtttttgtaaataaagttttattggaacacagccacaccgattcgtatctgtggctgctttcaagctgcagaggcagagttgagcatttgtgacaagacaccatatggcctagagagcctactatctggccccttacagaaaaagcttgccaaaccctaatctagatcttcatcccctttctcacctttaccccttaacaaagcacatacactccactgaaaaaagaaaaggcagtgtaattctcttttctgacaggataagagggtcatcgccttctagctgtggctccagcccattgaacatcacgagtacgcctccccctgatgcctcttctccaggaggcaagaaggtaagactgatgattcttagcctaagctagagaacctcttgcccaagatctgaaatgttgggggtgggagtatggaattgcaactgcgattgctgaaacaatttggactacttcctccttgaagtaaatgcatctgtgtgaggctggatacaaagcatactggtagggctagggaggcttgctgacatcctcagaggctttcttccatgtgagtggaagaagggagaaagaataaggaatggggaactgtcagttcatttaattgagggagcaattcaagagttcccatgagggaaagattattgagtacctcacatagaaaagtttctcattttctgccaggaattttcaagggagaaaatattagtgtctagggcaggcaatggaaacagcaatgccaccagcagtgctttggaaatcaagccatgctttatagctgcagaatacttggggatctgctgcctgggggttccattggtgtgacagcattggatccaagcagtggatcaatcaccagccctcatgaagagcttgctataagactacactataaataggtttaggaaccagtcatttgttttcatctttgctggagaacttataagcctaggcccatcttaatcgtaaattataaatctgtttatattgcctgatgccagtagagcttaggacagtttaaaggccatcattttggacacaatggcttcctttccccatctcctaaaacagagagagagaatatcaggaatttccataggcaggactcctagggcacaaaccatcaaaagcagggcaaggattttcaaaactgagctcctcggaggtttgttcaggttaccaagagctgtggtgttaccaggtgggatgggcgtggggatagttgctaaggagagagggtaagagtagaaatcctgcttctacaagggcagcaatacttcttttttatacaggaatcttctgcaaacatttctatttgaaaaagcgttttgctccccccaaaaaaggttgaaagttaacaaattaatgggtaagactacaaagtaagacctgggttcgaagcttggccttgccatgtgctagttatgtgaacttgtacaactttcaagccctagttttctttataatggagctaataatggttagggtagccagcatctttgcacgaggtcctactgtgagataatatatgtgaaagtgcttggcccaaaataccactgacagatgaagtctgagcttggtgtcccgtgacccccgcccccctgcccacaacacacacactgcttgccagctgtcttcttagctgttcttctgttatacctccaggtccttcctgcatattggatccaccatcttcttagggtggtcttccagtctctgcttcttaagttaacttttaggcacttgacttgactcctggtattaccaaggattctacttcttggttttgaaaggttatcagtccagtataggcttaaatattactcaaagaactttcatatacattgtctcatctcaccttcacaacattatagtgacaagatccaggctcctcagcgttcgttttataagtatggcccccaggctacaatcctgggctcatggcttccaattcttttcacatcaacaactaccagaaatcaaaagctgtgctctgcatcataaagccccagctatttttgaggcacttatgaaaattctcccttttctttgagaagaatggattataaaatggatctgtgagaagaaatttggatgtgttctcacgagatgagtcctgggcagcaggacttataagaaaagcagcttaaacaagacagttaaaactgacagcagtattaaatggtgcaccatacccagccctttccagtcactttcaaatttggaaggtccaaaaatgaaccatttagcctgcagttgtttgtcaggatcaagctaaaaaggaagcctaagtgagcctccataggtcgcaagagagtacagacatccagaagcactaaggaaaattcagataaagcagcagttctacaaatgtcatctgcagtctttttccagaaagagagggggcacaagatccttttaagggtctgcaaggttaaagctattttcttaataacattaaaacgttaattttttccctgtattgataatgtgcactattcatactaaaagcacggttgggtaaaattgctggcattttacaaaaatcagacaagtggcaccaaactatactagtagtcattgtattcttcaccaccacacactcacagtaaaaaaatagtttaaagccagtttcatttaagattgtccatcatggctaggtgcagtggctcacccctgtaatctcagcactctgggaagctgaggcaggcaaactgcttgagtccagcagttccaggcaagtctgggcaacatagagaaatcccatctctactaaaaaatacaaaaaaaattatccaggtgtggtggtgtacctgtaatcccagctactccggggactgaggtgggagaatcacctgagcccaggaggttgaggctgcagtgagctgagattgtgccactgtactccagcctgggcaaccagagtgagaccctatcaaggagggaaggaggaaaggaaggaagggagtgagggagggagggaaaatgtccatcattacttttataaaattctcaagcacacatctttttaatgctctgtgacaaaatgagaagtacacagaacttgtgctgcataccaaagtatgatgtttgtctcaaaaactacttgtgtgattaagttgtgagttgaactagctactattttcattggacaccatttttattgtatatggtcattcggttttgggtatttagaatactttttttttggaaatgaatgaagtgaacctgtcactttaaggaaaatgactgacatttgttgccaatgataaaatctgagctttcaagcaaaaattggaatttttagaaaacttgtctctgctactttgaccttgagatcttcctaaaacttaaaaaatgttgttgatgagatagggagtattaataatagtgatattttgatgctctataatgaaatgtgtcaatatatagaagatctgcataactcagtgaaccaatattttgtaactaaacaatgcaaggtatttcaaaatcatgtaagggtaaaagatccatcctaagtgccaagatataaagagtacaaaacattcattgatatggtttcagattccacattgcaactcacctttaagaaacttctacgtgtcaagttttgaagtggtatcaaaaaagaatacaattatttgaaaagtctattaaaatatgcctcccttttccaactacttatctgtgggaggttggatttccttcatatacttgaatcacaagacgtatctaaatagactgaatggaaaaacatatatgagaatccagttgaaaattattaagccagacattagatttgcaaaaatgtaagataatactctgcctggtaattttttgttactgttttagaaaatagttatttttcattaaaatactattcattatttatgttaacatgtagcgggtttattacatttaagaaatctattagttttaatttcaaatacagtaaatattgataaatacagcctacataagcaaaagttctttggagtcctcaatgatttttttaagagtgtaaaagggtccctagaccaaaacgttgctgtggaaataaagtaagttataatgccacctgctggcaaagcctgaaatcattgctgctcctgaaagcagcagctaccaaactgtttcctcacgtatatccagataggtctcaaagaatgctcttctttgagactcagccaggggaaggcagctggggtgagtgggggagattttgagacagagttctcttactgagtagtagtaataatcctccccagtagcctgtcttaacttaaaccacaggttactgaagttggcacctgtagtataagagatttacttctgttttcttcatttgactccttgagctgtgtctcttcacagcttgttaactccactttttcttcttcagaaatatctgtcactataagatgttttattcccttataggggaaacgtctagctgggctcattgaagtttaggcattggtcctaaagaaatatgtgggcatcatgattccaggcagttgaatgctcttgggattttattcagcctttaagttgcctctgtgggctcactaaaatggagagaaaagaatagttcgggggagaggttttttcttactctgaccatgtctgtctaacagttccttgtttgaaatcatccaatagaaaactgaagccatttgaagcttctccccaccccaccccatgcttcattttccttttggcattgctcataatactgattcaaacttcacacttccctccttttgtttgtagattttaaatggagggactccagacattccttccagtggcctactatcaggccaggctcaggagaacccaggttatccatattctgatagttcttctattcttggtaagtggcatcattattcgtttccattgcaatgagcttgcaaaacatcttacataaagtcaattttaagaactgaactgtgtgaaacaagctaatcctagataaatttgataggaacagaataaaagtttaaaatttgtttaaatctctaaaaagttgaccagtatttgagttttggtggaggtccaagtttgtgcctggaactcaagaggaggctacagctacctagacataggctttctcccatgtggggcataatctcttcagagagagaaggctaatgaaggttcagagataatgcctagaagggtgattagtaagcatatcagaaggtattaaaagtcattaagtgaaaagagtttgcttttcccatcacatccatctttttctcccctgggctttctagatctgtttttttcctaaactctcccttcctatttgcctttctttttgtaactcctcttaactggttacatcagattattaaaataagcttgactcaaatatttttaacatttactaaattttaagcgctttgtacttatttctaaaatgatcatttgattccttagagctgtctcttcacaacgtaaccccacttatttcttacgtatttttaaaaaattggttctttcctctaaaaaacagcgatataaaaaaagatagccatgcagcccaaaaagcagcatctcaccctaccattaaatgtaactttcttattaaaaatgtgcttaggaattgcttacttaatctgaagatgctttaaaaaagaaatcactgaccagtctttatctcctcccacaggtgagaacccccacataggtatagacatgattgacaacgaccaaggatcaagtagtcccagtaatgatgaggcagcaatggctgtcatcatgagcctcttggaagcagatgctggactgggtggccctgttgactttagtgacttgccatggccgctgtaaacactacatgttgctttggcaacagctatagtatcaaagtgcattactggtggagttttacagtctgtgaagcttactggataaggagagaatagcttttatgtactgacttcataaaagccatctcagagccattgatacaagtcaatcttactatatgtaacttcagacaaagtggaactaagcctgctccagtgtttcctcatcattgattattgggctagctgtggatagcttgcattaattgtatattttggattctgtttgtgttgaattttttaatcattgtgcacagaagcatcattggtagcttttatatgcaaatggtcatttcagatgtatggtgtttttacactacaaagaagtcccccatgtggatatttcttatactaattgtatcataaagccgtttattcttccttgtaagaatcctttactataaatatgggttaaagtataatgtactagacagttaaatatttttaataaatgtttcccttgttct

SEQ ID NO: 15438 - DNA, 109436 bp, Homo sapiens
cggaggtgcctgtttacccgcgccggactcaccgccgccgccgccgcgggatccgagtgcgggcgcgggcgcgggcgctcccggcgagccacggtgagtgtcaggccggcggcggccagcgacgcgatcccgcgcaccccgtcgggggccgttagcaccctcgcgggcgctgcgcccctgccgccgccccgggggcaacccggccgccgaagaaccctgcccgacgtgcccgctgccggccttaaagggcccgtgaccgctccctgcccccacccgggccgtggggaggctgcgccccttaaaggcgccgcgcccgtccgcccccatcctcctcgcgggggctgccgctgcgggctagggcaggcagaggtgctgcaggagcccttaaaggggccgggaaagtgttcgctggagtacccaccgcccttccgcgggcatcgctacctggcggggggagggggcagctagctgcctcttaaagggatagctctgcccttgggggcagtgactcggccgaagaggactcctagatgtgtccccgggagcttcggggatccccgaggggaccatgcctggtggctgcccctcaagggcgttgggcgaacggtgccgcgtctgcccttcctccccgcttcacttccctttcgggagcccgcgaggctgggtgggggcggggagggcgtctccgtcgggcttggggagtccaagtccgcccgccccttcggccctgtagccagggctggcgctgcacccgggaatccccggccggcacggggccgaccccagcctgcgaactttcgtggggcctgtgccgtccaggtcctgggcggccctcaaggatgccccgtgggtctgcgggcaggtgcgcgtcggcctggggatgtcgcccggagcccgggtgcgggccggccttggagtcccagagctccgcggagggcgcagcgagcctggctccagctccgggtttgacagatgtcagggaagaaaaggttcccgctcggctattgccgggcgttgacatcccagagagcttcccgtttgcttggaagaagacgaggaaggtagaggtgaacgtcgaccttgtggggcgcatgttagcctccccgaggggtcgcgagagccggcagcggggtgagctcaggtgcccgccggcaggagctggggagggaaggggagtgctggacaccggcgcctgctgtcaagttctcgccggccggtgagagacccgctgccgccgcgcaccccgcacctcctgacccctctcccctctccgcctcggccccttcccggtcacctagcgttgttttggcgctttggcgcttgcggtctcttccttcttccaccgctactcctcagcgaggaattattagccaagttttctcacccagcttccaaaaatcagattccgtatttgtgaacaagcttttcttgacactacccgtatacccgtatttccagcatcgtcgttttattaaacatccataaaagctgccccttagatgcattcatttcccacgacacctgcttgcttgtcatttgtccttctgacatctgctgttgttcacccctttaatctattattaaatgacaactattattttaattcttctggtctcattgatatccggatctgtgaatttgggttggtggagtttttaattaatgtacccgttgaatcatgagcttaaaataatcattgctgctcctgagcagttttgaataatatcatgctctctctgcttgcaagacttaaaaaaattcgctggtgttatatttgatttccatatcaatggaattcccaaatatttttgaaaatacaaaattcagtctttcagtccatgttttgttactcagatcattttactgataagtctttaacgcagcttatagaacatatttagaaggtttggaaatttcctggacaggatttgaaattgcctgtatcatctgaagctggttctgtagaagcattttggttttgattgtagatgcagccagtgaatgataacaataagttaaaactgtagttaaatttgttctttattcaaccctctgaagaacgaacagatctggtagaaaagcactaacctgggagttaggagctggacatcctggttctagtttaggcttgggctctcatggccgttccagtcggggcaagttattaaagatttctaggttgtgtttgcctctgatggaaagtaagacggttgaactaggtgatctcaaaggttcctctcttttgaagttctgtaagtctctaaatatttaatacatttgaattcaggttggtatttacctcctggcacctccagaatatctgagctgaagccctattttcataagaaagttaagcagatcaacagatggtgttttgaagaatccatttcaaatgatttataaaatgatgactacttacgagtttgtctgctatttgcagaagaggtttgcatgccacagggcaggaaaaggaagtggccatgttttcagatttatcccttcacaccaacaatctctgtggaatttatatgctaaaagatggagaagcaccatagaaagatttggctgtattaacaaaactgcatatgaaaaggtaaaaactagatagttaatatctctctttggtgtaagggttataatgtatctgagctttctttgtgatttcatcatcaactctcactgtggtaggaaaatcaatattaaataaacagtttcagccccgtgattacatgcagtgattttaggaagcatcatgataactaaagtaggtacttgcagggaagtaaaatatcctttctagaccttgaggtttcgttgggagctagggacacaggcatgttatccttctccacagtcttttttcattgtcaccttatcacaagactcagatttatcccaaatacccaccttgtcttttcttctccctctcatgaaataagacctgctctgactcaaccccctcagcatctcttacttcccacccaaaatgtcctgtctctatccccatcgtcccctcatctcctcccaattcagagaaagcaagtggacctctcctctgttccttttcttggcctctcaccatgggcaagtgcctgggctctggtggcagaagaatccatggctcaggtttgggctttgtggtcttggatgtgtgcttgactcctctgacctcaggtttctcctcttggtgtaatggcagtgcctgcctcgtggagtctgtgtgaggattaagggagatggtgcatgtaaaaggcctggcacacaggaagcctttcctttgtgccagctgccattccttctcacctctacccgggtcctatcactagaatattatttgtgctgtttgtccttagtctcccctgccccaccctgaaaaccttaggcttgacttaggagaggaaggatggaagaggcagagtcagacttgtggtgagcctgctgtgtaccaggcaatttacatgtgtctttacttggtaccctgggttcgtaagcctctctttcctccctcctgccagcctcccccactctcccatctcctgctccattcttagtacctgccctctggcttctctcgctaccacctttctttatatttcttctcaaagttttctccaaaactttgtcgtgagttcctggggcccatctgcccatccttattcctgagtggttgttcttggcccctttgcagtatttcttttatttttttaaacatggtctcagtcttgcctggttggagtgcagtggtgcaatcgtggctcactgcagcctcccaagtctcaggtaatcctcctgcctcagcctccagagtagctgagcctacagacacgtgccatcacacctggctcatttttgtatttttattagagatggagttttgccatgttgcccaggctggtctcaaactcctgggctcaagtgacccacctgcactggcctcccaaagtgctgggattacaggcgtgagtcactgtgctcagcccctttgaagcttttacctcacttgttttttgtcctttgaaatcctttcctctctcagcctttgggtcatgctggtttcttgattctcttcctgcacccctgtaaagataaatgtctgtcctagcttctgctattcacactgtccgtggcctggggtcccctctctagccctgacctgtctctcctgtgttctgctagcaggtccgttgtggacatgaatggcagcctgtaatctgcatttgtggtctcggagttacaggtttgcagactgcttgcaagcactgtcacattgagtcctcatgacacactggagcctacatcccttcattccccaggctgtcctaaaaggcagtttggttgggtagtttagcatacagactctggagccagatttcacatcctaagtattccctactggcttcgtgacttgtggtcaattttcttttgctctctatgccttggtgtcctcatctataaaactgggatcatagtagcccctacatcagagagttgaggtgtggattaaatgagttaaagcattggaaaaagtgtgccagtctattcatggcacattgcaaacactcagtgaatgttgctgtcagtcttgctgctcttcgttgccttgccggggtgccttggcctggtttgtagtggtctccacattcagcctgcctgtctgccagaccttgccatgtgcctggacactgtagtcaagctgaggggctgtccattccctgtaccagcccttggcccagtccatccctcaattttcacgtgtccaaatcctcctctgcttttaggacccagggccttggtcctgcagcactatttcttcattttgttttccttcctccccacacctggcagcaatgtccacattgatttttctccaattctcttaggttctgctgcattccatattgtgttgggctgtctctgaaaatatctcacctgctcgctcagcctgagcattctgggagaagtttatcttgctttttccaaaatgacaggcacagggagcctttaggccatggttgtccaatgcacattgatcttgtggaggaggagatgggatggggtgggcactcagggacggagcaggtggagggaacaggatgcacactgcatagaggtgggggtgcaacagggccataagtggacatggccgtaagtacttaggtctgcatggaaggagggtttgaattggggacttaacctcagggggagataagattggataaggtttagtcatctttgctgcaggggaacgttgagtactggcatgtaatggagagtggtttttaccttagtatgtgctgtccttttaaatagtgtaaactaattctttatctagcctggttaaagaaggggatggctggtctgcctaatttaatatttggctattgctctacccactgggttttgtgcatatactgaatgaagcattggcttgtatttattccttcaatcactgtttgaaatgtctgacctgggcaagttaattagcttctctgagtgcaaaataggaataataattattacgataatagcagctaacatttattgaacactttctatgtgccagcacatatgtgagtcacctttgcttattaactcatttaaaccccataacaactacatgaggcaggtactattatccttacttcacaaatgaggtggttttataaactgcccaaggtcactcagctgttatggcttggggcagaatttgtgctggtgaactccagagtctgccctgtaacaccctagtagattcctactgggaggaaacaccccgttatatcccttacctcactcagccgcaccatgccaggagcctagtaggctgacagcaattgggaaccagtcttattgttgacaaacatggtatgagcctcttttagagcggagctgcctgaaaccctccgcataagggatgcggacctggatgctacctgagcagcagctccaggggcttgtgaacattctcctcacatcctgttatgcatggctgtctctctggcctccccctgctttctctgcagcattgctctgacccaggccccctgtggctcagccagctcctccccaggcagctccttgtgtgagatgaaccttttaacataactcactaaccccacctcccaccctcatctagccatctgcagagctcctcactggggaggggaccttttcaaaggtccctcaccttcgtccttttctccctgaagaccaacgtccacaactttggtatatccacagtgttggggtgtgtgtgtgtgtgtgtgtgtgtgtgtgtgtgtatatatatgtgtgtgtgtatatatatatatatgtgtatatatatatatgtgtgtatatatatatatgtgtatatatatatatgtgtgtatatatatatgtgtatatatatatatatgtgtgtgtatatatatatatatatatatatatatatatatttttttttttaatgccagttgttccccaaatacatttagatagtaagggacacattgttttatgtcaagaacctgttacataaaaatgtgttatataatgttcaaatatatactgcacagtgaaattagataccactttttttttttcaaagaataaaaggataataaacacaggccgtcctgaatataattaacctcagatttgggaggcatggaaggacgtgccctgccctcagagctctcgtcctgagctctgcctttcttgagtgcgccgggagcaggatggatgggaagttggcctgaatctgccatggtgtggtactgtgagatgctctggaaattgtcttttttttttggcggggggtgggggatgccttcgcatcttgctcacttgtatctttctcacacctaagcagagggaagaagctctttttgccccctcgtacttagaccacccaggtcatcttttgaccagttttctgctctgctcaactcctttcaatcttcccagatgacaggccagctttgcctgctaagaacagccctggtgccagtggcatgcaggtggcacccctgtgtccagtcttccaggctctccagggtctggtcctgttcctcctccccagccctgcttccccgctcaacctccattcccagccacagccctgtgcccgaggttcagtcctccttgcctctccgctgtcctccctaggccacctcacttcacactctccctctggctagcggggtctttgcttaaattgttcccttgaggcctctcttccttgcccgtgcctgccttggatctcacttctctgtgaggtacctctgataacatttgttccctttgtgtgtgctctcccttttgctcttgattgccaaccattcattcgttcagaagcaggggtatgtcataatgagcaaattaccatatcatactgaatcaggatggccagttgtctcattttttaattgtttcatggttaattatcttacgctcacttcccactctccagtttcactcagttactccgtcagtgaagtttattggatgcctagcactgttgtgggcactgaggatacagcagtgaacaaaacaaggggcccgcaggaggggacagatgatgaatagtgaaacacgttcatgccttgttgtgagaagtgctaggagtgctaggatagcaagcaaatagagtaaagcagtagcgatgaggtatggtgggagggagggtaccttatctagatcacaggggagacctctctgaggaggtgacatttgaacttagcttcagaaagatctgggggaaagtatcccaggaagagagaacagcacatgtaaaggccctggggttgaaaggtgcttgatatttttgaggaaagtaaaggctagtgtgactcgattatgagctgcttgtgtacagatgttttctgcctcttttatactccctttaaccctgagcccagtgttaggaaggccttgtaaatacttacatacagaattatagcatttgtcattggttatatattataaaatagtaattttataaaataataatttatcataccctgcttagaaggcttttaataaaacattatattgcatataaacaaattaagggtttgaagggttttcttataaatgcactcctagcatgtttcaccaaatattactgttttaattgtgtttagtgcagaactttagacctcataattctgcttcatgtgcacaaccatcttaaaaacaggttttgttccaaaagtttatttgtaaggcactaggtggaaacttgggataaatttttctataagaaacaatgaagtaaatagtgatgtagtttctaggcgagccctcaaaagctatttagtggtgactgtagctgaaaacatactggttggtatcagcagtcgtcaagccttctgctggtagaccctcctctcagtagcattgtacctcatttgctgttagcaatcataggacccatttacctcagtcacttctcctactgtattttcagtctgttaaagttttatagaagggattttttacctttatacctttaagatttggttgcatgtgttataaatgagacagtagtgcagagagtggggaaaactctggactgggagctgggagaggcctgggctccagactgggcccagccactgactggctgagtaaatttgagtaagttatcctctttgaactttgatttctcaggttcttcttggctgtaaaatcctattgttttctcaccatagcagggaaacgtagatatacttcgttgttcaaacctgccctcaaatggctgcctctgatttcttcttgaagaagtatatggcactcagcaatgaggaactcaagcagttccccatgtgcagagctctgcagtgacattctcagtaggaaccttgattttgatctgctatctttcttgatgagttgaaagaaattttgtcccagaacttttggtccagataagatttctgtgttcttggccaacttatcttccatataattatgtaaattgttttttctttttaactcttagggataaaaatggtgactctggcttgcctgcttataaaatatagttataagtgcccttagggaatggaatgagtttgcaggagagagcagagctgaaagagtgtgggatcaaaaacaactttaaatgttaaatgcaaagctattttcagtaccctgctggaagaaaaaatttttttcaaggttttagaggatagaagaggtttttgctccaaagaagaaaggaacctaaggttttgcagtggtgaaaagtacctgatcctttaaccaactaccaccctcccttcccacctctgagttttgttttcgacatcatgaaccacatttgccatttgagaggtttgatatttaagtgacgttagtggcagagctcaactggcagtgttcaaatgacttaggtgcagagtgctgtgctgcaaacttccccagtgcattctagggtaagggatgcctcatagagagtgacagagcacttttagctctgcctctatttggtcagttgtgaatggtgtgttcctttttttccttacttgaaggcatagcgaggagttggtacaagaagttattgcttcatggacttcactttggagctagagggtggcattagacctagcctgccttcttggatgctggaataccagtggcaatgtcatctcttgttctctgctatacccctagcaatgaaaacagtgtctgtacagaaaagtctctcaataaatacttgtttattccttcaaaaagtgaattcagctttggataaatttttaatttcctccactctctagcagtataggcttatgaggttggtcttgcaaggtactttggagtttaggttgccatttctttttgacatctgtgtttttcttattcttcaggttggtcaggtatcagtgtcttttactgatgatggttgtccctgccctgctgatgttcatcttctgttatctttaattggctccaaactgcagcaaatctatagctgagccacattaactaaaagaaaacttgttgcatatttatttaggcatagtactacacatgtatttattcagtcaacaaatatctgtgagtctatatgccaagaatgttactagacccaaaggaagagcagaaattgttgttgtgaccaaggagcctgcagtttgattgccttgtggaacatctttatgagcattgtagaagggaggaggcttcatagaactggtcaggttttcacctttaaggatggtaggatttcgattcacagacaaggtgaggacaggtatttccaggaagtggctgagcggaaacagcataattaaaaacacagaagtaggaatggaccagtttgcattcatggacacagacttgtctaaaatggaaggttcttaaataatggtgggaatttaagtatggaagatcactgaaggcccaaacctgaagccattttagacacctagtgacttgcctaaagtgacagctgataagtggtagatccaggcttaaaataaggccatgggagctctcgaccactggcactggacttggctgtttcccagcagtctctagatgcaggatttgggtttgattggggattttcttttttctttctttctttctttctttttttttcttttttttttttttgtgatggacactgagattgggggttttagagtcatgagctggaaataggcaaggctctatttagcccactctttcattttgcagttggggaaactcagtgaggttaagtggcaagtcggagtttacctagtgagtcagagactgctaggcaatggataaccactggatttgttttattatgattatgattttagtgacatgaaatatttctctctaaagcatcagtccagtgttagtgttccagttggattggagcaatgaaggactaaatgcagcagagacctgacaggaggctgctagatgaatccaggaaggagagagagaagccagaactgagaattaattgtcaattatgttaatcagcatggtgttatcagtcaccctttagatttctagagtgcggtgaacatctgcctgtgtgagtggctttcaagtgtgtgaatctgcactgtactgtgaccaagataccttaatgaattctccagacagaaagtgccactatggaagtcgaatgttttaaaacaaatgcccacattttctggaaagagcaccagattaggagtcagatgacctgcattttaggctgcttctgctgcttagtcaccatatagccaaagcaaatcacttaatgtctcaaactgagcctgactccttatctgtggaacaggtataacaattcctgttgagcccttttcagtgtatgtgtgatgcttgtgtgagctaaggaaagaataggcattttgaagctgtaaagttgctttctggctgcagggagcagcagtgcagttttaatagtgaagatgtactggcccttacaggaatagcctaggagaaccagaagaaagttcccctacctccagggcatgtttagggaatctggcgctgtccaccaggtgggtgctgatgtgtactactttattggatagggccatgttttttgtttatttgtttgtttttattatactttaagttctagggtacatgtgcacaacacacaggtttgttacataggtatacatgtgccatgttggtttgctgcacccattaactcatcatttacattaggtatatctcctaatgctatccctctcccagccccccagcccctgacaggccccggagtgtgatgttccccgccccgtgtccaagtgttctcattgttcagttcccacctataagtgagaacatgcggtgtttggttttctgtccttgtgatagtttgctcagaatgatggtttctagcttcatccatgtccctgcaaagaacatgaactcatccttttttatggctgcatagtattccatggtacatgtgtgccacattttcttaatccagtctgtcattgatggacatttgggttggttccaagtctttgctattgtgaatagtgccacaataaacatacatatgcatgtgtctttatagtagcatgatttataatcctttgggtatatacccagtaatgggatcactgggtcaaatgatatttctagttctagatccttgaggaatctccacactgtattccacaatgattgaactagtttacactcccaccaacagtgtaaaagcattcctatttctccacatcctctccagcatctgttgtttcctgactttttaatgatcaccattctaactggtgtgagatggtatctcattttggttttgatttgcatttctctgatgaccagtgatgatgagcatttttttcatgtgtctgttggctgcataaatgtcttcttttgagaaatgtctgttcatatcctttgggatagggccatgttttaaagatgattacatttcacccccgtaagcctgggcatggacggaaaagttaggcatggatagccatgtgaatctattatctgtagacacctttcaggatagtgacaggcagctgtgaaccagaaaaacaagtgtcagaatctagccagctggccagtctggcattcttggatgtttcatctgtcctggggcattaggcagcgatccagaggaaccttgattagcctgggggattcatggctgagccagcatgctgtccaggtaatacctggctgcaaagcctgactggagatctgccaaatctaaatttctgccagcattacaagtgtatatattattattattattattattattattattattaatagcagtatctaaccttgactacctaccatatgccagcaactgtgctaagtgcttacatactttttctcattcagtcttcacagtattcatataaggtgggtaatgtcagttctgttttctagttagagagactgaaactcagacgagcttcagctgatacatactaagtgtaaaagccatgattcaaactcagaacagtctcagtccagtgcccagctgcataactgctatgttcttctttctctcttttcctggtacctgaaaatacttcttgtctctggttttgaggtttctgactgtgttattggttgatggatgggttgccacacagaggctcagctcagcacagctcttttttcttcatagcttatgacggacatcctcctggatactctggctggtgagcaaatgggtgccagtggtgaatgcagcagaaagactaactcttgccagctagtgcatgtgggtgaattttaaagacaacaaaagaaatttctgtaggtcagtttttcaaagagtaactggtagcttgtagtctacttaaaggccaagtttgatgttcatcaaagtcaccctgtaaaaacctttccaaatgctgtgattctgataacaataccatagaacattcctgtgtaattgacaagtagtttttacatacaatgtcttgtttagtcatcatcacaaccctatgagggtttgcaactacatatagttgcaaagaagactgggagatatctttagttgggaagccatgagtctagcaaaatctctgtttttaagggtggcgaggggagtgaatgaggggagctagcaatctgatgtgttgtggtggtgatggaagggataagtagagtttgaagctgttgtcagtagagttgggaggatgcctcctagtctatgacatctcctagtgttatgacatctcctcttgtggactgggaaattgcttagagtttaagcaactgtccagggttctacaactggtcagcggcagaggcagcacttaagtattgcttttgtgacttaattcactctctattcaagtttcatctttgctttctctattgaagttcttaaatattctgattcactgtatttagaagtcggcaggaattattaaagtgaacttctttgtggtatacactgttactgaatcagagtaaataaaaggtcacatgattggttgttgtgttaggtttaattgacgtgtactctgtatgatacagaatactcacatatcttttgtgggatatcattggtccaacagctttaaaaatcccaaggctttaatagatgataaaacacggagtttgtgtaatttcttgaaaaagttggccatcgagttcttggtcaggaacacaagcttcaattgtaacagtttccatggagacattagccttggcttgcatcatttcagctttcagtgcctttcctaggaatggagtgaactgctaaaagaagagctctggttgtggttgtcacttagagctctctcccctactgtttctgctggaggctgatttgcttttctgggtcttctcagttttttctgtgacctaagcataaattgtctttgagatcctggtaatctcatattttaaaagttttccacaaaagacaactgaatggaacacttttttttttcacccctttaaagtatttaattggccatcaacggtggctcacgcctgtaatcccagcactttgggaggtcgaggcaggcagatcacgaggtcaggagatcgagaccatcctgctagcacggtgaaaccccgtctctactaaaaatacaaaaaaaaaattacctgggcgtagtggcgggcgcctgtaatcccagctcctcgggaggctgaggcaggagaatggcgtgaacctggggggcggagcttgcagtgagccgagatcgcgccactgcactccagcctgggcgacagagcgagactccatctcaaaaaaaaaaaaataaaataaaatgaaaaataaagtatttaattggtggcaaggggctttgctagaagaatggacacctggtctcactcaagcttcttgtattagttgggataccaggtgagtccctctgttaaagagacccacaggcacaatggctgaaaccaggtagaagttttctctctcatgtactagtccctagtagatagtggtccaggcctagtatttttaacacatggcttccatttgatggttgaaggtaaaaacttaccatctcccagaggaaacacccaagggggcacacatccagtcatttttaagggaaagacccggaagcagcacattctctttttccagtagccggaatttgcaactacatatagttgcaaagaagactgggagatatctttagttgggaagcaatgagtctagcaaaatctctgtttttaagggtggcaaggggactgaatgaggaaagctagcggtctgctgtgttgtggtggcgatggaagggataagtagagtttgaagctgttgtcagtagagttgggaagatgcctgagtcaagggtgagaatctaagcaggcacacagaaaccagggcatgtgcagccatctagaggtcagggaagctcttggctctgaaactaagcagtggggggcacccaggcatggaagggaatgtgaattactcagaagacattaggttgtcagtaaaaggaaattcaccagtgtgactgaatcagtagaaagagcacttagactaggagtcagaagacctaggtttgagtccagcccttttacttcataacctggggcaaaaaactcccataaatatttgctttattatttagataatggcaataacagtgatggcctttcctgcctcccaggcttagtgtgagaccaaagggtgaggaagtactgtgtagactgcagccccatggagatgtgcacagtgtctgcccagcccagggcctgccatgggtgtatttgttgaatgaagtgtgaactattaaaagagttgggaaaaatgcattatactaaggagatcttaatcctggacagtcttctctaccaggcagaaaggttctgctctccactggtcaaggccttgggcctatgtgtaaaactgggtacctaacaaacacatgggcagacgcctgcagctccttactgggtagcacatgacacatagtatgtccttggcaaggccatttgctcattcctctgtgtaggtaaccaagtgcaacagaagtggaggtatagcccatgaatgtgaactaatcatttttaaatgatttggtccatgggcaggttagaagatgaaaccttcccaaggccaccaaaacttgatttcttgcttgaaaatgataagatgcagttataaaatgcttctgttgatttggaaaaaatgtgtgacttgttcaaaacaatatgtattaatagaaaatgtaacataaataagaggatacaaaaaagagcttaatgtttctatcttctgggcctagcaatagtgatttttttttccttttggtaggaaaatgggggctcagtggaataatcagttttatttctttttcttttaacttcatgaagggtttgtattgttcattttgttatttaatttgttcatttgctaaggaaagaacttctttcttggaactctgcggagtgtttttagatggactttactggaaaaaaacaggaattgaaattatattcacagtgcgctctaaactcttttaaaatctcatgcatggatggaggaaaatgcactgaaatatcaatagtggttctcacctcatggaattagaggtgacttttattctcatctccttctctgtggtttcctatttttcaacgagtgtgaattacttttatcatcatgaaagaccagttaaaaattaatctcacaaattaacactctcaagccaaaccacgaatttttgtttttcacaacctggcttggactataaactgtcacactatctcagacctatgcagattcttttctgagtgaggcattgaggaacttgttataaagatgatgctttccttctggaaatcaagaaacaagccaagggcttataatgtgttaggaaagatgtcctgagtaactttcctcctggaatctgactagcctttattacagctacttaaggaaatgagttttgtgggttccctgttcactgtgtcaccatttttttctttatcctgtactcatatgtacctcagggtccccagattttcttatcctgggattgcatgaccttgtccttggctctctcgggcccctgccgtttccagtgttctctgttcatgttcacaatattgttgatttggctgtggcttcttcccgcagtgttcttgtagactgaagagagcacattgctgcccttgtccctgtgcagcttcctcttcctctttatcattgctcaggtgagtggcctgagcagtgctcctgggatgaggtgaagagaagcagtcaagactgcagggaagggctaggggtgctgagctggccgagcttccctgggggaaggcactgggccatctgtccagcagcagttggcccacagctggcagggcaggctcaggagtggctcttgaagatggctgcttggtgtttgaagacagttcccagggcatgcattcatttgttgagcaccttcaatctggcagcctgtgttctagatgctggctgatgaccaaggctgacatggctttggctgtcatgggagtttcattctagtggtagagggagagagagagagacgatgtggtagagggagagagagagagacgattagcaggggaatcaatgaagaagataattacaggttgtaagaacagccccagaggaggttacaggtgcctgtttgtcgagaagtgggagggccagagttgggataggaacctatgtccctgattgcaaggtctggctccttctgtgtcctctgggctttctggtgggaagggaggaggtggaggagaccccttgcgagggccgagcttctcccattcagccagtctggaccagcctggggccttcagatggagatagcaaaagttgagggcataagctagggactggctctcttggtcactccagttgcccatctctgtacttccccaggtgaatagccatgttttttaaagaacacggagcaaatttgcatacaagagtccagatttatgcatgctgcagctttgtctgaaggcaagcttatattttctctcctattattttcaacttttaatgagttaccagcatctcagtgcccctccagcaaggatattgggctggtgttttcagggaacaattttaattaactcctccttgcctccctctcacccagccacccccagtccccttcctggtggctcagagtctggctttggcatgcaataagaatatttttgccttggtgttagcctttctgaaactcttgattaccagtgctcacaggacctttctgcagcactgtctgcttggctgtggactacccagaggagcttggtgtcaggcaaacttaggcgatttccctgagcatccttgttgagtctgcctttgtacttctttgtcaggtctagaggcttggccgtttgtcctgctcttttgtcccctccttctgggaaccctcaggaccctcactccatggagactcagcacccttcctcctgcaaacatcagtgatggggctttcccagccctttcccctatcttccttttcaaagaacaaagcctttgaagcttgtctcatacctgtctgatgcagtatgggaatctgtaagttctttgcctcctgaaggggtctggggaatcacttggctttcagagctttcctcgctcctctcccacccacagaccgattttaaccagagagtaagtcattcatgctgtgcttgaatactccttccagtcccactaggaagactctttgttactaaattctgttttcttgggaaaggggagcttattactatctcattttgttggttgttattaccctcctttaaaaatgtatctacatacacgcatgtgtgtacctacatgtttctatatttcccttgtgaatgtggccctcagagggcctggatttaaaccctgggagtggtagtgaccctttgggaaatgtatactttttgttccaaatcttctctggcttaaatttgtgaagttttgtttcagccttggtttcatagtttttcccagtttccaagataagtttggggctcactgtaatcagcatgtaaaggagaatatggccatcagctctgccccttaaattcatagtcagactcagtggggaagccgttcctgtcccatcttgcgctcgtggctctgtcagcctcaggcagctcctgcaccgtcctcctgcctgtgacagtgttgtcaggagttcttggtacctgggtgctgcttggcctcagggtgccagggctcccatgtggagtgtgcttgctgcagtctctacagcccaggtgtctctgcagccctcctcttacatagccacagcgtggtaaagtacatccagtttgcgctgtagtaagcaattttattaaaaaaataagtttaatatgtaagtggtcccttagttcgtttgaatggctcccctctctggctttggtttgaatgagctacacctggctggagccctgctgctcccctcagcatggagtcacctccctgtgctatggaggaaaggaagaagttattcttaccttggttttgagacaagacaagcctggagaaggctgtagggatgaaggagttgcccatttgtccagcatcagttgagagtctactgtgtgcctggcatcataggaagcctctggagtgctgtgagcaagaaaataatacttgatttatgtttttaagggttcttctcgctgcctgtgggccggcagtgaggaggacaagagcgcagcagggagatgggttaggaggcagttgctccggtgcagggagcagtgccagcttgagggctgctggtgggtattggtgtgagggtgggcaggctgcagataggccttcgcccattgcccttgccatgtgtccccatgtgtccccaggggaggctctgggcatcccaaactgtgagcctgccctttcccaagtgtgctaggccctgccaagctcctgcttcatggcctatgctgttcattccatctggaatgctctcttccccctgctttccatcctagctgagtgacattgggcaagtgaccagatctctcttgagcctcaatctcttattctgtgaaagagtgctcatggaacctactgcatgggaccatgaggataagactatagttgagtgtggtgattgcagtagcctccaaagctgtctcctgcttccaatttcatcccgctactgtgcattctttacacagcgatcctgtgaccgagggtcagatcagggcaggcctctgctcagaatcctctccacagtagcttcctgtcccagtcagaggaaaagccaaatcttagcatggccctcagagcttcctggtacttctgacctcatctcccaccccaaggccatggtgtatggttgatcatgctgggttctgcacagctcattgtggtgcatgtaagtggcactcacttcctccccaacttatgcattgcacaacttgtgcagctgtacatgctgctcctacctgcgcctctctagctccactccagccacagtggaatccgtgttgttcttcaaacacaccaggcatgcttcctgtttaagctctccctactgcctgctcccttggcctggaccattcttcccccagaggtgtgtatggctagttagctcaccttcttcaggtcttttttcaaatgtcaccctatttaaaattgttccatctgggtcactgccccccaaatgttccctttttcccttgctctttatttttcctcctagcacttatcaccatctaatatattatacgttttccttatttatttggtttatttttatttatttatttatttctcaacagaacataagcttgatgcaggcaggcaccagtgttaattttgttcactgctgtatccccagtgcctggattggtgcctggcagtaggggttcagtgatgcatgagtgaatgagtttggatgcacaaaggtaaagtattgggtacggtgcttagcacactggaagcacctaatacatggatgccagtattttcattgtctctgttaactctccaggccctggctcaaatgtggctttctctgagcctttctgcagtcccttctcaggctgaattaagtcaccaccacctgtgctctgtgttccccttcattttgccttctctgtctgctcggcatttatcacactgcagtagtgggcttatctcacactttttcctgttccaattgcaattcctgtggggcaaagactggcctgttcagatttgtatctcaggcggtctgcgcccccagctggcatgtggtaggagcttaggaagtgcttgctgctggtggctgtgggaggtggaaagagctttttaatccatcaggacccttacaagggggactggctccagcatcactgccgtctgatgtttgtgccccctcccaaggggtgtcaagggagagcttggcaaccacttaaatgagagtctccagtggtatatttagagcaaattttggagagaggagtctcttggataacagcatctgggtgacctgattgtttcacatataagagtttggctttttggctactcaggctttgagaggttggggtcattcaagggaggcagtgtaatacccatgtgttcagaggtggctgggacgagagggtgcaggagaaaaggcttgagctggcctgtaagggatctgagttggtgaagggagcacagcttctgggggtggcagaaggaataggagagctgcccctgccatacctggggaggggtggttaggtaggtgccttgggaggcatggttaggtaggtggtttggggccatggggggaaaactgtaatgccagggcaattactttggcctcttgtatttggcaggaggggtccacactggggattgtggtggcgtgagggagagggccctgggagagaagctctagagtcattttcttttccagaggtggagttgtcttggggacctgcacgtggcacgcagagcccatgctctcaggcacctttggggtggcagagtttcaactgaaccaacagaggacaaggggctgagaagtcggaggccttggctgaggtgcccagtttcttggttcactttctttacctgccaggttagcagcaagtgagcaaatccctcctgcctttgctcagcattagcctcagagacttgaggagagctgggccttcaggtgggagcctggtggccacactggagaggaccaagcttgacattgagtgtccgaggggctgaaagttgttcgctcatccagagatggattcgttctgcaaacatagggaaagttcccttcccattcctcatggctgtttgaggatggaattcctgcattgaccttggcctttccctgatcttggcctttcccctgcactatggcctctctactcttaacattacgccccagcccttttccatgggcccctcgtcttccctatggccatctaaaatggccgtataatattctatcaagggaatgttttcagtaagccatgagcttgatatggagcatttagattgcttctaatttttgctctttcagctaatgctacattaagccatctctgtgtattatggaatcatttcattagttggcatttgtctagctaatggcaatggcccaagatttaatagcgaatcagaatttcttttttcaagaagaatgtcatgaggatatataaaaaatttacttaaaatgctaggaatcatctatgttggggttttcatgaatgaggaagcagggaaacagtaacatgaaattagttgtaagtgaaagactgtgtgtataaaagtaactcgtgacttgtttgttcctgagtgtggaggggagccaataaatccttggaaggagcaatctacctgtgaaaatcaaagagatctgtattcctgcatctgatgaaaacataacaaacagtgatctcttcttaaggatatttttagaaatgccctaaaacaagaaaaagtaaataagatttccgagaaaaaacatgtctccttaattccaaatgagcctctctggaaatgccatttagtagtggaagcaggttgtagacttgctgaaaggatttggttctttggttattaggaaataactagaatgaaattgacaaacagacaacactgacttggtccccagtactgctttgagcctgaggtatgtgttggctttggaatgatggggaaggcttcctctgacttgctgatttgttgtagttgttgttgttattgttttgagatggagtctcgttctgtcaccaggctggagtgcagtggcgtgatcttggctcactgcaacttctgactacctgattcaagcgattctcctacctctgcctcccgagaggtgggattataggcacgtgccaccacacccagttaatttttgtattttcagtagaaatggggtttcaccatgttggccaggatggtctcaatctcctgacctcatgatctacctgcctcggcctcccaaagtgttgggattacaggcatgagccactgcgcctggtctgttgttgtttttattgtttcagtctctggtggcttattatgtagacttgggctgtaagctttgcatttcagtttaaaccagcaaatgtttacactatataaggttgcaagggctaaaactttagggagaaagaacccagtgcacccctgtttctgagaagctcatgaccagggagtgggaaggataaagcaatgttaaaaccaatggttattcaagggagattaagaagggggccctgggagagtcagctccatccttttagagaagggaggagttctacctcactgctgggcagggtggggctaaggggcaggagaatcaagaaaggttttatggaactagttgcatttgtcaacatcttgaaggacaggctgaaatggaggctggacattctcagcaaaggtaaaaggcctgagtagaggagatggagatggaaggacatggggcaatgtttgggatttggctgaagaattgcatgcctgtagtaatggtcatagtagcactttatggagagtatcaggtgccaggcatggttctaagagctttatatgtagtaactcacttaatccatgcaatgaaccaaatgaggtactgttattatccccattttacagatgaggaagctaagataaatagcaaggaattaattgcccaggatcacactgctgtggagccaagatcagaccaagttcatctggctccaggctctgtgcttacgaccatgaagctgtcctgtctctgatttggggaaagaacagtcactagaatcagacagatggacagatgccgtatgtttagaggctgggattatcaacattcaggaatgcagaggtggaaaagagaccagagatggagatgaggggcattggagaggtggggatgggaggagggtttggtgagagccgtgaagggccacaggaagacagagctttaaggagaagtttgtcagtgaggcccagagctgcagacaatcccaggaggtgagacctgaggaataggtctgggctgaggagaaagctgtgagggcctcgggagaggggcagcagggtgacccaggctggagctgctgtggtgtcctatcctggctgcagagtgctgcgtgttcctgggggatcatagctgttgatgagtatcactgtccctgtcctcttatctgtagaaagaggtgagtgtgacagagggggcaggtgagagctggcactgctaatttggcaaacctggtgacttttctgcagcctaatgatttttgaaagctgtttgctatgctgaggcacaagtgtgacttcccccatctaaatgctgtgcaatcgctattttccctggaaaattgggcccatgtgggctctgtgtgtggtttatttgagttccatttttatagccttattaccttgtccccatgatgcaagaggcctctctcttttcttgagctttgctgtgaaaattgtttcttaaaaggcacaaagtgatctctcgtcatctgggtggtgctcgctccacaagcagcacttttctcagactccgcacacacttgtcatcgcccctgcccccacttggcaggttcctctgattgttggcaatttactgagaacttttaggcagctcttgaagctcactacctatgtgtttgtcttgatttcttccggaagagtttgtgcatgtaaatatccattcagcctctttctctccgagatgttgccctgccactgaccgtgcttggggctgaaacccagtcttgtcctctggcctcgagctgattaacaatagcagtcatcatgtacagagcctgagtggttatcaggcactaagctaagggatttacgttcgtgatcttaattattcccaatttctttgaggtaggtactattacttcccccattttacagataaagaaaatgagccttcaagggatagagtaagttaccccaggttacatagctagtacatggcagagctgggcttaagcgggcctttctaaccttagactccatgtgctccattcattcattcattggcaacaaatgattgtctgcaacaggctgagaactgttgtagacccagggtgtacagcaaagggaaaaaaggccaaactcccaccttcagcttatattctaacttggggaggtagagatcatataataaatgacatatacattatgctatgtggtaatgagaactatggagaaaaatgaagcaaggaggtcagatgggaagtgggaggattttgaggagtggtcaaagaaggcctcattgagagtacaacaaattgttaggttaacaaacaaacccccaaatctcagtgtagcaacacaacaaaactgcacttctctgcagaaaaaattccaaagtggctgctcctggttagcaggcagccttccttgcagtcatccagggacctagactccttttatcctgtgtctctgccttcttcaagggccttggtttcctttgcattcaaatgctggagcgtgaggaagaagaagagagggtagtttgtgaggaaggctttatggaccagtctggaggaagcatacctccctcccacccactggccagaattcagtcacatgttcactcctgactgcaagggaggctgggaaaggaagtctggccatgtgccgcctaaaaaaaggaagtgggttctggtgaactcatggcatggtgtgttgcagcgagtgaggtgaagaagtgagctatgtgtttagctggaggaagagcattttacacaaaaggagcagcaagacaaaggctgctggaatggagtggggaggagagaaggagagtgggagaagatgagggcatggagttgtgggggccaggccactggggtcactgtaaggatttggttgccttgggaatgacaagcagagccagaacatagagttttgaaggaggaacgacaggatctgaggcacgtctcacagggctcactctggctgctgtgttgagagtggactgagggagcaagggggatgcaggggagaagcgggcgtttgcgggtgttatccaggtatgtgaccagaagggctggccctgagccggggtggtagaggtggggagaagccgttagatttgagatcagttctgaaggtgggccagcaacttttgctgtgggattggtagtggggcatgagagaaagaaaggagtcaagattattctgaggttttggctttgcctaatgagtattagtctcacttcctaccctcagaagcaagaggggaaattttttggaaaaggatatctgagtgttctctgggccctgacctgtcctccataacctctttcactctgtgatacttttttcagcacagatgggcaattcccattcatgactaggctttcagacatggagagggcacttggagtccctcctggcacacagcagaggtgaggcagcactgggaattgtctcactttggggtctttgggtcaaaccttgggacccctttagagtgacatggcagggactgagtgtgccctctaggggggtgagatatgcctactggagtccacttccaatgcctgccatctgcaaacactggtgaggccctggctgaagggtaacaacccacaaaagtgcacaaaaggaggaagttctggaatgcgagttgatgctgccagcggtccggttggctccttgccttctgttctttgtgtgttgacatcagacctctctactgcagacaggctgccctacctgagggggcacagctgccagcagcctcagtttacaatcctagcaaaggaggagagcctttctctacatctaggtatcagtttaagggaaaagcctctgtgtttgagagtgggagcggaaactgtttcccacgtacttccttggcagtcatgacctgtcaaggctgaaactggagatgggactttttaatagaccatgatctcactgggagcatatggggaagaaagttcatcttagagatggcagggcgtgagctgtgaaaacagatagtgcacacctactagatgctgggcccccgctaggtattttatttcactggagagcaaaacaatatatcatccctgccctcatggcacagatggcctcaagtggctaaaccatagaatggctagctgagagaaatgatagttctttctttttttctttactgattgcgaatggggttgtatttttaattttggtatccatgtgttcattgctagtatatagaaatccaattgatttttttgtttttatgttgtatcttgcatgtttgctaaactcactaattagtcatagaaatttttttttgtttattccccaggattttctgcatagacaattgtatcacttgcaaatagggattgtttcatttcatcttttccaatctgtatgttttttatttctttttgttgcctgattgtgtggccaggacttctagtcctatgttgaacaagagtgctgggagtgcacatccttgccttgttcctagtcttggggaaagcatcagcctgtcaccattaagtgtaaggtcagctgtggatttgttgtagatgccacttgcactttgctggcatggttgtgagtaggactgtgggttttgtgtgtttgtgtgtgtgtgtgatgtttggctgaaatacagtggttattatctacaagttttctgtcttgaaacagggagatttgttggggcattttctctttgtgctccttggcatttctgagttgctggtctcctcagttccaagtctgagctatatgcagaaaaggaaatgcaggaagctcaccactgtgttgttccttggatcctgaggtcccagctggtctgccttcttcagactgccatttggagtcttcttatagtcatctagcatagaatgcccaggggttttcattgttcttagcaggtggaatcagggaaagtgcacctgctccatcctgctgggagtggaaatggttgggggaaattggagcgtataggtcggggctagtttagatgcaagggctccgttctgtaggtgcaggagggccgtggaggctcagccctgacagcagtgggagggggatgggaagagggggagtggagagagcctaggtggctgctgcctgtgtccaggcaggaggtcctgaagtcctgaggtcctggccgtgacagtagaactgcagcagaaagaaggacaggaagttccatgaggacagtgaggaagtgcaaggagaccaggttggtctgaggtttctagctagagcagctagctggttctgagataacagagacagagggaggggtctaagcgtggcagaggggtgtattctaggcattgtagagcagatctggaagactggacttactgtgcttcccctcaggggaggcttcacagaggaagtctggctgctggggaaaaatccagggagtgtgcattctgggcagaggaattctggctgctgggtaaaaatccagggagtgtgcattctgggcagaggaaacaacgtgggaaaaggcacagatacagaaaacggcgtgatgggcctgttgggactccagctagctgaggcataagtgggtagttactggttccatgactgggaaggatgctgtaggagtgcacaaaaggaagaagttctggaatgcgagttgatgctgccagcggtccagttggctccttgccttctgttctttgtgtgttggcatcagacctctctactgcagacaggctgccctgcctgagggggcacagccaccagcagcctcagttttacaatcccagcgaagggggagagcctttctctacatctaggtatcagtttaagggaaaggctctgattggcccaggttggtgatgtgcctgcctttggacccgtcactgttgcaagggagtggagagttctaatctaggccggatcgtctgcccacccctgttggggcaaccagagtcttttaaaggagaaggcagacaaaatgcatctggggaagataaaaaagactgtttaccatggcttactgtaatagattttgaagaatatgtagtctggcagtgcaggaactcttcatggagattaaagcaggggacttgatcaaagttaggttttattaaaatcattctggacactgtatggggttgtgattggaagtgaatgacaagaggtgtcaaggcgggttcgtaggccactgctttagctccaaggagcactgatgaggcctaagctagcttagaatcctgacttactttgtttgcacttcacctgtagcgacagcatcagtgaggtggagaacagggatagagtcctagagatgttagacaggcaagacttggtggccagatggaggcaaggagaagggggtcttatggaggattccccactgccaccaagggcataaagaatgagtctctggagggctagccttatctttggaaacactattaagtgttggcagactcgatgtaccttattgcttcttcagaagtgttagtgttgttggcttcttgtggtatccagctggaaaaggaagctgattgattgcatttccctccctttaaagagcttccttttttgagaaatcagaagataggtgatacagtcaggactgccagtggagaaataggttggggagagggagacactggcttggagactctcctgcccccagcctgccccgaggcccgcgagtctgctttaggcacattcgtccttttggcatcatccttgctgggaaggcttttaagggatttaaggaaagaaatgacacaatctgattcatattgcaccagatttcctcctctgttcagaatagactatgggtggaggtagagtgactccaagagtagcagcagggaagcagggcaccaattaggagactgtcgcagcaatctaggatggggacggtggaggtggtgagaaatggtcacattctgaatacattttgaaggtaagaaccagttttagtgaggattagatgcggagtgggagagaaaggagatgaaaatgactccaaatttttggtctgggcagctggaagaacattgtcttaaactgaggcggacacaacgctgggaggagcacgtcaggggtctgtgttggacatgtttaagtttgagacacccaccatgtcttacacaaagctcccatctacttcttacttgacacaaacagttggatgtactggtcaggagttcagagcaggggtccaggcttggagagaaatctgagcattgttagcatggaggtgatatgtgtgaatccaggagactagttgagatcaccaagggagtgacagagaagagatgaaaacaaggactgaacacgctgacataagaggtggggagatgagggagaataagcaaagataagccagtgaggtgggcggaaaaccaggagagctagagggcatgattaactggtgtcaaagctgcaaggtaaggactgagactttaccaatggatgtagcaaaatgcaagacaggccaaatgcatatgctgttggacctaagcttaactttgcaaataagtcatagttccttcccagaaggagaatataattttgcaaaaagggatcatttaagatttattaaaataaatctgagaaagatgtgaagatagtaccgtaggaatccagcagaaggaaacagtgcttctggcttttgtggggaggattgagtcagattcattcataccttcattcatttgtgtgttcattcatttggcaaaaacttattgggtgccaggggttgcggggaggagggaagagagagttgttatctagtgggtatagagtttcatttttgcagatgaaaagagttctggagatggcttgtggtaatggttgaataagaatatgaatgtacttaataccattgaactgtacacttaaaaatggttaagactgcaaattttatgtgacatgtattttctcacaattaaaaatggagagagattaaataaaaaacagagcactttttggggccccatcatgaacttggtctgggatatgatgtttgaaatggatgcgccatctcagtagatggaggtaatgtggagaagagtggaggaagacgtccagctcagagggttttgggaactatcagtcctgtttgtctggatggtagggtctatcgggggaaaccatgcaagctgagactgcagccgggccagttggtgcaggcccagcatcctggctgtggatttgggcctgccttcttagattctgggagcctctgatggtttctgcccaggggagtgtcattccaaaggtgtgtatttagattaatttcattagtccttcctgttaaaccattgcctattaaaagcagtggggttgaggcattcatttttatggtgaaaattctggcctagcagaattttagatatccaagcatgtgtcaatgaagtgagtaggttatttttccatccattttacaagtatttattgaggatcatctaagtgcccgtagtgttctaggcagttgggggtatgggacggggtgaatttaacaggtctcttctcttaaaaagcctacagtctagagaaaccccctctccttcctaaacaagaagttatgccacaacgtgccatgtgttaccataggcatgccgccacagttccatgggtactgagaggagggggtgcctggcctgcctggaacactggggaggcttacagggaaaaactgtccaatggatttaaaggacaagcagggattttctaggcaaagaagcagaatgggcatcccaggagtatggtaaatcaaaacttattgggtgctatgaatttaaagctaaacttttatttcattggcttttaggtggtgctggctagagtgtatacgtttggacccaagcttaacttttccaatgtggaatcctgggccttcattggtaagtttgtttgatgccttcttaccaaattatgctatcaaggattggtatttggaatgaaaggcaaggtagttatcattggcaagttctctgtggaggttaccagccctggacctggagaagcctgtagcacaggctgaaggggtacataggaaaagtgaaatctcactgtaggtttctgtggtagatgcagagagggaggccagaggaggggaaccaaggggtgcgggggatggatgcagcgggccttatggagaggtggagctttggctctgttttgaagggcaagctagattgaaaaaagtccggggaggagtgaaagaagattttcgggacttgagaacatagaggtgaggtgtaaacaaagtgggcctagcagcagtcccataggagcaaaatcttcatcgaaaggagtcacgggcaagaactgtggtgggatctgctggcgtctgatgattctagtccatcagcaaactttttctgtagaggaccagatgctaaatatttttggcttcgtaggccatgtggtctctgtcacagctactccactctgctgtggtaacatgcaagcagccatagataatatggaaatgaatgggtgtggcagtgttccagtaaaactttatttacagaagcaggtggtgggctggatttggcctgcgggatgtagtttgccaactccttttctagaccctaaatgcccggctaaggcacatagactttatcctgaaggcagtgggaagccattgaagttattttggataaagaagtgaagtggcagaagtgatgtttacattttaggaacattcatctgatagctggacaagaggcatgggccccttttggaaggcagcagcagtcatccaggcatgaggtcttgcggtgaacagtagtgaaaatggaagcaaaggatcaatggaggagatactgcaaagggagaaccaatagcgttttcagtcttcttagacttaagaggcaggagtcaaagaggatgaaagtttaagcttgcttgtttacggtggtatctttgacagaaatgtagatgttgggggtggaaaggatagctgatgcatctggttttagatatgttgaattcaagataacagtggttcatccataagaaatgtccagcagagaattggaaatgcagggctgaagcctggcctgagaagattaagtctagagatgtggaatggaagccataggattaaacacggtctccccaagatgagcagtgggctgagctgtggggaatatgcgtaactgtgggacgggaagacgatggaagagacccagaggccatggaggagagtcccgggaagggaagagaatggggcagcagagaccagggagaacggacctgaagggaggctgctgaatttgtgacaaggtctttgcagatggccttgagaaatgtaatgtcacaagaggggaagggaagaggaagccaggttacatggagttggacataaatgaaggataaagaattgagatgttacaaaaatagaccgctcatagaaggtttgggtagtaaaagaagggagacacataagatttagatacttgcttgtcagaataacctttgctttagctttgaggcaggcaaagcatgctgtgaccagttttcatttccttctttggagccaagctgtgtttgggagtttgtgtgtaccttgggcttgtgattgtgttcttatgctcccttttgaggtgtggtgttcgtaactctgccacaacttgcaccacggaatccagcccgtgtttggacccttgccatgagacaagatgtgatctgttggggaagtagttgcatttgtataagttggaggagaaagtagagtggaccaaaaattgaaataaaccttcttactacagagtctatccaagtatggggacttgaggataattcctccagtcatgatttaattatgtatcaatttgtgctctgagtattttgagtgtaccttctttggtttgaattctaagtagtttttgacttggtttgtgtgaatatagcagttagagagctggtaacaaaagcaacagttgtaactggtttagagccatgatttattgaacactcattatgtactaagtccagtgctaagtgctattgtgtatcatcccatttcatctttgcaatgacctatgtggggggaattattaatagtattcttatttcagccagaaataagtcatagatgagtaactatgcaaggttacaagggatttgaacccgggtctgtataatccctggcttatgctgcttcctactttatcttgcctgtgtctggaatttttcctcctactaatgtagaaggactagagatagatcgagtccctcaggttaaatattcagaggctgtagtgggtgtttccacttcttaggagtctattgaaagggcagaagaagtgtgggaagtctggaagagactaaggccaaacctcaaacacttactttaactgtttccccagataaaatttagttgaaggcagcagccttgggcttggaaagaaaatagcgctagaaggcatgagagtcagattccagtcctagcattatgacaattataatgtcatttttgtttaaactcttggcatttctctccaattacctccagctttgagctccaaaggcaggctcctattttgtcttgtttttcactgtatccccagcatcgtagcacagaatctggcatgtagtatgttatgtactcactaattatttattgcttcgaatgcaccaagggacttggtacaagacacttagcctctcaggcactgctcttggcatcatggttatagaggtgaaacaggacaaggtctctgctgtcgtgaagcagacgtctacatgtgtgagatgtagaatgtgacgtcaggtatgatcatgctctgaaataaaagacagtgagaccggggtggagagggaagggcctgtccaagaagtgagacagtgagctcgttgggggtaaaatccataaaattcctcttggggtgactacagattgtcagctgcgctgtcagcaccttgttttaattgttttacttggctgccattgccaatgcccagctgactgctccctgcagcgagaactcccacctcaggcctcgctttcttcagctctgctgagcgtgcctctcctgggtcggctcccggttctcctccagctgctgagattccagcctccacagcctgctctgctggttctctgttctttgtccttagcttctggtttggcttggtccctttcacgtcatccttaacgtcctccctgggtgagctcatccaccactcacctctgtcttgaagacacccggatctccatatccggtctgaacctcctcccagtccacactcctagtggtctgccccgagggcacctcaacctgtctgtcccctcctgagtgccacatgcgtctttctccctgtgctgcctgcttggtccacgcccctcagttgcttctgcttcatgagtcgtcctggccttgtcttttccctcatattcccttggttaccacatcctgaagagctcatcttctaatttgtcaactcagttcttctctgtctctccactcctgtgtttaggattcatcattttgttctatgacagcctcttaattggtcatcctgtgttcatctttttcctccctcattccactgcccacattcctatcaacgtgatctttctaacacatgtctgatcagagctttcttttgcttaaagctctccaagagctcctcattgcttagaaaataaaagctaacccccttcagcggggcctgcagtcttctcatcatctggcccttggccccctgcagcttttgctcccccacccccaccccactttgggttttcctttttccctaactcacatttctaacctcagcctagctaccaacagccatcacctcctagtgcctttgcaatgctgggccctctcctgggaatggcgtggtctctgttcaccctcttgggaactcaactccagtttcccccaaatcttcaggacaccatccttccctacccagcacctctccatgacctggaaatgaccttcctcctggctcccagaacaccctcatgtctctcttgcaaagcacttatcggtgttactgttgatttacttacctgttatgctcagcaacctgagctccttaagggtggagaccacacacacacacacacacacacacacacacacacacacacactctgtctctctctctctgttccaagtgccagcatagtttacctggctcaggaagtttttgttgtaagagtgaggagtggtctgtttgtgcagccaagcaacagattcataatgtgataaaatgtacctgaaatgggaggttcattggccattgggtttattggggtgctcttcttgtcagctttgagtgcaggacaggttgtgttgggcttgagtttgtgacgcctgttgtgtctcccagcatgctgagacctcaggaatgtctcttctctatattctttgcccctgactttttatttttttagctcttgtttttgatggaccgataatagcaattcaaaatgaaaaataatccatcaaggaattctcaggaatgaggtccacccaccttggtcctggatgaatcccaaatttcctaaataagccagaatatctattcttgcgaactactgtctgacagcctttttcccccttaatccagctgagaatgcttttcttgaagggtaaggatacctagtggcccttcatgggggtgcctgagggcctctttgtcttcattttaaaccttgtaaagtccccagtgaatactgaggagtctaacaaataggaagaagctctgaccccaggggtcccaagtcagcatctgtactttgcatgggagctagcacaatgcacctagccaatagcatataaactctcctgttttcattcagtgccttaagcttgttgcttgttgtgtcttcttcacttcctatctctgccagagacctgagaagttgtgccaagagtgcagcttttatttggggcctcacagtaatctaggaaagcttttcagaagagagccattctcagcaccgaggtgtcctgcagaccaggacactccagcaggctcttggaactgctttcctgggatggaaatgcttgtgatgctgcctccccttgtagggactttccatatgctgttccctcagcctggaatgcatttttctcctggtttgcctagctcatgcctgttcaccctttggaactcagctgattggcctgcctcctcctcagaagcctccccaacctccctgataagaaggctaggtcttgtcctcaccattcccatgccagcatctagcgcttatggactgctcaccttgtgtcaagtactgttagaatgcttcatgcgtagctactttgtattaggggcttggtagatgttggctgaggtaagtgtcatcattgtcccaaagacactgtgtgaggaaactgaggcctcgacccattgagtaggtgacagagcaggagtttatcccagatgctggactgtgggtttacgctctgacccttctatacgccaccgttccctctgctccaagtccttgcagtctgtccttttccagcacttgtcatggaggtcatgacctcggtttgtgtggttatttgattaatgaatgtttgttccctcactgggcagcccttttgagccccaggatggcaggagtacctaggactctaggcaggtgcgcagcctggagttgaccgagagcatgtgggactgcccacttgcccacagctgcttcttgccttttgcatcacaggagggtgggctaggaccataaaagagccagcccaggcctccccctttctggagctcactgagtgcgtgcatggggtttggccgtcaccctcacttccatggttctgcatcagaaccagctgtgctgaggaaacatctgtgccttgttaaggtctgttccttctgcccactccctttgcccttttctctaccttacaacccctttgttgtccttcttcaaggaaaggggccccctttgtctctcagggcagagccagctgcccttctcctggtcctcttgatctgcacacactctgaggatgactgcccatggcaggtcatgatggtccgtctgccctggactgtggtttctgtggcagagcaatactttgtacagtcagggcccatggccctacggaaggctgagggagagcctgaggtcattgccttaagagaagctgcttcatggtgcagttggtatgtgtgcatgtgtgtgtggatgtgtgcttttttcatgcatgatgtttttatttgtgttatttatccccctgctatatctccctctctcaggggtctaacatggagctttgaatagtagatacatcatagctcttggctaaatacatattttctcccccgctgatctgaaggcacctcccttttcccctacccctcactttggtaccttggtgacttcacagggttgttatgacttcccagacctcattgagattgcagtgatgtgaaaaccctacctagattccagccagctgggcaggggccttggcagcaggggaagcccagttccctagggcaactcaccaggcctccagggctctctagggccaggctggctgagcttcaactgactcatactgtttttgactgggaaaaataaaaattttaaaatggcttctgaccaaatggggaaagtggatgtgggaggaggagaagggggacgttagccacaccctaggtacatttgccagcagcaaactgagatgggcttaaagtgtggctggcctctaagacgcctgcttcaaagggcattcggcacactggtctcaggctttggaggcccacctgcttcagaacatcagctccctgtctgtctagcgttgtgacttaagacaaacccaccaagctcccttagcctccattttctcatctgtaaaatgggattgtaatcattagaataacctttataaggttcttgtgagagtggaatgaagatgtgcttagcaccgtgactggcgtgtagaaagcaccaaatatttattatctgttaacattgtttttgtttgtcaaagtattattgttaataataattataagaagactttggaacagatataaagtctaaaatgcaggctgtgatgaaagggagatggtatataagaaaagtgctttttgaattgcacattatgtccagatattattattagcacaagtatgtttattattgttttgtctttgaaaaaaatgctggagcacaattttatgatgttgagtctatgtcctttgttgttttgttttttgttttggaaaaaggtttgtcacattggcctttattggaatcttgtccagtggatgtatgacccacattggtgaccctgggtgccaaatgcctggacagcacctggcaaagaagagccattatttcaatggtcactattgtttaaaatcgttatggtaaacaatacctgacagaagttcttagaggttcattgacagtaaattgtgggcaatgcactgagttattatttactctagacctgagaaattctccctctccaagttttgtgccttgtatagctaaataaatataaacaatttccttagaatttgatacaaacagctaccattgtcttcacaagtatgttagaaatactttcttaatagcaactacttgactgttttgttttttatctccattccctgccattactctgcctcttcccatctttctgaaataaaagtgagccaaattagccatttaaaaaatacgtagatactttcaggcagaggttgaaaactgtctaccccctggctgcatctggcttgcagatgtgttttgttcagcactcatagtgttttaagatgtttaaattagtggccaacatttaaaaatgggtagatttttgaatcaaaatccagatttccagctcttcataaaaaatcaaaggtctagtgggcctgggcccgtcttccttgtggcagtgcggaagagtggtggtccctcccctgggagcttgtttctccagcctgcctccggctggcccagcctcactgtacctttccatggcctgcttggcccctgtaggaatagagtttgtagtctctgcttaatataactaataccccttagatactgtgtatcagtttagaattatttccactagcaactgtgaccataggtaggaaggatattttacttgctaagttgtcattcttatgatagcccaaatggctataatagtattttaggctcttttggatttaatagaattaccttctctcctctctgtgggatttcctcattaacaatttttaaaaagtgttcagcaaggcttatatagcaacataaaattttaaataatgcaggatataaatttctatagctgctattgaaggggggttgcaatcaagtgaactgctttaattcaacaatttatggtgttgtaaatttgaaaaataaaagacacttagttttttttttttttttttttttttttcagaataaaataattaaatagttgacctttggcagagtctttgttgaaataggcaagggttttgagcttctcagaacttgagaccattgccttctggagtctttcctcagatgagtctgtgcctccttctagctagtgcactctgagcactgtggccacatctggagggtggagaggagacttagcttccaatggtggtcactctaggggaggggggcccttgcaaataccaaaatttttttaaattattattttatgagcttttaaaaacttttttgtttttgtcatcacaaaagtaataaacacttgtgataaattcagacaacactgaagtgctttaacataagcaacaaaatcttctgtgacctcccccaaccttttccaaccattccccaaacataagcacttttgagagtttgcttcttatactcctggacttttgcatttgcttgtttctctccacccctaccctttgccctcaaccacgacatagatactttcccttttgttttctaaagatagactgtccctgtgcatggtgttctgcaactttctttttacagctgtcaattattatggttatttttccaagtccatatgtacagataaatgtacttgttacttttaaaagttgtactccatgttatggttgtatgttaagtaaatttcgttttgtattgatagacactcaggttgtttctgaccttttgccattgcagtcattgctgctgtggaaatttttgtgcacacgtgtgaacttttgcctgagattttctttggtatagatacatagaagtaggacttttggtttaaatggtttgctgtttaaaatttgaatccataatgccaaattaccctccaaaaaggctgtaccaattcatgctcttcctaggagcatcccattatggctttgctaatctagtttttgcttacacatgtgtaagaaagtaaatcttaaaagcctcacaaataatgccatcaaaattacacgtttatcttagaaaagcattcagaatatatgtctgtagatttaattatatgatttttatatcttgactttgatggtggttatcatcctgcaaggtgacaaaaagttccctaaatactgtacacaattattaaataattattaaggatatcagttgtgccaggtagcctttggaagaattacagccaaatcacagcttccttttccacagctctgccaggctggcttgtctttcccaccaagggctgagccattaatactgaggctgggtcagcatttgaaggggccctgccagggagtgccaggccttgggccccagagacctggggagtgggagatggcaagtgactgctgtgaggctgagacaaagtttttgcctacaacaccccatggctgtttcctttactgagctagatgaggaaagcaaagggaagtgatggtccaagacttctggtggtcacttttgttcatagatttctcacaggagtgctaacatttaggctcatgtttacgaaggtttgaaaccttagcatttgggaaggatctgcaaattctcagccaggggccttaactgatcacaggtagttgtgaactcttggtccaggctgtatctcaaggcttcttcttagaaggacaggtcagcttaccacctgctaactgcatgtgaaattttgaattctgccttctctagctctcctctctggctctgagctggtatctggcatttgcaaacagtttaccctttgttgacttcttagcactaacctcacttttatgagtctgagtagacttgatacccaggccatttatcctttgagggtgccctcagcttcatcagacccatgctgggcagtctggcatagtggtaagaggcacttggagccagacagacctgggttcaaatcctgacatcatcacatttactaacagtgtgaccctttggctgatgacctcacctctttgagcatcagtgtctccttctacaaagtagggacagtaattctttcccaggggtattttgaaggatatacgaattaatatttgtcaggtgcctctcagatgttcagcacaaaataaacagtgtataaatatgagtcctctcttatcttcctgctgtagagagaaagttcgttggggatgctccaagttggtggctactggctgaggatcctggagtaagaggaaggctaccatgtaaacccagagatgaatcatgaacaatgtgtattctcaggagcttagtatttgatatgggagcctaacaagcaaatagtgtgtccagtaataggaactgattaatagaggaaagattaattaaccttctaggtgggtggggtggaaaagtaggtggggtattgaaggttcaacaggagttcgacagagaagatagaccataaataataaatatacggctgtatccactagagataaagttacattgttttttatgtacatgttgacttcttttggccttgccaatgcactgatatattcaaattcagctcctctctttttctcttcccttttcccttcactctgcctttcctccagccctgccttgaaatactcagccactgaaaatttcttaaagaatttctttatactttagtaagtcctcagaggataccagttcaccctactgagattttacaagaactttggtgtagctggggttttttttgcattcctttttctacggtagatataagttcttttgggttgcccatcaatgaacaaactaccaaccatttgatgtttactgcgtgactcctgtataccaagcacatgtgccatttcacttagtccccagaatgtcagagcagctttgtgaaatgggctgcccgttctttcttatggatgaagaaactgaggcttaggtaggttaatatactgaatattatacatgtagtgagtgggaaagccacagttcacctccagggtctttttctccctctttgctgccttgcttggggtcctgctcatagtaggtggacagcagatgtttgtctgaacatatgagaacactgcctgccacgtgccggtcagtttgatttgtgctgctggttttgtaacccacatggggcaatgacagctgctcaggtactttcctacctattagtggggccccagggtcacacatcagtcataattgacaaaaaacacaatttccctttcctctcaacttttatttctaaggtacttgtaagcaggtagattagattgttaacttttcattttttgctttgtctctctcctttaaagactatgtgaaagaatacacagtgccctgagagcctggcctgggaatcagaaacttagattccagcttcggttctgctggtaactcctcagtcattatgggtaaataatattccctctccagaactactagattgtgtccttggtgcagtctggggttcgggtggtcctagggaccctgcctactgcatgaacctgttatcaccatgtgaggctggaaggatctcagcgttggtgttgggcaggcctgagtgagcatcctggctcctgtacttcccagctctgtgacctcgggctaatcacctgactccctgatgcttgttcttgtctacgaaggagggctaagaggacctgcttcccaggatcactgtccagattgaatgagaaggaacgtcggcttccttccttctgtctccaactcctgagtgcactggttttagactaactgggtgtttctgcagttgaaaccaaaacaccttcattaggtacaatgttcattatacctcgcaacaccctgagatactcaactcttagatttcttgaagctcttttttgttaagaaactcctcaaaggaagatactcttctaccccattgagctttattagtgcttcaatgacagcaccttattttttcacttttttcccccttgcagacagaagctgcagtgtgaatcagtttgcatttatataatttcttttgcatttctttgcaaagaggaaaactccattcatttagcaaatgtccgtcatgcccaggccttatgttaggtgaagggatttggagagaaatagagtcactgacctcaagaagcttacagggaggaaaggtgtaaatacataaagtgacacatgggtttgtcctgtcaccaaggtatgcagtagatgctgtgggagaagagaggatgacacaggttctctcttggaagacctcatagagaagaggtgacttgtgagcaagtctttttttttttttttttttttttttttttgagagagggtcttgctctgtcacccaggctggagtgcagtggcatgatcctagctcactgcaactttgaaatcttgggcttcaagggatcttcctgcttcagcctcccaagtagctggaactacaggtatgtgccacttgcctgtctgatttttttttttttaattttttgtagagacagcgtctagccatgttgcccaggctgatcttgaactcctggcctccagtgatcctcccaccttggcctcctaaagtgctgggattatagacatgagccactgcacccagccgttgtgagcaagtcttaaaagatgagtaggaaggagtctgtcagctgtagaagtaggaagggcccaggcagaaggagcacagggcagaggctagagccctggtaggaggtgacacactgggtgcatgtctggagctggagccaagaggtggaggacctaagtggctacatcttggcagtcacccatatattggcaagccccaaatctttgtaaccagcccagattgtcttcctgagcccccaactcccatacccactgcccattcagcagctagctgcatgttgaagtgtagtggtcttcccagacctaacataactaaacagaagtcttgatttgttccttcaaaaacaaacaaaaaactagccttgctcctcctcagtcttccccatgttatgaggtccccatcatttttacctggctacccaggcctaaaatgtgggcatcatctttgattctgcttcctcctgtgttcttcacatcatctgtttgcaattctttttttgtttgttttactggttttaaaaattatttatttattgagactgagtcttgctttgtcatccaggctggagtgcaatggtatcatcttggctcactgcaacctccgcctcccgggtttgagaaattctcgtgcctcagcctcccgagtagctgggattacagtcgtgcgctaccactcctggctaatttttgtattttcagtagagatggggtatcaccatgttggccaggctggtctcaaactcctgacctcaagtgatccacccgccttggcctcccaaagtgctgggattataggcatgagccactgcacctggccaatttatttatttttaattaacacataataattgtacatatttatggggtacatagtgatgtttcaatacatataatctgtagtaaccagatcagaataattaacatatctgtcatttcaaacattgcagttcttgacaactcttactgtatgtcctggaagccaccactgctccttattattagtttgtttctttatcaaccaagcaggccagaccactgctctaccctcgttcaaacctccactgtctttcagcaggtctcttgtcagtttgctacataggcaaagaggtcttttaaaaagcaaatttgtgtcatttccctgctctaaactctccagcggctttctggcatctttggaatggaatctaaacatctcgccttggcctgccagcccctcctgctcatcttctctggtctcatcccttggcactctctgctcactccatttcagctgccgcatcttttcttactgttccccctgttgtctcatgggctttgcacttgctgtcctccgcctgagctgctcttccccagacaccgcctgtctcaccttcactccacgctggcctctattcaagtgttctcccacctgtctgaaaaagcaccgttctgccccctctccccgctgcttcaaccattctgtcctacctcgctttggtttctctcattagcactcatcactctctgactttatatgatatgtttgtttgtcttcttatttagtgtttgtcttaccccacaagaatataaatccatgaagatgggacctggtcttatctattgcattcagcactctagggcctaaaacagagcctggcacacagtgggtgatcctgaaacacgaggtgggtggatggacaaatgactgagttaatgcatgcctgcatgcaagcgaagactttggagtttatttcataggcagtgcaaatctagtagacatctttcaggaggtgagtgacgtggtcagcacttttattttagaaagccagctggtggcagtgtgggggctggactgtaggagggaggcagcagaattactttagcggctgtgaaaatcgtccaggaaattgatgctgagtgttgtgctagagctgtggggatggagaagaggggacagatgacaggacctgaagatctttgagtgtctttgatttctattgggataacttggtatagtgattcctttataagaaaagcaggaggggacgaactggtccagggagagactgttgacactctgtggtgtttttctcaccaagaaaacctaagccctgggatgcatgttctctgtagtggcattggctctctggggagtgactctgctgctccgcagcctcccctgttccattttttaataagagaatagtcaagatggtggtgtcagtgagtgggagtcttcttcatgcagatggatccattgatctttgcatactccaagccacactaagtcattggttcttttctcgcagtgggtacatttcaccttatttgattctgatctgacaaatgctgctttttttcttttctttttttttctttttttttgtttaaagaatacctagactgtgctcaagttccaggtggggtttacagataactggggttccagcatctcccttcttacaaacacgaacaggagcctttgccgtccttgggtctcagggaggcagaccggcagcaggcacacattcctggcccaggcgtagccatgctgtctggtgctgccttttgagaccttttgtgtgtgtgtgtgtgtgtgtgtgtgtgtgtgtgtgtgggcttgaatgattccttctttcaaaaattcaaccctctccaaattttgatgaaaaccttttcatctctgagtaagcacattatttcccatcttgatgaggtgtgtcccctctgtgtccctgagagtatgtcatcccagccttttaaattttattgtatttttttattttttattttttcatactagtcaagtgcagtagtgagaagcggggaaagagtagaacaaggggccgggggcggtggctcacatctgtaatcccagcactgtgggaggctgaggtgggtggatcatgaggtcaggagattgataccatcctggccaacatgatgaaaccctgtgtctactaaaaatacaaaaattagctgggtgtggtggcacacgcctgtagtcccagctactcgggaggctgaggcaggagaattgtttgaacccgggaggcagaggttgcagttgagccgatatcatgccaccgcactccagcctggcaacagagcaagactctgtctaaaaaaaaaaaaaagagtagaacaaggagtttgatctgttacagactgaactatcaatggagataactcactaccttcggaccagcctcatcccagtcttttaagcctggtccagaattcctaatcctgcttgtcaggcccttcaaagtgaaatgctgtaccatctgtatagctggattctcacctcctacctctcctctcccttccaaaggttccgatgtcataggaatctacgctagagggcttcctgtgtgccgggcactgtggtaagcacttcacatgcattctctctaatccttaccacttcggggatgtaaggattataatcttctttttacagatgaggaagctgaagcttgccactgcttagtagttaagagtatgggcttacagccaaacagaccctggattgattctcaactagctggggaccttgggcatgctacttaatttttttaacctttttcacatttagaagataaagataatatatagagagataatatagaagattatataggtattatatatatatatatcttctatattatgaagataatacagagttgtgataaaaattaaatgaaatgaccagacatagtggctcactgttgttttgttttgttttgtttttttgagacagagtctcgctctgtcgcccaggctggagtgcagtggtgcgatctcggctcactgcaagctctgcttcccgggttcacgccagtctcctgcctcagcctcccgagtagctgggactacaggcgcccgccaccacgcccggctaattttgttgtatttttagtagagacggggtttcaccgtgttagccaggatggtctcgatctcctgacctcgtgatccacccccctcagcctcccaaagtgctgggattacaggtgtgagccactgcgcccagcccatagcggttcactcatgtaatcccagcactttgagaggctgaggtgggaggtcacttgaggccaggaattcaaggccagcctgggcaacatagcaagaccacttctcttttatgaaaaaaaaaaattaagaaaaataaaaattaaatgaaataacatgtaatttcctaagtacattaagtacgtgcctactatgcgccggacattgtgctgtcagcaaataatagctcatcgcagatgctgttatcatcatcatcatcccaaagccacagattgagtctgtaggtgaggccctgcctggctccaaagattgtgtttttttctcctgttgctcccaagttcacctgtcccaaactttctagcccctaagtttgcttccttgcgcttttctggttgtgccatttgtccctgtctgggcagtgggctcaagctaaggcacagcagttttccagtccctttgagctactgacctcttttctgtcattgactgaacagtttccggtggctgaatcgtctgtgtaagagcttggacaattttttctgattgttaccatcatcgtgtttactgtgaaagggcttcctgtatagttgtttgtgttagcagcattgtctaaatgaaacaagagtggcaacagaaagggttggtgagcagtcctagtcttttggggtcacagatcactttgtgagtctgaagaaatttatagactctctcaaaaaaataaacgacaagacaaatacaagcccagcatttttcatgagacgttttccctgaagttgatctggaaggctatgtgctcttttgtcattgtgctactccacattcacagccatgaagggtgtcatgtttctgcagggtgtttgtatttaagggttgttgggcaatttggcaacactatacctgtttcattgatactatgtgctatttgcatttatttcccatatctgagatacgtattcacacatgagaactggcctggccattttgatgagatgtacctgctgatttgcacataaacacaagccatggcctgcatctagaggatcgactggagaggcttttttttggcccaaaacatcagactagtaggaattttattatgagttatagactaaaaggggggataaacttagcttcagcagggtttaatattctcaattcaggtaagtgtaaatctctacttttcattttaaacatttttgaaatttcagtctttaaaaaaatgcttgttttttttccttccaagttttaaggtatgggtttgggagaaggcagattccaaacactttaactcttcgacctcagacttgcttatgagcctctctttggaacatttccagtgaaccgtggagcaagcctgccacatccagcagccgtaggcatgatgatcactggtgccgatggcccctccactccctgcctggcttttgaggccccgcagaaagaaaggaacagaatcctttcataaggaaggccccagaatcctttctcctgctgtagctatgctgccagtgtcctctgtagatggaaatggaacttggattttgggtgccagaactgaattcatcacagataagattagttgatataaagctgtttctgatgagcagtttttcctccagagttttcatttttgctttttctaaattatacaaaataatagacactcattacaaagggaggatcataatgctccatacctggttttgaattccacttctatcacttattagatgcagccctgggcaaaacacacgccctctctgagccttgatttttctcattgaatgggagatctaattattttacctcataatactgctgtagggattgaaggagattggtataaataatggttttctgagagtctggtgtgtatttgctttttttcagttaatatgaattgagtacctactaagagctggtcactgttctagttgatatggaaccagtcaagagcaagacagagagggtctccgctctcatggtgctcacattctaatcagaggaggcacaagaacacaagatcacttcagttattaagaaattagaacccaggggtagcatgagagtcacaggaaggacccctttacgtcggatggccagcagaaccctccctgaagagctcaatgctttgtgacccccccggtcccaagttttccaggactcctacttttaaaaacactgcccctccaagtatataggtctcaattttgagtttggaaaatctgaccacatattagttctcttgttcattaatgggcttcccatttagagagtgagttcctggggcaggagccatgtcacaggaccttttgaaggtctcagggccaatatggacgacacttctcttgaacactcacccagttgggctgacatgaaaacctcatggtgggaggtggggggtgattagtttccagccagagcccattttgctccattgctgctttgaacattctggtttctaaggagctggaagtagtttctctcagcgagaatgtggcacactgtcatctcctgattctctgcatgcagttcttcaatggcttgttgaggctgcgtggaagcccagaggtcggggcagttccaactcacacactggcatttgaacggcagagcagtaagccctacacctgacataactgcattgccttcttggggtacggtacggatttttaaatgaccatttcagcctgctgggctgggcaacggtgatccaaactgatgagtcaggaagccactgaacagaaaggcaggctgcatctgactcacctgtcatgtcgatagttgacctccttttgtttgaccttgatttgctcagtgcaattaaagatgctgttgtgagtgcacttctgctacctgatttaaataaagtctaacatgtgacagctcagggtcttaaatgcacacacgacttaggcagacggacagatgggtgagtggttagcctttcacttacctctgaattgtaattctatcacaaggaaagggcttaatttcaggaacacggagtaattatttgagactagatacaatgccaaagcagcaggccttgattccttgctacagggcagcttaatcaggaaatggcctagatggccgcctttcaagtaggtccttgcagtagcttggcaacaggcacagggtcataattggaagaatttggctgtgagtgtctgtgggtgtttacagtgcactatagggcagggcttctcttatttatagaatattttgagcaacaagcagcagaaggctgaaaagccactaaaatctcgatttatttttaacaaattccatttttctcctcatcccagaaggagaactgagttattaaaaaacagttaaaaaatacatcattgcagagcatgccatatctaattatggggttgccagcatcggcctgcagccacatttcaagggcttcgtaaatcaaccatccattcaatctgtgaacttatatgactcctgttctccatttagatgtagagcgaaattattggcaagtgggtgctgatcagaaaaagttcttccctgtctaaattaggagatgggagggataaatatagaatagtatacttatgttctcaaaaggagataaaatcattcttcattgtccattatacttagctgcacaaacatccatcccattgcactaaatagccactttagagttttcacacattgcaatggcagttctgtgccactcaaaggcgcagtattgtgatatctcgctgagcctaaacctgagtgattattgctcacgtagtcatgaagagacataaacccagtgcttttttgcctgtgttgtcgtagtgtactagagctacaaggtgggccttcagagagacactagttttaagtatatctcattgtaggtggggaagcagaggcctaggcaagggagtgacttgcctagggtcccattaagagtcatggcagaggtgggctggggcggcagtctctgtgcttctcttgacagtgccctgctgtgctcactggagctactgtattaaacagatacccttcaggggttcacagtcttagaagacacaggcacgaagatggccaaacaatcagcccatgcataagcagaccaagatatgtgtatataacagattagttgagtggtagagaaaatgagagtggggaattttggaatctatttggatagcaaagcaaaggtaacatcagttgctctctgacccacttgggaaaagcttatagagatgctatgaagttttctaatggaaaaaggtgcagtacatttgccatgtgttagtgggaaggtaagtatgatgcagtggtgggtggtaggaggcagtgaagataagtattgcaactttggaggagccctgggaatggattgttgaggtgatttcataggaatacgaaagggagcataggaccagggcacaggccagagacaggcaatcccaagttccctggagtaccctgcccttttctgggaaagcaagtgggtggcatgagtgctatgttcccaatgctctggccccacccctggtagaagaataataactgatcatggtgggttttttctgagcctctgtatctttgagtagcattctggtagccaatatcagtggactggtgccagcctgtgtggtgaacctctatctctttcttgccctgggctgcatgtcaggcacagtgcctaagccggagtgggctttggggagttacttctctttctgaggctggaaggggcagagggacgtagggaaaactttgctagggagggcaaactgtgaaagcctctggagaagtcacctgttgggataccaaaggccagcggttttagaggatgcgaagaggccgggcggggttggtctgggcctaaactaaggctgtagcggctagcatggagaggaacaagcgacggggagtgattacggatgaggaagacgtactaggatttggctacagacagacaaccaaccagagagtaaaagacagtgacatgctaggatgtgaaccacctactacagagaaggtcagaggtggggagggaggaatcagggctgtgggcagatccagcagctgggatccaaagctgaagcccttgggttattgaatccattctttctgagaagagatggttgatcttcctgcccagggagttcctagccagactggacagtggttctcaaacatggtgccaggtgttgtcagatagcaaacaattagtttgtacacagaatgtccccaaggtcacctacacatatttgtttttcctaatctttgatacctacagccacttacctgctttcgagttctcagagttgagaacatataaatttgcagtaacaagtgcacaggaaatacttggaaaatggctgatgagctttagtttggaaatttcatttttttcttggatctggattataatttcagtacaagctagcaatttttcttgttggtaaaatagtttctagttttaaaattatttctgtagttaataaagttaacactatttcatgatggaggctgccccagctctgaaccaattttcaaaaggcagattctcctctttctctctcttatttcttgctcttgaacatttcactgtgttctagcaacttttcctgtgtgtgactcggccaggagactgacttgagtaagatccaggtcaaggggttgtgtgggtgggtcggtggtaaggaggtgctgaagaacactaaaacctttgcctgagaggagtctgggaagtagcctgcgaactggaatgaccccaggcttcctgtcacggtcatagcccatggagttggcagacttgatcactctatattgtgtgcccccaggtaatggcattagtcatcgatactgtcttttttttttttttttctttgagagagagagtctcagtctgtcgcccaggctggagtgcagtggcgtgatctcagctcattgcagcctctgcctgctgggttcaagtgattctcctgcctcagtctcccaagtagctgggattacaggtacatgccaccacacccagctaatttttggatttttagtagagacggggttttgccatgttggccaggctggtctcgaactcctgacctcgggtgatctgctcacctcggcctcccaaagtgctgggattacaggcgtgatccactgcgcccggccaatactgtctttaaatcgtccagagtaagaaaatgttgatagcttgttgtcacagccctgtcattttacacattccctgaattattgtctggcaccagcaggtgttccagaaacacttttggttctttgagccattactggtcattcctgtcaccactgccaccaccagatgtggttctgagagcattaagtaaaagttttgaaggttgtgtatgttaagactggtgcaaagtccatcctccttccttcgggctgatcagccacaccctggctatcagcacttatttactcattttcaaagtgacagaatggtccagtgggcaggggcataaggggtcacttcctctaaccacccgccagtgcaggaggatcccatctgcgcagtggctgcccatgacaggcagttccctagccccagtcggacatctccgcaccaggcatcctgctcctgctttatggacatctttggctcttaaaaatcctcctttattctgaccgcagatctgccttttggcagtgtttccttagtgacctagttctgctttttgtggcaacacagaacaaaggtcggtaggcatggcacaattccagcttagaagtttgaaggtagtgctcatggacccacatcctttccctctccacccactctatctccctccacaaggtttatgttctccagtgccttcagccattctttctatggcatggcagtcagtattaatcccagtaaaggtaacatgtatccagagagtgcttgccatgggccaggcactgttctaagctccgtacgtgaattgtcttatttatgactcaaaatcaccatatgaggtgagccctgtcatcatcctcattttaccaatgaggcaactaaggaacgagggctcacatcttgtcccgagccatgcagtcaagcagcagagcagagatttggggctaggcagtgtgactccagagcccgtgctcttagttgtggtgcaagactatcttacagcctttcctgcatagtgccaaaaataagcccatggtgcactagacttgggctggccctgctttaacttattttgcaagaaatcattagacaggagccttagttgaaccattttctgtgaaaccttcagagtttgttttgacagaacagactgcagggcagaggcatctgcactgtccccaacaaatgggttcatcctgtagctctgccaggccccacagggttcataaaatggtagctttagatcaaggtgacaaatacagggctcttgatgttttttttttttttcctgaacatggtgcctgagcaataggtttcttgtttaaagtgcttagtcatggttttatggccagaaagtagaaggagagaggtacctaagaattgcaaaactgggtcatctcttcaagtgcctaatccaatattcagtctcagagaacaactccagcagttacgggggtggaaggatgtgatgaccacctaccatccaaaactgggatgtaggtgccaaatacacattctcctgaaatgatccctggtgcctctagccaggctcttccaggagtctagagaaagatggcccatgacttcatccagagtctttgcttcctgtgctctgggatgcctgggcttttctggccacagccatacactgacagggccagaagggctgagatgctgggattgaaccatctttctctttgtgagttgctttccagatagcacgcattccggtcactattttccagagatttaagcagcaaagtgagggaccctcgggcatcgactcagagacctggaggggagcagcttgaagcaatgtaaaaagcactggataaaatctggttctaccaaaaatagggctatgagagttacctcacctccctgaaaggtaatatctttatctgaaaaatggggatgataatactactaacctggaagattgacaggaggattagatgagattctgcatggacataacagtccttggcatgatgtctagcagtgaagaaacataaatatgagaataataacttccttcttcctccgctgtctattccttctcttattctagtcctgtctgctgttgggttttgtctgttgttttgggtaaatagctaacctctctgcctctttttgtctgtagaaatgctactggttctgaatgggtacttcgcgccccctataggacatcgtgggaatgtgtgtgggtgatctggatgtcacagtgacccagacgaggcttttactgggggaagaggggaaggcaggggtgctagatataatgcttggggaacaaaagattgcccaacatctgcatagctgcctaatgctcagtgcattcttgtgggcaaaaccctgcttaaaattatctgggcctagagtctgactccaattaacacataaacacaaataatttttgcatgtttttaatatatactgaattttctgcgaacacagctaccaagtatataagatttacctatttgttatgaataggtgcaagcatttcatatatctttcatgatgttttctggtgtagcggtgccccaatacttacatattgatttacatgttgtcttatttttaactatatttcctttcttctttgtattacagttagggcattatattgattatttttggaattataagtgttgtaaggttatattacttacagatttcaagagagctaaagacatatttaaaatatttttattgcatttttgacaatatgaaagagcaagagagagagagtgtgtgtgcgtgcatgcatgcacatgcttacaaattagctagaaaaatcctaagacagactttaaatgaaaagaaatggtttcatagctcctagaaatgtccttttacataaggatatgtagtagaagtccaaatttttaactgcattcattgtcagagaaatgaggtgttttgatgtttcccctgtcccttttagaaagtatatgatcctaaaagagcctgaaacagtttccattgtcatattttttcatttttgcaatctctatttttttcactcctcccacctgtgcatatatatatttaaaagcgtccccatatagacttttaaagaaagaaaagccagccaggctccccactctttactaagtttgttttgattgttttgtggcctctgcctgcacctcggcctgagtcagactgactctgggagctgtgggcaggtccaagggaaagtcaaggaggtaatgaggcttctcgtgggggcaacttgtaggccaagttgggtgggttgaagtcagtctaccagaagcttcctgcctcaagcctgggcctctacctgtcctgaaacctgagggctctccagttggaccacgagggtctgacatccaggaggatccccaggagagagcaaccgtcactagggaatatgctgcccagcactgactgtactgagcagcagtgttgtgtgcctgttgggttgatgccatggatagccaggcgttcagaactgaacacgacacctaaaaggcaaacacgaactgtgaatgtgccagtgtcagatgctgccttggtggtcatgtgtgggctggcagtaagcttttggtcccttaacactcgctgttggaaatttcccaaggctttcatctagggtagctggtgtgtgatttccctgtcctttgttactcctatctggaaactagttgaaatcttttctatgatattgatatagttacagaaaatctgaatacttactactaagttttatagttctgcttagttcaaagtaacacaacctcataagagaaagtttgaaacaggtagagaaattgaaagatgaaaatcactacccattatctcagcccacaaagatagctactatcagcattttggtttgtttcctttcagtcctttctgtgtttatgaaattttattatataaataattcatgtccaatatagaaaaagatggaaaattgagaaattataacgttaaaacaaaactgacccatctcaccagttggagatgtcttaatattctggtgaatttttttttgtcttttttctatagacacataagaagactgggaaatattgtgtatatacgtttgtaccctttttcaccaatgtatatcaatgtatatcagttcactaatgaatactaattaaatgaaaatttattaaatgtatatctatttatatctattgatatattaacagatgccagtgcatatctattaaaagagtactatgtaagagatgatgttcttaaacataaaatttaatttaggcatgaaattactttgtcaaaagatatatcagtttatattcagatatacagtgtactgacctgcccatttaccacatcttcactaatactggtattatctttaaatagaatctttgctaatatgagcagtgaaagtggcatattatctattaaattttgacggttatgagattgagcatgtttttgtatacttactggtctttgtgtttcatcttttggggtttcctattcatagtctctgcttagttttccactgaggtatttgcctttttattgatttataagagattttgttttgttttaactcagaaaaggtagtattgcttcagttgtcacagagctttggagtcagacagagctgggtttgaaccctggctttcctacttgtgagctgagggatttcaggcaatttatctgacccctctcacaattaattagttcttctttgagaactaaacgaaacaacactgactagcatgaaaaaaaagcctggtgtgtggtttctgccaatagtttttgtgttgttatttttgttgtgattcctgcactgagtattttctcagaaaaatgaccttgagctgtacgactcatgcctgttcagacccacagacacatgatactcactatatccaaagctcagaaaaatgaaactgaaatcactgaagtttgtgggttttttttttaaattcttcttgccagaaggagacaaatgaaggaaaaaaaacaagccgatttcattttcattaagaggaatttgtagagttatttctggggtcaggcaggatacattcagacgaacattttagatctagggctgggaagatcccgagactcgttatagattacatcatcttcctccaagtgcacttgccaggcaaatggacaagtgcattttagaaaggttttcagttgttcacgtttaaacagaaaggatcacctggctaacttttagttaacccattgaacagatgtgccattcccccagcccattggttattcatgtccttgttactggtttttgatatccttgccccgtaggtgggaggagggatgggtatgagcctgccctgccctctttctcctacttgggacagagctgttgcttttatttgctgagtcactgaagcaatagagcatgtgcagagtcccagcctggaggtgggcatatctgggttccagtccctgctctagcccttctcagctgtgtgatcttggacaagttgccatacctctctgagcctcagtgtcatcttctatgtgatgtcgatgcctcccccaaaaggtcgttacgaggaccaaaggagacacgtcagggcaggaaccatcctaggcacgtgtttgatgctcagtaaacgggacgtggtcagtgttcagagttgtgggggtggcaggtgactgctctgtttcacctccactcacagcaacagggcctgtggtgtcacctagacatctcataggcatcccacactgaacatgtcccaaaccagcagctcctccctggatgggtggatggtgtacagggacctcttcctccagctgtcacatggggcatgtacctggcaagtggctttgcagccctagctgcccccttggctgggggcctttgtgcagttcatggactgggagtcacccccatgtctagaccgtcaggaaacccattggcttttcctttagagcataccaagaatcaacttctcagaacatagcaagagttgactttttgtcaccctgccgtggccactcagactgactcctcttacacctcacatcccattgatcagcacagcccctggaaatatgtctagaatccagctgcttctcatcacccccacacctaatacagagggctgagtcatagcatctcttccccggactgttgtagccgtctcctaactcagcttcctgccctgcttttacacacacacacacacacacacacacatggtatcttctcaccactgcagccagacttaaaacctaagagggatcatgtcactccccattttactcagagtcaaggccaagatccttactggggtctgcaggcccccacacctggccctctgactgcacccctaccttccttagctgtctcctctccctagcatgccccaggtcgctggtcccctagcactgggcagctccctgcggccctgttcactagctgtcctctgcctggaacacatctgtcacctctcacctcctcctgtccagcctccttggggcctttctaactgcctccctcctgtggtctgcctcctccccatctctgactttcctcccgagcacttactgccatccagcacccgacataacttacttgtttcgtttgcttgccttcctcaccaggaggtgtgccagatgaggacaaggatttttatatccctacccccatctgcagcactgccatggagaacagtgcctggcacttggatgccctcagtaaatatttgttgagagactaataagtgatcgtgggccagcatgccaacagtgtcttcgttattacaaaattgtcccgaattgaaatttggctactacaagcagtttgtggtggaaatttactcaaattaccaattctttcactgaagaaattacctggcatatgtgggttctcaataaactgtgttggattgcctcaaggctttggggcagtggtagccgtctgaggcctccttgccagtcaaccaaaccctgtgctgggtgggacataagagatgcccccagcatccttagctgatgctactatgtcaccccagaatccctggggcagcccacccctcagcagcagctgtcaccctgctgggttccgcttttcctcctgtgggcttcgtctccctaaggaaatcattgtccttgctttctacatcttatctccctgagcagctccaaaattctgttattcatatcccactgacctttctcattgtcctagtccaagcttctcacaggaggagttgtctctctgttttatattaaaacaaagcggttggactcttaaaactctattcacttttcagattctttggagtcctcaatgcttcctgctatgaaatgctgcgctctggaatgccttccagacccacccccaggatacctgtagccttccctgcagccactctcctcaactccctcctcgttcccaggggtcaatgtcctggatctctccagctttaagttccttcatgtcctcttgccacccctgctctcaccatctctgagttcttgtatccccaggatttcaacctgagtttgcatctcctgacatcacttttcccagccttctcccttttcaaccagcacaaggccatccacttccatggccatagtggacgccactgagcatgctaggtgttttcttctattcaactcatgtggtctgcacaacaacccagtgcggggaatccacccctttcacagatgaggcatctctagctcctggaagtcacctaacttgcctaggacatgcagctagtaagtggcagggctgggattggaacccaagaggccccgccctgaccaccatcctgccctgcctctcctcgggcacccagaatcccctcactctattgtcaaaacccaccttgtcctgcctgtctggtacctaggggagaaccctcagcctcttcttctgctgccacttgcttcctcttctgccaggaaggtcccacgcctggccagcctgctctggagacacgcccactgcctggccttgccaggaggctctgatgctctgcaggcttcctgtcccacggatcccttcctgcctgtcctggggtcccaccaccccactttgtagttggccttgctctttattgtggtgaaaggtgcaggccattccatccaagatcctataatattccttttctctgctgttgaatgttcttcccattccccccacattctcaaagaaggcatgtggctttcttcactgcgtctcggcctgccctgagtccagcccctgctgcctggcccagcctgtcttgttggcatcccctaagccctagccagaaacacaagcacctttcaggtgctccatcctaactccaccctccctcacactggcctctctccctttgccaccagataacagcagtgcattcttttgtttcctttagaacaagatgcagatgttttccagaattttcttcaacttcaggcagtaagttttttggtgaaaggagtattactccctgagtctgtagaaccaggctctctcctcttattctgtagcaattaaagacaaagacaggcaagaaaacaatgaaaagaaacaggagccaggctgatgcaccttcatttagctggtccttgagcatgactcattgatccttcttgcttccatcagggattgcaccctgtgccctctttgaatgcaggggcatgtcaaggccaagggtcaggaagagagctttggcctcgccagcctggtccccagagtggaagtggcagggcaggaggggtgtggcagacagagcacatatcgcccccagccttgcccccagatgttgagtgctgggtgccggagtgcagaggggaacaaggcctggaccctgcctggggagaggcagcacctgggagatctttgtggcttcagatcccatgtggtcctccaggtaaagcagagcatctctggggtctaggctgggggaaaactcttgcaaaaaattcctggttctgggacagaatgcatggggtctgcgtgaggggcagaggacagtgccaggccagtgagcacgcactgggcaaaggaagtggccagagaccactcataagaaaaagtgggacatgaacctcagagcctgggctgctttcagaggagccaagagcctgggaaataagcatcttctggtgaggaaatcagcagggggaggggagggtcatacaggaggggacttttaatcctgaatggccttgcagggcatggttcccctagtgtgccccatggaacccttggctgttagatgtgaggtgataaatggtgtgtggatgcatacacttgggactcagactctgctgcccttagactttcaccctccacagggctgcgtttaaaggtccaagaagccctgcagaagaaaaacctaactattgaaccagcattccctatacgtatttggcccctgattttttcccccgaataacatcattacaatcctatgggattagtgttccatggcagaactttgggaagtgttttttgaagaatttgtaaatccctgcaccctctggactgtgcccatttcttagattgcatggaggctgtgctgtacagtggaaggagtatgggctttagatgggactggcctgtgtttaaatctgctttcccattatacaaaatctctgatcttgatcaagttacttactctctcaaacttagtttccttatctgtaagacaggggatgaaacattagctagttgtcttatgaggctgttgtgatggttaatgggaagataataatgacacttacagagggcttgttatgctccagacaccattctgagcactttatatatctcacttacttttcaccacaactgtgaggcaggtaatgttatccttatcctacaggtcaggtcaggagaccaatgacacatacaggctaaatgttgtgcccaacatcacacggctggtaaatgtgggacctaagatttgaaccctaggcactcatacatgatggggtcaggatttgaaacttgaccgtcatctcccatcagagaacatgctctgaatcagtatgttctaaagggtctagagcagtaaaagcactaattggtatcagttcccttttcagatggttcgtggatatgttagggggattgatggttcctgggactccaagtcattctgcagtcattaaaatcagccctgttgaaagagtaatctcctcgatctgcttgcccactcagatgctcccattgtgaccattttgtttgctctgctgcctcatcctgggccacttcaatttgggtggctgctcagcgttcaggtggagtcgggccactttccacagccatctcatctgtggcctgtgcctccacttccaggaccaagagtccccccaggatgcccagtgagttggtagcttgttctctttctacacctcagtgatggacttgacaaagggttaagaagacatcccttttatcattcagcaaactgagtgcctttactgagctagatgcatgccctgggggaactagcactgtttggtgacttagttagacctctgaatccctctaccaaccctcagtagctgtctgggagactgggattctgtggactctcctctatcaacgatattgggggtcttttccacaaagaccagcctggttttgattgacaaagtgcctcagatttacaaatcttaccccttgcaggatcctctcaactgatcaagccccatagctccaaatgccgtctccttgattgatgtttaatttggggatccacaagcatctagagctaccagttgaatttgggtacccaagggccacaaatgggcccccctcacaccctgacccctgacaaccagcacctttgagactgaagtaccactgcatatagtgctgtcctctgctcagggcattctccctaccagccaggccacccggcaaacccctgcaacacctcataagacctcttcgctggtctcatctccttttattaacacctcctcagcacccctccacacacacccaagcccacaagcaaatcattttttcatctgttttgctcttgtaccttacctatgctccactaatacaaaaaaagcacgccttcctcaagacacttgactgccacctgctggagagttgtcatcatggctcaacaaatatctgccacttctaaacccccaggcacctctggagtagggcagtgcattgcttgtacagctgtaaacatggcctgcctgttgaattggtcatgctgtcatgtacttattaaaacactcgtctttctaactggactgaggacatcttgaacgtaaggactgccgatttctgtcttcgtccccattgtggcttctgctaggggctagagaaatgcttattgaatgatccttgtgcaaacacctgttaccttaggttcagggcatctgctgtcattcagtgaaggtcttctaaatctgtctgttgcaaagcaaggctcgccacaggctgtcagagtaaccatggaggtcggacaggacttgcagtggggacagggccccatcagcctctcacctctgctcagaggcaccaccctctgaacagatcagagcataaacaggtcagagcaattcagcattcattccctctacagacatcagggcaggcaccatgtagtggagagtggggccaggggccatctgccatggctgtttgggctggggaaggagagcagtacttctggagcatgtgctgtgctcagggccagctccctgtaggtaggttgtgggaatgcagaggtggcaactcaagcacccctgctggggattcagagttttgtggagaagtagatcagtaagcacatggataccagatagggttgtcaaggatgttgattcactgttgtccctattttcctaagctcgccacatcatggaaggctgctacccaagtgacattcttgggcttcaccaagtgttttaacagagctccacccagctgtcacactaggggtaacacagtgggccagaaggagaggcaggccttccctggggtcccattttaaaaagggggaagtcctctgttcttttacaacacttgtttaccccaagccattcagcatagtattacttaggtcccatacagagaaccttccaacagatagctctccttgctcaggcctgtcctgatgaactccctgatattcttccaggtcttaaaagagtgagagctgagcatttccctctctgccctggctgccaggaagctcagagataacttgtttgctcagttcctgtagctttcctgacccaggacttctttttcttataaattctccttgttccttttccaggaatgcttgctttttatgttttgtttgtttatgttgcttttgtctctgtattatactttggggggtggtttttggaggcaggattggcagcagccatggtagttagaagcaccagcagtaaagctggacacacctgggtttcatccccacttgctagctgtgtcattttaagtaagataagttgcctcttcagttctcggttcctcaccttgaaaattgggataatgatcataatgaatggataggttattgtgaaaattaaacttgtttattgtaaatgcattgtttcctgttcctgctcttggatcaggcttgatctgtggctgtagaatcctagtcttaatttccttcttcctgcctgtgtctgtcagcatatgatgagttgtacaatagtagtgactaggggaccaaccatcccggtttgtctgggacggaggggtttcctgggatgcaggactttcagtgctgaatgggaaggtcccaggcaaatggatgagtcggtcaccctggtaataaacaacctcaacatctcagtggcttactgtagcaaaggtttatttcttcgttgtgctactgtccatccagggccttggctaaaggaggagcctctatcccaggaaattgacagtcatgggcacagacagaggaacacatgttaaaggtcctttagaaagttgtggctgtcacttctgccctcattcactggttggggccagtcacatggccaggcctgccaccaggctgtgcagaaccttcccactgggtgggacagctcagcctggaacactgatccactctgccaggctcacctttctcttcttttgcattttagggtgctggagcagggaccagggaaaggagagagtcacttggtctgaactgggggtcttggatgtgatcatcttcctgtagatggtcggtatgggtttcttaaggggcagggttcagcttcaccctgctctgctcagaggagcagctgtgtctcctttggacgccttctagtggttgatgccctcacctttctcagctgccaaggcctctctcgacagggcaggctgggctgtgacttctcttccaccctccttgctccttcctgtggagcccctgagatcctttccccatgctcctgggtggaatggagggtgccctctcacattcttccaaggcatcttgcgcaagtccctccatgccctgctttctctggcggtccagcatgcctccatctcacctttgggactctctagcttggaagtgggcacacctgcagcccctgactccaggaccacaggctaggctctccccaaagcatcctcatcacacaccatgtggatggccaggtcagggcggccgtcagagcccaccctcggcaaggataccctctcaaaggcacctctgttggctcaaatcccttttggaagtagcccagaaagaggctttcttttttcttatcttttgttgttttatttattgttcttgcatctaagaacaccttcttggtcagaaaacagttttccagaaataatgttaagtaagtgtcacaactggtttagctccctaacctggtctaagcatataagagaggcttttgaggctgggcgtggtggctcatgcccataatcccaatactttgggaggccgagatggagggattgcttgagtccaggagtctgggcagcatagtgagaccttgtctcttctaaaaataaaaaattagctacgtatggtggcacatgcctgtagtcccagctacttgggaggctgaggtgggaagatcacttgaggccaggagttctaggttgcagtgagctatgatcacaccactgcaccctaacctgggcaacagagtgagaccctgtctcaaaaaaaataaaaaaggctttttgatttttgttttgcagaagtaccaaaatctatattagcatttattatttttatttctataaagtaaatttgagtattgggaaaattgatcaaaatgagaaatttcatatggagtttagtacttgaaatttggatccttcatctaaatttcagggaagtcagggctgggcatggtggctcacacctgtaatctcagcattttgagaggccgagatgggcggattgcttgagcccaggactttgagaccagcctgggcaacaatgcaaagcctcctctctacaaaaaatataaaaacaagccagacatggtagtggtgcatacctgtagtcccagctacatgacaaactgaggcaggaggatagtttgagcccaggagatggagattgcagtgagccgagatcatgccattgcactccagcctgggcgacagagcaagactgtctcaaaaaataattaaataagtaagtaaatttcagggaactcagagaacgagaaaggacatgaaattgttcatttatttagcatttgttgagtaccacctggagtgaggcacgagatcaggcacaggagacgcctataaataaggccctacctgcctgaagcttatgggaggtggaggagacacgcctacaagcagagaatggtcacagggcgtgaaggagcctgggcaggagctgctgcaggagagccagggagagaggatacagctctgaaggcttctccaggaggtgtgcccacgggcacaggaaaggaaagcaggagtttatcaggtgactgggtggttgaaaggagccacacctgcaagaaacgtgggcccagcagaggcagggtggttttgggaactcttgtcttttagtctgtcggggggctttgggtagcagatgggagggttgggctgaagactaagcagtgtttcctgctgggtgggtttgaactttgtttggaagacttagggggaacagtgaagctattgcagtggtctgagcaagggggtatcccgcctctgaccacagtggagaggggatggggctggagacgacagcagactgaacagaggcagtgacaaggatctggagggaagtggctgggcccatcccttagagggctgtgtgggggctgtggggtgtgggaggaagagaggaaggaagcccagggtaggttctgggttgctaatttgggggctgggaggatagcgtgtgacctaaacagagaatcagatttagatggaattacctatattaagcctggggatttcatatctatttgctgctgctttaccagttgaggctcaagaatgagaagcacaaaatttctggtcacattatttgcatgtgcccagactggggttaacagaatcggacagtgagcgttcctgaatcagactgcaatggggaatgaatgccttgggaggctggaagcagttgtattcgcagatattcatttggagatctctatagcgatcgaggcaaagataccccaaagactgcaagaattagccagtggaatttgaaatgccaaaattttttttcagaaaggtcaggaaagccccgtttaaaatctaaattttgccatctcaaggcagtgcagggatggattaggaggatgtggggtgacccttttcttcctttcagagccagtttctgccagacacaggaatcctccacatgagtcatagggtggagaggagacccctcagtcctttcagtaaggtgggagggcagtaccgcccggtggctaccatgaaccctgtttcagaatttctttcttaacttcgtgtgtgcccaggtgcacttgagattcactgatgttttctttagaccgaggagctcgcttcagcagttagtttcaggtgttggctctgctggcattatgcttcggcttaatgttttctgaagacttgttttctgttgtttttcattgttcttgttgtctggcttcaggccactaccttcaacctagcaagagctgagtggtgccttcagcagtgaggtagcttctgaaggccaccactctcttgctgtgtgactttggctagtttctccacctctctgtgcctcagtctcttctgtaaaacggagaacacaggagtatctccctcatagagttactttcaggtttcaatgagttaatctacataaaacaataaggatagagcctgacacaaaatcacactcaacaagttttcacaattatgattacttgacccagtaggagaaataaaaaacacaactaacttccttctaaggacatgcccaagaatccagttttagtaactttgaaggcattgtttttcaccgaaaatatctcctgccagattttttcatgtgtttgcagcttagctttaacaaggagctgaaggacggccaggcagcaaggggtggtgagtgccggtagagtgtgacgagctcgcccagccttcctccctgtaattaggagtcatgaaccatctacaccatctcccttagctaataagagatttttacatttacttacctcaaagtgacctgtctgggttttcttttcttgtggcccccactgtaggtttttggaagaagctgaccgcctgaaaagaaattataaaacatgaaaatcgctttgaggtgaccaagtccagaggcccctaactcctcccaagctggatctggggtgtaagaactgtgacttcaggtaacaaagtagtatcccctccctgccccctgtgaactcatgattcttggtagcttgcatggcagttcttcctttaggaagtgtagtttcttccaggaactctgaaacttggggtattctacctcatgcggttgtttggctggtcaaaaaagggagtgggggattctggaggtacttcatgtctgctgcatggcccaagggggccagggctccataaatcaccaagaccctgagggcagggctctgtactcattcctggccctgcttctgtaaatgttaatgacaaaataacaatgtcacccacccaacagggtctttaatatgattaaataatcatgaaatacttcttgaaggataaatcagagagaatagctaggaaatttccaaaaataaagagcagtaggagagtatttgttctgctagctattaaaatgtattctaaagcacagttgtaaaaacagtatagtactgtgatggaaataactagatcagaggaacagagtagagagtccagaaataggtgataaatcaataaaggtgtatttcaagttagtggcaatgggatgcatggactagcaaatggtgttagaaaaaatctcctatccattagagggaaataagaaattcctaagcttaggtagtatatcaaaataatttccaaatagcattaaattaaaaaaatcattaaaatcttagaaaaaagaatatttatattattttgggtaagaaaagacttaaaacatgtcacttttggtcccacatacaaatatcgtaaacaaagttaaaaagcaaaagggtgggaaaagtgtttacaacatcaatgatgaacaaagaattaatattcttagtatacaaatttattcgttcattcaatatttattgagcacttagtatgtactagaaagtattctgggcactaagggcacaagcagtaaataatgttcctgttctcctggtacttagaccctgatggagaggactgccagtgactatggtagattattgtaggtcacattttgataagggctaaggacaaaacattacgtaggtggctgggctagggaggcttggcagggtttgcattatgtggatattcaagggggcttcactgatggaatgacatgtgaagaaaaagggaaagtcattgaatgtcgagctgatagcacatttgctgtttttggaatgtcgagctcataggatttgctgatggattgaatgcgggttgtgaaagaaaggagtcagggtggcttctaggtttggggcctggcaaccagaaggattgacataggaatgactgagaggcttggcttggagatagagttttggttatggatgtttcagtttaacatctctcttgtatattcaagtgaggacgtcagggaggtggtcggccataaatatctgtaattcagggtgacatctaggctggagatataaatttgggaattgttgcagtgttgatagtatttgaaagaatgacactagctagagcccctggagagtgtgtgtagatacagaagagggcccaggacatccatgggaccctcccttagagttgagggagatggagccagctaaagagagcaaaaaggagtgaccactgaaatggaaggagtcccgtgagaagggggatctcccaagccaagagacagtgagaagggcgaggtcagctctcctctggatgtgctgatgggcaaggagagaactggccattggatctagcagtgaggaggtcactggtcaacccaacaagggctgttttatgggaatgatggggagagaatctgtttggagttggattattgagaataagaggaaaaaaactggagacagagaaatgggacaatagctggaggaggatggtattcaagtaagtttatttttcccaagatgggagttacataactcttgttttcacccaagtggaaatgattcagtagcgtggggagagtggatggtgcaggattgggctggggtgagggttctgaaatggtggtctcgaggaggtgggagaggtagaatccaggcatgagctggggaagggatcctaagtaggagcatctaaggaggtggtaggtgtgcacctgcctcttttctcagttcactaagaagcagagtcctcagcggagaatggagactaaggagacgatggaagtttgaggagagagggcaaagtatgaagtccttcatagcagaatgagaaaataaatggccaggggaatgaaggattgctgggcggcatgcaggcctctaaggggtatgtttctccagccatgtcctgttacacaggtgaacacggggtaggaggccattgtggtagaaaaacaggacatgagcagacacaacgtaagacagagaaacgcctgtaaagagaaaaagcaacatcagtaatagctgaagaatacaagtaaaaacaatgaggttttctttttttctctttagactggcaagagctcttgttggggatagaaattattgtcgcttttctggagcacagtgttacagtatgttccagaatacaacgtgtgtcccgttttgacctgtcagtcccacctttagaaatttattctaagaaataattgctcaaatgcaaggaaatatatgcacaaagatgttcaccccagcagtgcttatcaaagtgaaaaaatggcagtcatctaaacaggaggcagctggttcacttatctgtcggcctaacagtgatagtgggaaacagtagctcacactcaccctcctgttttgcagatgagggaagttgggtccagagaggggtagtgacagctccagtcctactccacggagctcagaccccctggctgtaggcaggcaccctgcccaacctcttcaactgggcttggagtcagagtcccttgcaaggcacttgtcaagcccttttcaagggccggtttgcttaatgcttttaaaatacgagttctcaaaatgttttgcaaatttgtttacaatgtcttcatttcatctcatggctttccttgcaaaggatgctgacagtggggggaaaacaggccgactgcctggccgtgatagaggggaccatattttcctgattcccaagtaagacttacagtggaagaaaggatattttctgctttcttacagtgtttacaaaagtcataacaggatgtgaggactatctggctgcaacatctgtcaccccattggtcgccagagttgattgggctgatctggctggttaggcaggtgtcccattcctccctcaccactccatgtgcgtccctcccaaagctgtatgctcagaaaggatgaccatccccgatagaggaggactggtctttggtcaagggtatatgagtagctgcaatcttctgctagggacccccaaacaagctctcaaaagtcataacaggagtacaaagataataaggaacttgcatttatttgtttccttgatcatatgtttattgattagaagaaaataaaattagcagccagccgtggtggctcacacttgaaatctcagcactttgggaggctgagacgggcagatctcttgaggtccagagttcaagaccagcctggccaacatggtgaaaccccatctctactaaaaatacaaatattagccaggtgtggtggtgtatgcctttagtcccagcttcccagcgttttggatggctgaggcacgagagtcacttgaacctgggaggtggaggtggtagtgagctgagattgcaccactgcactccagcctgggtgacagagtgagactttgtctcaaaacaaataaaaaataaaaataaaataaaattagctttgtgtgtggagaaaagggaggaaaaataattagcattgtcagagaacatctgggttatttggtcccctccgtgggaactgccctgggttttcacttctagagtttctggttctggtttaatttttccacgccacagcacagggaccgagaagctgctcagcttctctaggcttttatgtcttcaccagaaaaatgagcgggtgggcttaaatttcctacaaaaactcttaaaataaatatgatgctctttccattctatcacatgcctgttctgggtccgggggtgtgagagatgcattagtgctgctgtaaaccagccccgggtctccccccccggccccccaccaccaaacccccaagcaccaacctgggttctccaccacttttgagagctcatcgaaataaacacacctttgtgcctcttgtaacaattccagatcatccaatggcagaccagagaatggacatttcttcaaccatcagtgatttcatgtccccgggccccaccgacctgctttccagctctcttggtaccagtggtgtggattgcaaccgcaaacggaaaggcagctccactgactaccagtaaggcctttggggcatgtcttcctcttgttaaacttggtgtcagttctcgggcatggaacatctagcagccagctactgtttcatcctggaaaaggggatgggaataaaaaacccaactctaggtggcgacacagttggtttttggctttaccttcccctagtttgtaagcaagaaggagccttcagcagtgctgaggcatttaacttccacttcctgtccccaaaatgttctacacccagagaaaaagaacagccttaaggccaagttctgtcttttacccctttcttcgtcttctttctttgctcctttgagcaagagggttaagtctatgggtgtcatctcagggggttcaaagagagctttgcctgagggcctctctgaggaagacagcaagtgtcaggtgcttaatgaatgtttatggaaggaatgagtggaggtcctctctgaaaacaatttaggaacattgatgttgtccttaaacattatttaaattagtatgaacttgttatattaaatagtatttttgtttatttttagacttgttgacttttcgtttgagtaagtaaattttcacacttacagtcatcccttctatatatgtacaaacacctagggaataaggcagtgtagaatattcaaaggcacattttgttttgccgaagcacctgcgtggaatcttacccaaatgtccatttaagaggttttcttttgtttaatgagggaaaatctccgaggaggtataccccctacagcagatgtcctttctgctgaagttcacaggtcgaatttggggagcacaatggctggaggtcagatgcccactaggagatgctatgattaatatgtaagttatcccagatgattaagacagccaacacccaggggctggagagtgggtatgagggctgtgagggcgttcttccatagcagtaactccccagcagaaagactgcgagatgttggccacaaaccctttgtcttgagcaagcgctaagggagccactgatgtgttctaaggcctctgtcatctggacctgtgggttccagcctggtcaccacccaagatttcccttgtggactctggtttgctaatcttctgtaattcatggagactcaattaattaagcaaccttaatccctttcactatcattttaatgtaactgaagtcatctgtgactgtcaggcagagctttttctcacctgagattatcacctggcctcaaggaacagatagaattctagacaaaagggagaggggagtttttgtccttccgtgcggcctgcgtgatctctgaactttagaactagctggggaaactctctgcctgtgaggaaccccagggcgtctaattgggaacactgttctagaatgcccatgatatgatccagtgctcctagaaacagctatttttgcccttgggattacattgtttgaagggccatgctctctcctttcctgtgggataaaggaaaaaggagagaggcccagctggcagtccatgccctcctgataaatgtatggattggagaaggcggtgagggggatttggaactccttcctctggggatttcagtctgttttcttctactgaaccacaggatgcaacgaaacttggttttctgaagtctgtgaaagggagggagatccttgctgtgaccccaggacttctgtggccctcagccccactacgcccctccatcccaattcctaaaatctaggggttcccacctacctgagaagcagaatatttggcagtagtgcctttgaaaagctgcctggggctctgctcagtactttgttggtactttaattccaccctcctcacttcgtcccttccctgccaaatagatatgtatgcacatttatctttgatgctcaatatgttttgcaaacagaataagcttcatttatccagaatgatggggggggagaatgagaggttatatagatatttcaatcctatggttaactaagcatttttataaacactacatattcccaattttcaaacaatcagaatatggtaaaatatatgttaacacacaaactcttttgagatgataacttttgtttgataacctgagaagctggtccaggttttatagtaagttcaagttaattttcatttgttttacccttattatacatcattaattgatactgtggctgttcgaactttatgattgtttggtttctggataaatgagagccttctgtcttatgataagaagctcttctgtatgtctttattaacatgcagtcacattctcttttgttttttcagagaaagcatggacacagacaaagatgaccctcatggaaggtaccatgaacctagtaatttgaacttcagcatccttatagccattttctttgcactgttacacattctgttacttggggcagcacccatgtcctcaactggagatgagcaaggaggccgtgagcctgtgggcgctcactgtgtccctccaacccccagtccccttgtgtgtctgcagagagatgacaggatcaggcagaagaaaacagcaatgtgtaactttgccattcatctccagagaattatgtttttatcttttgctttttcctccccccaggttagaatatacagaacaccaaggaaggataaaaaatgcaaggtaagcttggaccttattttgtctacaaagcatcctagttctggttgcttagagagcagctgaggaggctctgcatgtttggtcctgtctaagagttctgttgggcactgtcacctccttagggaataggcaggtagtgggccttggccgaggtggccttctgccctccatgctctccatactggctggcctttactctttgctgtctaagcacctttaacctgaagtggatttgaaggtagcagaaatcaatcaaggctcaagtttttccccagtcttcagcagagaacgtcttcctgactggagcgccctccgcaggagacatggctcagtgatttggttcctgggctgggacttgcctctgtcaggggcccctattgcactgcgagttgcaactgaatgcaccacatggggcatgctcggtgtctcgagtagattctctgcctgggtctgtcctgcctccagccacacttgctgacctcttcccattgcgtcctcagttcttctgccgttagtaccaggctgtgttctgaggctgcgtcatgacagactgatacagggggctgcagaaattggctgccctaaggcttcaagctcttccctcggaggccagccttagcaggagctcccatggctctgtatctgcggcagctgcagcaaactacatttccatcgttgctgcacctccttaggaggaccatcaccaatggcaggtgcacatcagtcagtgtcaccctgcctcagcgggaggagtgtgacattcctcagaggaggctcctggggacagatgtagcatctgctgcacctaggtggggacctagttttgatccaaggatgacggcgttggttactgggtgccctagtcagtgaggctgtgactggaaagaattggtgccctgcccaggtcacatggccacacagcgggctcctcacagacctcagggacagcccacggggctctggatgctctgtgctatgaagccaccacctcccttctctttcctttcacccccatttcaaaatccaatttgacaaaggctgagaggaaaagaaacgaggagaaatgaacaattcagtttactctgaagagacaatttttgtagcttttctcctgaattctaaagatgaggtaaacataaaaaaattaatactgacctggcagtgagaccattttcttggagactttagttgaaaagtctaattttaaacattctgcaaattctaaatttgccttgtcagatgaacattgaaaacagttacaactcatttatttttgtcatcttttcttgatgcttggttacattttataagaaatcgtttttcatattgttgttcagggaagctcacagtcagattgaaaagcggcgtcgggataaaatgaacagttttatagatgaattggcttctttggtaccaacatgcaacgcaatgtccaggaaattagataaacttactgtgctaaggatggctgttcagcacatgaaaacattaagaggtgagaccctgggctctattgtcctttatgtccttgcccacaaatgttaccacccttgcctagaatgttcctatccctaaggcagatgtttattacttgcaattatgtagccttcagtagtatgcctttactcttcagcaacagccgtgatgccaaatgaagtgattattgagcttatgtgggttttgacatgcaattttgcagtcacacattctcagagcatagaaactgtgctttgcacgtctctgtatatgcatgtaatcaggctatgtgcctatcagagatgatactgctctgatgtctcacatcttgcctatgtttgtgcctggatcccatccttacaattataacacgcagaaatgtaggtgcacacagtgacacagaaaagtcagttcaaagatgaaaattcatcatggttcctttgaaaagtgagtcatgggttgtgggttctcgcgacattttgttgtcaggaatgaacactgaagatattttcatcttcctggaattttcccgaaccagatccactctttgtgagggaggcagtattttccttcttttctgagtgtggggagggtgagaaaacataggcagaaaagtggaagtgacttatccaaaccacaagagaaatctgaaatatatcaggcattttagtgaatgctgttcctggaattttccatagctagtcttggacttttggaggaaattggaaagtgggcgctcagtcagatctctgacctgcgtggtagaagaattgcgtctttttatatttgcacaaggccaccagaaataagaagtagctggttttgtctgactttagatcattacccaaaaatataaatgttgtatcctgtgctggaagaatggcatttaaaaattcatattagcaaagataacatgggttaaattattataaactaatttctattaaattggaaaaaagtggcaaatctcaagttacagtaaagagcagggatagggatcaataggatggttgcaacacgtcctgtctccttccctccccatggtactttgaattgttacagatccatttccttttattccttcactattctactcgctattctacagactccaaatcatttactgctggcatttttctctgttaagtgattgttctcctgaaaaatgccagattgacagccttttaaacctaagtcttgtcccctttcagtcctgggagtgcgagctgcattgactgaagcaatgcattcctccacattgccacgctcgtttaactcacccctgatgaagagtaactcacattaaatgccttccacaatatatttactcagggcctggaagactgaatggtttcccaagaacatttagagtggtgatttgaaggactaccagacaacccatttaatacagatcttaggaggagggaactctctgaggagcctctaccagtttacttccagagctgccttctttcttagaagcagattgttaaacttccttctattatctcttggttttccctgtaatgagaaaaacaggcttgttaggtctcctgtgggtaacagtgttctctcttccatggaattctctttggcttacaggattctgtccaaagccagatctaggctcatctcagttaaggcctaaacaataaaatttaaataccaggtcatagagactaggccacttacagaaggtttgaggcagcaagttagaatgagacattttctgaatatcaagtataccaattctttctctttttgcccctaaggtgccaccaatccatacacagaagcaaactacaaaccaacttttctatcagacgatgaattgaaacacctcattctcagggtatgttcaattatgggattgttttacaacgtttgtttttataaattttcaagtaagtaccagcatgtgggaatttgatgtttcaacactgagcttttttttttaggcctgcttcctctctcaggtccctccctttatcttattgtttggacaggcttcacatttcttccacaaaaccattctcctcctcttttaacctcgtctagacaaaaatggaaggtctatgccaccgcaatttaaaatcagaagagtcaggatttgttaaaaataagggggatttgagaatcacatttctgcatgaagattttaggaagggactgaaaccaacaacaattgagaatttctcttcacctgatttaaccactagcacaaaaaagtccacctaaatctttacaccaaaatctcatcaaaataacaaaactgtggctcacgcctataatcccagcactttgagaggccaagacgggcagatcacctgaggtcgagtttgagaccagcatggccaacatgttgaaaccctgtctctattaaatatataaaaattagctgggtgtggtggcagatgccttcttgggaggctgagacatgagaattgcttgaacctgggaggtggaggttgcagtaagctgagatcactccactgcactccagcttgggcaacagagtgagactctgtctcaaaaaacaaacaaacttacaaagactagtggtccaaaaaagaaaaataaatgcaagagatatatgctttcacctgcttgacttgagtgctctctctgtcttgctaaatctctgctgggagatggttgaggtggcactatgggaacctgttgtcttccatgaagaattaggtcggcacaaagctctaagttgtgttactaggtaaagtgagattaacttgggaattgaagggaaagaaactggattcagaaacgtgttcttgtagattgtaaacagatgaatagaaaaacgtaactaaaaggaaggatacccgcttccacctcccacaaagtcagggctgaccttacctgcacagccaacagaatcttcctacccatctttgagcagaagtttgcaaagctctagagtagagggtagtccatctggaattttgcatcatcactatccattttcagctctctataagcctggcctgtctgctcactccagcattctctatttatctcctcatgacgtgctatctcaaattggaaagcattcacctgcaaggaccagaagacctgatgaataaatagagtttaatttctcaagtataactggtctggagtaggttatgttgggttgctgcagtggttcaatgaggtcaataggaaccaggttctttgtctttgcactcagccacaccaagctagcatgctagcttgtttccttaatgtagccaggtacctttgccaggtctaagtagccagacccactgtaaaaacaggggtaaatgaagctctagtctggctgtcctttttatcaagaaaggatacaccttcctgaaaactcaacagtggacttcagcttattcaaaagtgtgtcacttggtcacgcctagctgcagggcagggtgcagaaacaagtgtttatagattttccagcctccctggtggagacaggcaagagagaaggggcctgggaatggtgttgggaattggcttccccaacagtgtttgccacacacactttccagagccacatgcatttgctcgattccttccagaagtgactcccacaacccaatatagtgcttcaactgtggtctgattggcctgaggttgaatgggactagtgccttccttgccaaaaaagccatctgattagtactgtatcatttggggcagctgcagtactgcctcctcccccttctctcctgaatatgaattattgttaggtcaggttttttacatcttgtataggtgcttttttgaacttaagataggacttctctttcatttctgtcaaaacctgtttgttgaatggccccacagtccagcttgtcattagtgacccttggaatctttgtgtgacttgtagatccaatacatgcctctgtgcctttcatccttgtttattcataaattcaacaaacatttttgtttacttactagatgcatggcattgttctaggaacatccaaatcaatgataaacactttagggtgggaccaggctcccgatcaagtgagtgatagtcttttggctaccactctcaggacacagttattcaaacacccaactttgcccacctctccatccttttcgtaaagatgtccgtgttctcagagaggatttgctgaggttaaaatatgaccgatgcctgtagcatctcgagagctgccgtcggtgccagcttcatgggcatgtgacctctgcagtttcacaaggccccatgcttggtttaatgccctgtcaccatcttgaaaacgtaatttttgaacaaggatccctgcattttcattttgtactgggccccacaaattatgtaactggtcctgattcccatactggtaacagatctgcagctgtagatgtgataggcctgcctctatgcctttcattcttgcgtattcatgaattcaacaaacccttttgtgtacttactagaggcttggcattgttctaggaacatccaaatcaatgacattttgggctggggtacaggcttgattattttaagaaaaagaatctatgtctttatttcatatatatatatatatatatatatatatatatatatatatgtaaaataattatcaagcagagtcctgtggatggacaaatttaaaaataaataaaacaagctccttttgcagtggcacgtgcttaatcgttttcttgttgctgcttttcttaataattttctatcagatacccatacttaccagggtatggaacaaggattatcatgctatctcagctaaatacttcatgttgggcttgtctcttctactcccttgtttatgcagcactcaagagtgatctctcttgcccgatgaaggttttgtcacctctctagcacgtgtcagtggctgtgaaatactgtccagtcccttatcacttccagggtcccagttccagggacttgcttccacagaaagccaggtctactcagatgatgttcagacagtttggccgcaggagctggacttctgcttttcctcagcaatgcaaaatggacaaactgctttctttactaagtgctttcaaaatatctttaataaagtgtatgtcagggatcagtcaactgtatcagtttacaatgtctacgttagtctacttccccatgttttgaaaactaggcagaccgtaccaaggcctctgtgtcttttattaaccagcaccatcttcccaagagtgaccctgccactggctggcccctgtggctctgtggtgctggtagtgttctcacagcttctgctccttagctgtccttcgggcccggctccttcacagatggtctgctggccagggtgctatggagttggaatgtccagagcctcccctcgctgatgcattcactgctttggaacctgctggctttcctctggagtactgaaatagctttacctgtgttgtcggttcaggcctgaccctgcccagcattacctccagggtgtcacagttcccttctgtccaggtacctttcaagccacattgccacatcaatgaaaagcctcaaaaacacttccatgagatacaagattatctgcaaggcaaacgaggaagtttttaataccctatttgttgacagaatgaggcttccagcagatggtgcttggaaagttacttccccctcactgtcatcccttgcccctgggccagcttagggacctaacttaggaaaggatcctccccagcttccttctggctgagtagcctgccagggtcttaagcaacagtgattctgttcccctctcactcatttcttctgtcccagcacaagtacatgcaccattcttttaccttctggcacattaattcatttcctagttctttgaattaaaccacatcatgaaggcccttttgtggaaaaagagaacagtttctctgtatttttccaaagagcagattaaggaccagtgaataaggtgagaaactagtccactgtgtattagaacgagggagggctgagtcataagagcaagggcatgacagagtggggcacaccctccttgtcaccggaagaccccagcaggagttgagtggttgtatgtctggaaggcagtgggtgggattcacacagcccaagctctcaggcactatagcttgggtatttacctgcttcagtctctttaccaaatgttgtcctatcttaatggctggctttattggaacatttagattttttcctgtatttaaactgaagaaggggtaagaagaatctaagcggggagttttgcttttctgaatgcaaatagtccggccctggatggagggataacatttgagagtagtagttctcagccctatgtacattagaatcacattaacgtggaagtgggatgggtttaaaaataccccagtgatcagccccatgccagaccatcagcataaaaacaaaaacaaaaaacactgctccgaatgttgagaaccactgttttagagagctccctgtacgtggaggttttcaagttgaaggcagatgatggctgagatgttggagaggggattcttgaagagtccttccaaatctcagattctctgactctccatagagttgttattattagagcaatgaaatatgattctctggaccatgataccttcaaaagaacacgtgcaagctgaattctgctttgaaatataacttactttaattggactttcttcctataataattagatgatatgcagaaacacacacacacacacacacacacacacacacacacacaatcttacagttcttcagagacgtttgttttcagcatcctgcactcaggatatcactgaaactgttagtgttcctgtgctttggatgcttagaaagcacatcctctatttgttatcagggtgattacaaattatgtttcctacagtatgagaaattgattatccatttctcctgattaggcagcagatggatttttgtttgtcgtaggatgtgaccgagggaagatactctttgtctcagagtctgtcttcaagatcctcaactacagccaggtattgttcatgctcctgttgatggtgggcagcctcacagcagtcagaagtgtcactcaattttgtcagaataattatagtatacaagtcacatgtgaacttcttccagaaaattcttaacttcttaacagataaattaatttagacttagaacaatcttgtaatatgttccgtattccccccattgaaagatctgactctgatctgatcgatagcattatggctttcttctattgctgcaaaataaatatcccacaatatgtggcaaggacagagggtaagaggctatctgacaagggagaaaggtaggcaggttaacacaataccagagaatacgtcacttggaaatccactccatactgtgtttgcagtgctgtgtcacttcttagctctattgaacctcagtttactctaaaaattaatgataacttataggatcaaataagagtaacatttataaacgcttctagaacagaacttttcacctattatgtcccccagagtttttattcatttattcattcactcacacactggtatttgcatggaagcttggtaggcagaagacttgaagaatcaaaatgacatttatgtaaattagaattaatgtaaatttaatttttccaaagatttctgctctttttagtctcagagcaaagttatggaggaagttgctgttatctctgttaatagacaaggtgactgaagcatatgatatgcgtgacttgcttgagaacagagaggctgaacagcagagctggaatcagagcccacccctatcttctgccttctgaggtcttacaggggaattccaagattgttgccttagaagagcataaactgtttatataattgagggttttcccgtcatgttatcaaaaccaacctccagatgcctccttcctggtgtcaggcaaagtggttggacatatgtacaggttcacataggaaaagtttgaggtctcatgcacaaaaacacaaaggcaacatgcagactgtgcatgcttacttgttgcataattgattttctgcatgcaattgacttgtcatgtttaacatttcatctccccagaatgatctgattggtcagagtttgtttgactacctgcatcctaaagatattgccaaagtcaaggagcagctctcctcctctgacaccgcaccccgggagcggctcatagatgcaaaaagtgagtaccagagaggcctcgcatttcctcagcagcccactcacaggcagccaaccctgagtgagcagagggcgggtgtgtgtgatgggctcagcctttccagtcctacttctctgtcctctttctggggcaccagagctatctttggctaaatggaattatttatgttctttggtcttttacataaaaagaagaaaaaaatctcaatgtccaaatttattgaaaagaagagctatttagactggattctttctgatttttagacttttcttttttctttcagaatctagaaaatcccagttgtatgctcctgagtttaaagggctaagtttgatttgttctcccagaacaaatgggctctatttacctgaattgcacacaggcagcctcataaaagtaagaaaacgtcaactataaatatggtgtttcttcaaccaaagtgttcctccttaggttggctcccccacctggctttcttcttttgcagtagtggaaccaccatccacatcgctccctctgcccccagcttcctgctactgcacacacttctgtgcaaggccccagtagctgtcatctactttagtcctgtgggaggctgtacactcctacagttaagaatgagagaatgaggactctggctgggcgcagtggctcacatctgtaatcccagcacttcgggaggctgaggcaggtggatctcttgaggtcaggggtttgcaaccaacctggccaacatggcaaaaccccgtctctactaataatacaaaaattagacaggtgtggtggtgcgtgcctgtaatccaagctacttgggaggctgaggcaggagagtttcttgaatccaggaggtgggggttgcagtaagctgagattgtaccactgactgcactccagcctgggtaacagagcaagactctgtctcagaaaaaaaaaaaaaaaaaaaaagaatgagaacacaagggagattactgggctcattccggctccaccattcactagctgtgtgaccttgagcaagttacttaacctctctctgtctcagttttctcatttatggaagagtacctatttctttgggttgttgtgaggattgaaagtgttaatgtatataaagcaggcagaacagttcctagcacatagtaagaacagtatcagtgtggcctaatgtcttgctcccaagctgtccacgttaatccctggaaaaaaataccaccagataatctccttcaagtcatctctttcattacagcacaccgcttgttcctaaaagtaaaatgcagactttggtatctgttgttctttatagtctagccttggcttttttaagtgaccttaggagaaaaatatgaatggcatttgggccttgcctttgaggctcttagcatatagtcagagaaatgagacagacagcaccctgcatagtaataggtacagccatagaaatagtgccaggcatagagaacggatgattaattctcatgtgggcgcaaggacaggcatcactgagtagatgacaaccgaggtgggtttgaaaagatgaattaatgtttgccaggtaatgaagggaggaacaaagaggaaacaatctgtgcacaggtgcaggggtgtggagccacatggcttgcttggtgctattggacaaaacgtgcacggaggggaagggctgaaccatgaagaccatttgttctgtggggacacagtgaagagctctgagttgggtggggcaggctcggattggcattctaggggagatcgcagagctggcaatgtgggaggtagatgggatgggaggaagcccagaaggagccctgggcagtggccattcctcggcacacttgctcgtgtgatggccatgggtgtgttttccctcggcttctgtactgacacctagccagtgtttggtaaggaggtgtgctcctcagaatcacctgggagcttttcaacatagtcatgctccacccccagagattctaatttggtttttccagacagcacagtccaataaaaacataatgcaaaccacaaacatgagccacatatataatttcatattttctggtagccagactttaaaaaataaaaataaatgtaaaattaactccaaaatatttcagcatgtaataattataaacaactaataagttcgttcacattcttttatttttctatactgtctttgaaatcctgtgtgtatttaacacttacagcacatttcaattcagaaaagccacatttcaagtgctcagtacctgcatgcagctagtggctaatgcattggacagcacagatctagaatggggtccaggaatctgtaggttgatcatgcatccagggtattctggcctacaagccaggttgagaacttaaggcagtccggctcccaccttgccttcccaatatccatatcctacccatccttcagtgccagcccaagttccttctcctctgggaagcacaggttgtctttgccatttatttggcactaatcatacatcaccctgtcctattattaatcttttcttggtgcacctccatttgccctttgttagccataagcgtctattgggcaagaaccccatactatatttcttttcatccccagagtacctaatccatttatttagtagcacactctgtgatttataaacatttccagactgacaacacacctgtccatgctgcatctgttaaagcctaaacttgggagatatttatctcatgtcatcattataaaacagtgaggcaggcaagaaaaggctttgctcaaggtcacactccccctcctgacagacaacactgctctcagtttatcacattttgtgtattgatttgcagctggacttccagttaaaacagatataacccctgggccatctcgattatgttctggagcacgacgttctttcttctgtaggatgaagtgtaacaggccttcagtaaaggttgaagacaaggacttcccctctacctgctcaaagaaaaaaggtaacaatttaacagtccattaaaaccctgtgacaggtgaagcatgctttctgcagcggagctctcagctgggcgttggttccatggtttctggctggccagagtggcaggtcccaggactgcagacaggaccctgcagtcctccctatgtgtagggcagttgggagcagaggagagagctgaaaagcctgatggcagagatttgtggagaggcctcctctgtttaaattgtgtttcttttaacatgattgaggaagaatactctcagccacaatcctaactgccttatgaacagccaccagtccaccaaaattactctgagctcaccagtgaccttgatgttgttaaatgcgatgaacatttttcctttgtcttccttcttgaagtgttctcttctcctggattccatgaaaccacattcttcttcctcctccccgaccccctgctgctacaggctctcttgctggcccctttgctggctgcccctctctgtcctgggctgcatctctgtctgcagtctctctctgttggtcatgtcatctactccctcagctttaaatgccaacaacttccacattcatatttccagcctagacttgtcttttgaactccagattcataaatatactgcttactaaatcaacctgctttggatatctcaggggagtctccaacaggatacgtgccgaagtaatcacctgagcctctcctccagcataaatggcactgccattcagctggctgctcatgctagaagccggggaggtgccctcacttctgcttcaccaccccactcttcaatcccgttagttatgaagtcctgccacaatgagtcccatctgcaaaagttctctgaaatgtttgtccctttccatgctgcctactttcactcagctccaggctgcccccaactctcaccaggtctcataaagtgtagacccacatgctccccacccccaacacagcagccaggatgatctttttatcagtccccttttaaaaacccttcagtgttccctattgttcttgaagaaaagctcaaaatatttaacgtgaccatgcagcccccgaccctgccactaagcacatgtgagccatgttgacttcctttgatgcctcaagccccttctgggcaatgcttctgcacatgctgtcgcttcctggttggaatttcttccctctccccatgaactcccttcacatggctctctccaacctcagactgccttatgtcttatagcaccctactggtttgctttctagtgctttcttatacttgctgttatatagttatttgtgcgattatttgtttaaagtctgtctcccccactaggctgtaaactccacaagggcatgtctgatttgtttttcactctattccagtaaccagcacagactccacgcttggcagacactccatagtggtttgcttgttggtgaagtctataggtgctccacatttaatgtgtcccaaatcgaactatcttttttctctctctctcttctagtctgttttctttcttctctgagtcagtgaatgacaccagcaaccacccaatccagaaaagttagagtcatcttcatttgtttctttcccttaagcctgatattcacagcaaatcccaacagtttgatctcagaaatttctcctgctttctttctctgctccctctcatcttcactgcactgccatagttcagtcctcctaatctcttgctgtattatagccactggcccctgaatcagccttcctacttctgttttctactgtcttccagttcatacgtcactctgctcctacagcatccaaaccacaatttgattttgctgtttctgcacttaaatacctgtagatgctctccatttcctgccttaaaaagacagaccaacattggttagaaagtaatccaaggcccttttaatcttcctccaacctgcctttccaatttgcccctcactcccagtacctccaatttcacttcaaccacacagagctcttggccagttcctatataggctgtgcctctgtgcctgtgtacgtcatcagcctttatacattctagtccctcagccactgctcatccttcttgatccacctcctctactggttttttgggggagccttcctctccctaggaagagttagatattccttccttggtgtatgtaatgaatgtccatggtataactggccctacttaagcattctgacactggatgacagtttgtttctctttccgtctgcccctttcattagatgcttacttctggagagtgaagccttgatttttttttattttttgactccctacctacatcccatcccaccatcggccgtgtacacctccatggcccaaacctagtgctgacactaaccacgaactttgctttctagcagatcgaaaaagcttctgcacaatccacagcacaggctatttgaaaagctggccacccacaaagatggggctggatgaagacaacgaaccagacaatgaggggtgtaacctcagctgcctcgtcgcaattggacgactgcattctcatgtagttccacaaccagtgaacggggaaatcagggtgaaatctatggaatatgtttctcggcacgcgatagatggaaagtttgtttttgtagaccagaggtaagagtctacatactacccttgagcaatgatggtagaggattttcaaccctgatctaaaaagcagagaagactgggccatcagctggcttttctaagaatgaagaaagaaagaaaaagctgggtgcagtggctcacacctcaaatcccagcactttttgaggccaaggtgggtggatcacttgagcccaggagtttgagactagcctgggcaacgtggcaaaaccctgtctcaactaaaaatacaaaaattagccaggcatggtgacacatacctgtagtcccatctactctggaggctgaagcaggaggatcagctgagcctcgggaggtcaaggctgcagtgagctgtgattgcaccactgcacttccgcctgggcaacagagtgagaccctgtttcaaaaaaaaagagacaaatgatgagagtctctgttaaaaaatgagattcaataggatatcatcataaatacagagatttttctgtcattctttggcatatagagacaattaagtggggtgccttgatgtccatggctaaaagaaaaacagtagggatagcatgctgtctgaatctatggaatgttccagaaccattattgtgattgaaattcttttgaatctaggacttggaagcaattatttagtcctgagctgtccaataaaatactcgttggccatggtagcctcccatgtggctaacggcacagacatagaacatttccatcatcacagaaagtcttgttggacagcgttgatctaatccaacctccttattttatggatgaagaacagaggccagcctggggactggtctcctgtaggattcacaattaattggtaatagacctggaccaaggacccaggtgtcccaaatttactgctgcctactgctttccctcagaatatgcacaggctaataatttttctggctactagagacagccacaacatgctggaaaaagagacagcctcagctgtcttgtggcctcagctgctgcagcttctggcatttggttgtcctgataaaaaggaggcagcaaaaactagaagccttgcactgaggtttagatttataccacattttaatctaattaatgtggttccttttttaaagacagatctcagtctgtcacccaggctagatctagtgcagtggcgagatcttggcttactgtagccttgacctcccgggctcaagcagtcctcccacctcagcctcccaggtagctgtgaccataggcatgtgccaccatacccagctcattgttctgtgtttttggtaaagacagggtttcaccatgttgcccaagctaatcttgaattcctgagctcagacaatctgcccaactcggcctcccaaagtgctgggatgacaggcatgaaccaccatgcccgactggttgcaatttttaaagccccctcagatttgatttcttgtgataatagtccctttacaaaggctttgctctgtttccctctatttttatagccttgattaaattcagatgcctgaaaaaaagagagaaagatccacacagtgagccctctgaaaatccatccagctcttttgcctgcagctttgaccttgctctcataggctgtagcagggtttatccattgcaaagttgcaattaatcatctgaatggctttttcttctttaaatattcctttattcccttttagggcaacagctattttggcatatttaccacaagaacttctaggcacatcgtgttatgaatattttcaccaagatgacataggacatcttgcagaatgtcataggcaaggtaagctaggatgtatgaaagatcttaagttgaaagtgtccccttgcttctagactagtcaacatgaccttccagggaaatctgtccactgaggatgtagagtcagccagcctaggactcttcaggtcagaacatctgtgtgaagaggaagctgatacctgcaggcactgtttatcccccttgtagttgccctgtgctgactgcatggcagtttctgaaagacatctcttgttcagagggttttcccagaccctgtaaagatttagtatggcccagactgatctgattctcttttccattcaagcctgcactacctcctgtgttttctgtcttgactaatgctgtggcttcatgtgcaggctcctgagagagaccaacattgaccccttctttcactgtgtctccaccagatcctgttcattcacctcagacatgcatttccaaaagtctactttttaccacctctgccatcaccctggttcaggccctcgtgcctacttagagacctgtgatagacttctcagggtttctctgatccctctcacccccagttcatcttccatagttatcctatttatccccagatagattgagcctggtaacatcagcctgcttaaaaacctcctgctttagactcaagcccaaatgcttttgacaggcaatcaaatgtgagaccttccaccttctggccccagcccacctcctcagtttcagtccccatccctgcctgcagaggcctgtgctccaggcacactgacctcactggcctctccccaaccagaccctgctgctcctcaggcactgctgggttcttccctccctccttctcttggcaaactcgtgttcatccctcaaggctctgatctcttctccctgtatagccttccctcactactcttcttgagggcaggagtcatagcctgtctcctcttgtatctccagtgcctggcacatgagaagggctcattacatgttacatgaaagaatgaggttgaataggtgagtagcctctgttgatttggatgttcttagaaatgagataagttctatattgcccttgggctttgtgattgagataaagcatgacattttggacagtgccttctcatttgctggtggtcatgttagagctgattccagttagatgtataacatgcagtcagtaattccctagagcctcaattttacagactatggaaaatcatgacagcttcacaaatgaattgaaaggctctgagttagaccctcagaaacaacctatttcctgagtgttgaccactgcagtttccttggcttactaaagagcgatgtcgttggagctcaagtacctttaatattttgtattggatgtcctgtttaatactttggtctgagaaaacaacaatgtccatgttttctttacattttcagttttacagacgagagaaaaaattacaactaattgctataaatttaaaatcaaagatggttcttttatcacactacggagtcgatggttcagtttcatgaacccttggaccaaggaagtagaatatattgtctcaactaacactgttgttttgtaagtacttttcctatatctgaagctccccttgcttcaaacagatgcctagggttcctcatctgggaaatggggtgcaggcaacatccagtatcacatcctttaatgccatcttgctaatacctgtgaagcctcaggactggcagaagctagaaaggattgttaacaaagggacaagcttcaggacttgtaccatgcaggccctggcttatgaaactgctccaggaaatagcaacatttccttccagataaagcagctaacctttgaattccacaggccctgcaccctaggcatccacttgtgctgctgtggaggaaggggttggcaatctatgaaaggctcattcaggcactagctcacactggccttggctgaggatggggaggtctccatacctgtcaggcagggggcccaagcactggcagctggaatgccatctcaaaaggctgctacctgctagatgagcagagggaggtgaaggagcctctctttggccaggcctgctccccacttttccttccccatagtgtccaaaaccccacctatggtaagagctgtgtgaggggccggggctaggtgcactgcaggctggcaggaggaggtgctgtaatgatggcagtaggttactgcagccaccacctctgctgaactgtgtcccacacatattaggaaggcctaggcaggcagtggggccaaaggccaggatgctatccattatattatcaaacagtgagacctgtttacccactcagacagacacttcattttctggcctgtccaggtccagagtggacaccggacaccttggccaagttgaatggtgcacagttctgagcaggcctgactcacgtttccttattgctgggatgttcacagagccaacgtcctggaaggcggggacccaaccttcccacagctcacagcatccccccacagcatggacagcatgctgccctctggagaaggtaactatgtgctgctggggccctggggcttgcccgtgggaaggtgcttgtggtcaaatatcctcccctaaagtattcagggtcccctccattcatattctgtggaacaagggaggcctcgaggggatgatgtgcggatttccccatgaatgcagaggacactgtcatgtcactttctctgttgagccggaatactaggagctcactgctgcacttcccaaagctgctggcccctggaagcccttgagctcgcaaactccctactccccttgtgctttcctcctgtgttggctagtggccatgatgtgaagtgctctttcgtgactgtcactaactcctgtggttggcaggcaggtgtctttcggcaccagggtgtgtaccatacccactgggctcccttctcaggctcagccttggccctgcccctgctgtccacgctggactcatccttcctgggaccatccccacatgcatggctgcagcccccatcgatgactcccacatccacatctcctggcccagtctctctcccgagctccagatctgtctctccaaatgcctcatagacagaaccacctggagtctcagaggcacctgaaattcagaatatcccaagctgattttctgcactcccctacctgattggttgtttaagccagaaacctggctgttgtctctcccccattatatctaaacacggagtcctgaaccttctatctcttaaacttcgtcaccactattgctatttcaccctcctcatctgctgcctggattattgcaaatcacttcgcaactctagtccccctctccccaccccatcctccattgtagttcattctccctgccgtggactttctaataacccagttctcatttgtgccttttctgtgtatcgtcctttggtactcctcattcccttgtggaaactgtccaaattcgttagtacggcatccaagaggcccctcatgatcggattggtacctgctgccccagtttcatctatcatgctctcatcatcatttatgatgaattccttggaggagtctcccaagttttaacctgcctcagtgctcctgcacgtgttggttgctgtgcctggaatgctttctcctccttacctctctgccaagctaattcatattcatctctcaagactcagctcggggttaacttgctccagaagctgcacctggccccagatgagttggttgcctcgtgcttgcctgtcaaacttacaacattttgctttagccattgttcatcttgttggttttcctgttaaactgtgagctccttgagggcagggacttgtctctgtaaccctggcacatacagtggtcttcaataaacgttttttttcagtgcatgaagggaaagaattagatgctgtatgaagggaaaaaactggcctcagatcctagaaggaaacttgagcctttccctgctggaatgccttttcctgacaagctgtagccctaaagtccctcaaggcacaactctgatgttgaactgcaaatggatcatgggataaactggttttactttaatacataatagtatttcttcctcagttttcccctttcctactctcagattcctttgttgtaggtggcccaaagaggacccaccccactgttccagggattccagggggaacccgggctggggcaggaaaaataggccgaatgattgctgaggaaatcatggaaatccacaggcaagtaacaccttctagttcctctgttaaaccagtggttctcaacccagggaaattttttcccccaggcaatattttgcaatgtcaggagacatttttggtcttcacaactgggtgggaggttgctacttaaacatcctgtggatagagaccagggatgctgcttgttaaacatcctacagtaaacaggacagttccctcctccccacccaacaaagaattatccaatccaaaatgttagtagtgcctagattaagaaatcctgccttaaataaagaagctaaaccaaaatagcccagcgctaaagagaattcttgagaagacttaactttcttatggctcaaggagcttctcagtgcggatagatgtacctttactttacaggaatgcaggagtagagctgtgaactatcagagtgatctggaccttaacaaaacattcactttttttcaatcaaagagctgcccaggattagtactagaaaccaagcagatcagctagttattactagctgtcttgggagagacttcctttccatatgaaagagaaggagcttagaagcagtccacctgggtctgagtcctgggcctgtctctctacctggctatgctgagacttacttaacctcttgctctctgttgatttaaaccataaaaagaaagcactatttcccaagaattgtgttaggattgtgagggcactcaggaaagttccaggaacacagcctgacatatagtgagtgcttaaaaattaattaaatctgtctttaagagcagtcgagagggaagcagttatcataagtctgtccaaatttggggaatagagaaggtggtaaccagattcttcagaacgaaacttaatgtaacataagaaaaggaagaaaacactgctgccgctggattctctcaggagaattagaggctggcctgttttccaattggccataaaggggctgttatccccctataggtaacacagctcttttccaaccccacaggattagtgggtgtgacttctgcatcaggaaggagacatgagggtagtgtgcagtgtaatcaggttcaaaccctatactttgcatttgcataccctgtattttgcttgagaccatccaagaacagtatcaaacagtccttgacctcaagaattttaaaatcttttataagtctattttctttatgataacaggaaaaagggagggtgcatgggccaaagcaagcaaaagaggaaagatttgaacttggccttagccagggtttgcaataagagtggatgttccctctagaaaagccagggctattcttgagtgggcatgtgagtggcaaattcagggtcaagaaacaagctacctaactgggcaggctttgtgtaggaaggagacacagagctatgataggcgattaagaaacacaagaaatgatactgtgcagtttggaagaaacctgtaagaccccatttgttgtaggatgctgaacaagcatccaaagtcttgtgttacgctttgtggaagttgcattggaatagggagagatgaaggtgggcatgtttgacaactcaggaatgaggccttatcctacagagatgacactgccaaaagagaaatcaatcatctaaggtctagcgtttgaagatgaaatcaggaatgatgaaacagcaattccaagatgagaaacctgggaaaatagtggtttcatagacataagtagagaaaggtgggggacactcagcaatttttccgtaagcaattagcagccgtttgtgcatgctgagaatacatgatatgtagttgtaaactgccgttaagaagcttctaatccagaaagaaaacttgttcactcataaatctagagaactaggcagtacaagaaccaaaagacttctgggtggtggaggagtggtctctgggtcacccaaaagctacattcatccatgtaggagctgagagtcctgtggttacacaactgccatcacactctccctaaactgtagctgcaatgccaagtgatggattctttcctgaggtccttcagcctgacaagtatttaggtggatttacagttctaagtcttcccttctataaatcttctgagagatatgctagataagaaaggcctggacccatttttcatcaaccactgccttcgaaggctgcttttcctgtcactactactaggctaccttttagaccctggtgccgtccatgtcctaagagtattcactagctaaacagtgtttgtggagaaggggacaaattgttttctgtggatcaaagatggaggttgatcttagaagttctcctccaattcacctggattctgtgaggaaataaaactggccacttacttgaaattcaccaactgaatgcaaactccaatccaagggctttgtcagtgagatgcttgactctagggactgcattctagatcaggtgcctgtagaacaaatccagcttgtcatctgtttttgtaaataaagttttattggaacacagccacaccgattcgtatctgtggctgctttcaagctgcagaggcagagttgagcatttgtgacaagacaccatatggcctagagagcctactatctggccccttacagaaaaagcttgccaaaccctaatctagatcttcatcccctttctcacctttaccccttaacaaagcacatacactccactgaaaaaagaaaaggcagtgtaattctcttttctgacaggataagagggtcatcgccttctagctgtggctccagcccattgaacatcacgagtacgcctccccctgatgcctcttctccaggaggcaagaaggtaagactgatgattcttagcctaagctagagaacctcttgcccaagatctgaaatgttgggggtgggagtatggaattgcaactgcgattgctgaaacaatttggactacttcctccttgaagtaaatgcatctgtgtgaggctggatacaaagcatactggtagggctagggaggcttgctgacatcctcagaggctttcttccatgtgagtggaagaagggagaaagaataaggaatggggaactgtcagttcatttaattgagggagcaattcaagagttcccatgagggaaagattattgagtacctcacatagaaaagtttctcattttctgccaggaattttcaagggagaaaatattagtgtctagggcaggcaatggaaacagcaatgccaccagcagtgctttggaaatcaagccatgctttatagctgcagaatacttggggatctgctgcctgggggttccattggtgtgacagcattggatccaagcagtggatcaatcaccagccctcatgaagagcttgctataagactacactataaataggtttaggaaccagtcatttgttttcatctttgctggagaacttataagcctaggcccatcttaatcgtaaattataaatctgtttatattgcctgatgccagtagagcttaggacagtttaaaggccatcattttggacacaatggcttcctttccccatctcctaaaacagagagagagaatatcaggaatttccataggcaggactcctagggcacaaaccatcaaaagcagggcaaggattttcaaaactgagctcctcggaggtttgttcaggttaccaagagctgtggtgttaccaggtgggatgggcgtggggatagttgctaaggagagagggtaagagtagaaatcctgcttctacaagggcagcaatacttcttttttatacaggaatcttctgcaaacatttctatttgaaaaagcgttttgctccccccaaaaaaggttgaaagttaacaaattaatgggtaagactacaaagtaagacctgggttcgaagcttggccttgccatgtgctagttatgtgaacttgtacaactttcaagccctagttttctttataatggagctaataatggttagggtagccagcatctttgcacgaggtcctactgtgagataatatatgtgaaagtgcttggcccaaaataccactgacagatgaagtctgagcttggtgtcccgtgacccccgcccccctgcccacaacacacacactgcttgccagctgtcttcttagctgttcttctgttatacctccaggtccttcctgcatattggatccaccatcttcttagggtggtcttccagtctctgcttcttaagttaacttttaggcacttgacttgactcctggtattaccaaggattctacttcttggttttgaaaggttatcagtccagtataggcttaaatattactcaaagaactttcatatacattgtctcatctcaccttcacaacattatagtgacaagatccaggctcctcagcgttcgttttataagtatggcccccaggctacaatcctgggctcatggcttccaattcttttcacatcaacaactaccagaaatcaaaagctgtgctctgcatcataaagccccagctatttttgaggcacttatgaaaattctcccttttctttgagaagaatggattataaaatggatctgtgagaagaaatttggatgtgttctcacgagatgagtcctgggcagcaggacttataagaaaagcagcttaaacaagacagttaaaactgacagcagtattaaatggtgcaccatacccagccctttccagtcactttcaaatttggaaggtccaaaaatgaaccatttagcctgcagttgtttgtcaggatcaagctaaaaaggaagcctaagtgagcctccataggtcgcaagagagtacagacatccagaagcactaaggaaaattcagataaagcagcagttctacaaatgtcatctgcagtctttttccagaaagagagggggcacaagatccttttaagggtctgcaaggttaaagctattttcttaataacattaaaacgttaattttttccctgtattgataatgtgcactattcatactaaaagcacggttgggtaaaattgctggcattttacaaaaatcagacaagtggcaccaaactatactagtagtcattgtattcttcaccaccacacactcacagtaaaaaaatagtttaaagccagtttcatttaagattgtccatcatggctaggtgcagtggctcacccctgtaatctcagcactctgggaagctgaggcaggcaaactgcttgagtccagcagttccaggcaagtctgggcaacatagagaaatcccatctctactaaaaaatacaaaaaaaattatccaggtgtggtggtgtacctgtaatcccagctactccggggactgaggtgggagaatcacctgagcccaggaggttgaggctgcagtgagctgagattgtgccactgtactccagcctgggcaaccagagtgagaccctatcaaggagggaaggaggaaaggaaggaagggagtgagggagggagggaaaatgtccatcattacttttataaaattctcaagcacacatctttttaatgctctgtgacaaaatgagaagtacacagaacttgtgctgcataccaaagtatgatgtttgtctcaaaaactacttgtgtgattaagttgtgagttgaactagctactattttcattggacaccatttttattgtatatggtcattcggttttgggtatttagaatactttttttttggaaatgaatgaagtgaacctgtcactttaaggaaaatgactgacatttgttgccaatgataaaatctgagctttcaagcaaaaattggaatttttagaaaacttgtctctgctactttgaccttgagatcttcctaaaacttaaaaaatgttgttgatgagatagggagtattaataatagtgatattttgatgctctataatgaaatgtgtcaatatatagaagatctgcataactcagtgaaccaatattttgtaactaaacaatgcaaggtatttcaaaatcatgtaagggtaaaagatccatcctaagtgccaagatataaagagtacaaaacattcattgatatggtttcagattccacattgcaactcacctttaagaaacttctacgtgtcaagttttgaagtggtatcaaaaaagaatacaattatttgaaaagtctattaaaatatgcctcccttttccaactacttatctgtgggaggttggatttccttcatatacttgaatcacaagacgtatctaaatagactgaatggaaaaacatatatgagaatccagttgaaaattattaagccagacattagatttgcaaaaatgtaagataatactctgcctggtaattttttgttactgttttagaaaatagttatttttcattaaaatactattcattatttatgttaacatgtagcgggtttattacatttaagaaatctattagttttaatttcaaatacagtaaatattgataaatacagcctacataagcaaaagttctttggagtcctcaatgatttttttaagagtgtaaaagggtccctagaccaaaacgttgctgtggaaataaagtaagttataatgccacctgctggcaaagcctgaaatcattgctgctcctgaaagcagcagctaccaaactgtttcctcacgtatatccagataggtctcaaagaatgctcttctttgagactcagccaggggaaggcagctggggtgagtgggggagattttgagacagagttctcttactgagtagtagtaataatcctccccagtagcctgtcttaacttaaaccacaggttactgaagttggcacctgtagtataagagatttacttctgttttcttcatttgactccttgagctgtgtctcttcacagcttgttaactccactttttcttcttcagaaatatctgtcactataagatgttttattcccttataggggaaacgtctagctgggctcattgaagtttaggcattggtcctaaagaaatatgtgggcatcatgattccaggcagttgaatgctcttgggattttattcagcctttaagttgcctctgtgggctcactaaaatggagagaaaagaatagttcgggggagaggttttttcttactctgaccatgtctgtctaacagttccttgtttgaaatcatccaatagaaaactgaagccatttgaagcttctccccaccccaccccatgcttcattttccttttggcattgctcataatactgattcaaacttcacacttccctccttttgtttgtagattttaaatggagggactccagacattccttccagtggcctactatcaggccaggctcaggagaacccaggttatccatattctgatagttcttctattcttggtaagtggcatcattattcgtttccattgcaatgagcttgcaaaacatcttacataaagtcaattttaagaactgaactgtgtgaaacaagctaatcctagataaatttgataggaacagaataaaagtttaaaatttgtttaaatctctaaaaagttgaccagtatttgagttttggtggaggtccaagtttgtgcctggaactcaagaggaggctacagctacctagacataggctttctcccatgtggggcataatctcttcagagagagaaggctaatgaaggttcagagataatgcctagaagggtgattagtaagcatatcagaaggtattaaaagtcattaagtgaaaagagtttgcttttcccatcacatccatctttttctcccctgggctttctagatctgtttttttcctaaactctcccttcctatttgcctttctttttgtaactcctcttaactggttacatcagattattaaaataagcttgactcaaatatttttaacatttactaaattttaagcgctttgtacttatttctaaaatgatcatttgattccttagagctgtctcttcacaacgtaaccccacttatttcttacgtatttttaaaaaattggttctttcctctaaaaaacagcgatataaaaaaagatagccatgcagcccaaaaagcagcatctcaccctaccattaaatgtaactttcttattaaaaatgtgcttaggaattgcttacttaatctgaagatgctttaaaaaagaaatcactgaccagtctttatctcctcccacaggtgagaacccccacataggtatagacatgattgacaacgaccaaggatcaagtagtcccagtaatgatgaggcagcaatggctgtcatcatgagcctcttggaagcagatgctggactgggtggccctgttgactttagtgacttgccatggccgctgtaaacactacatgttgctttggcaacagctatagtatcaaagtgcattactggtggagttttacagtctgtgaagcttactggataaggagagaatagcttttatgtactgacttcataaaagccatctcagagccattgatacaagtcaatcttactatatgtaacttcagacaaagtggaactaagcctgctccagtgtttcctcatcattgattattgggctagctgtggatagcttgcattaattgtatattttggattctgtttgtgttgaattttttaatcattgtgcacagaagcatcattggtagcttttatatgcaaatggtcatttcagatgtatggtgtttttacactacaaagaagtcccccatgtggatatttcttatactaattgtatcataaagccgtttattcttccttgtaagaatcctttactataaatatgggttaaagtataatgtactagacagttaaatatttttaataaatgtttcccttgttctataaa

SEQ ID NO: 15439 - DNA, 30389 bp, Homo sapiens
ggagatgagcaaggaggccgtgagcctgtgggcgctcactgtgtccctccaacccccagtccccttgtgtgtctgcagagagatgacaggatcaggcagaagaaaacagcaatgtgtaactttgccattcatctccagagaattatgtttttatcttttgctttttcctccccccaggttagaatatacagaacaccaaggaaggataaaaaatgcaaggtaagcttggaccttattttgtctacaaagcatcctagttctggttgcttagagagcagctgaggaggctctgcatgtttggtcctgtctaagagttctgttgggcactgtcacctccttagggaataggcaggtagtgggccttggccgaggtggccttctgccctccatgctctccatactggctggcctttactctttgctgtctaagcacctttaacctgaagtggatttgaaggtagcagaaatcaatcaaggctcaagtttttccccagtcttcagcagagaacgtcttcctgactggagcgccctccgcaggagacatggctcagtgatttggttcctgggctgggacttgcctctgtcaggggcccctattgcactgcgagttgcaactgaatgcaccacatggggcatgctcggtgtctcgagtagattctctgcctgggtctgtcctgcctccagccacacttgctgacctcttcccattgcgtcctcagttcttctgccgttagtaccaggctgtgttctgaggctgcgtcatgacagactgatacagggggctgcagaaattggctgccctaaggcttcaagctcttccctcggaggccagccttagcaggagctcccatggctctgtatctgcggcagctgcagcaaactacatttccatcgttgctgcacctccttaggaggaccatcaccaatggcaggtgcacatcagtcagtgtcaccctgcctcagcgggaggagtgtgacattcctcagaggaggctcctggggacagatgtagcatctgctgcacctaggtggggacctagttttgatccaaggatgacggcgttggttactgggtgccctagtcagtgaggctgtgactggaaagaattggtgccctgcccaggtcacatggccacacagcgggctcctcacagacctcagggacagcccacggggctctggatgctctgtgctatgaagccaccacctcccttctctttcctttcacccccatttcaaaatccaatttgacaaaggctgagaggaaaagaaacgaggagaaatgaacaattcagtttactctgaagagacaatttttgtagcttttctcctgaattctaaagatgaggtaaacataaaaaaattaatactgacctggcagtgagaccattttcttggagactttagttgaaaagtctaattttaaacattctgcaaattctaaatttgccttgtcagatgaacattgaaaacagttacaactcatttatttttgtcatcttttcttgatgcttggttacattttataagaaatcgtttttcatattgttgttcagggaagctcacagtcagattgaaaagcggcgtcgggataaaatgaacagttttatagatgaattggcttctttggtaccaacatgcaacgcaatgtccaggaaattagataaacttactgtgctaaggatggctgttcagcacatgaaaacattaagaggtgagaccctgggctctattgtcctttatgtccttgcccacaaatgttaccacccttgcctagaatgttcctatccctaaggcagatgtttattacttgcaattatgtagccttcagtagtatgcctttactcttcagcaacagccgtgatgccaaatgaagtgattattgagcttatgtgggttttgacatgcaattttgcagtcacacattctcagagcatagaaactgtgctttgcacgtctctgtatatgcatgtaatcaggctatgtgcctatcagagatgatactgctctgatgtctcacatcttgcctatgtttgtgcctggatcccatccttacaattataacacgcagaaatgtaggtgcacacagtgacacagaaaagtcagttcaaagatgaaaattcatcatggttcctttgaaaagtgagtcatgggttgtgggttctcgcgacattttgttgtcaggaatgaacactgaagatattttcatcttcctggaattttcccgaaccagatccactctttgtgagggaggcagtattttccttcttttctgagtgtggggagggtgagaaaacataggcagaaaagtggaagtgacttatccaaaccacaagagaaatctgaaatatatcaggcattttagtgaatgctgttcctggaattttccatagctagtcttggacttttggaggaaattggaaagtgggcgctcagtcagatctctgacctgcgtggtagaagaattgcgtctttttatatttgcacaaggccaccagaaataagaagtagctggttttgtctgactttagatcattacccaaaaatataaatgttgtatcctgtgctggaagaatggcatttaaaaattcatattagcaaagataacatgggttaaattattataaactaatttctattaaattggaaaaaagtggcaaatctcaagttacagtaaagagcagggatagggatcaataggatggttgcaacacgtcctgtctccttccctccccatggtactttgaattgttacagatccatttccttttattccttcactattctactcgctattctacagactccaaatcatttactgctggcatttttctctgttaagtgattgttctcctgaaaaatgccagattgacagccttttaaacctaagtcttgtcccctttcagtcctgggagtgcgagctgcattgactgaagcaatgcattcctccacattgccacgctcgtttaactcacccctgatgaagagtaactcacattaaatgccttccacaatatatttactcagggcctggaagactgaatggtttcccaagaacatttagagtggtgatttgaaggactaccagacaacccatttaatacagatcttaggaggagggaactctctgaggagcctctaccagtttacttccagagctgccttctttcttagaagcagattgttaaacttccttctattatctcttggttttccctgtaatgagaaaaacaggcttgttaggtctcctgtgggtaacagtgttctctcttccatggaattctctttggcttacaggattctgtccaaagccagatctaggctcatctcagttaaggcctaaacaataaaatttaaataccaggtcatagagactaggccacttacagaaggtttgaggcagcaagttagaatgagacattttctgaatatcaagtataccaattctttctctttttgcccctaaggtgccaccaatccatacacagaagcaaactacaaaccaacttttctatcagacgatgaattgaaacacctcattctcagggtatgttcaattatgggattgttttacaacgtttgtttttataaattttcaagtaagtaccagcatgtgggaatttgatgtttcaacactgagcttttttttttaggcctgcttcctctctcaggtccctccctttatcttattgtttggacaggcttcacatttcttccacaaaaccattctcctcctcttttaacctcgtctagacaaaaatggaaggtctatgccaccgcaatttaaaatcagaagagtcaggatttgttaaaaataagggggatttgagaatcacatttctgcatgaagattttaggaagggactgaaaccaacaacaattgagaatttctcttcacctgatttaaccactagcacaaaaaagtccacctaaatctttacaccaaaatctcatcaaaataacaaaactgtggctcacgcctataatcccagcactttgagaggccaagacgggcagatcacctgaggtcgagtttgagaccagcatggccaacatgttgaaaccctgtctctattaaatatataaaaattagctgggtgtggtggcagatgccttcttgggaggctgagacatgagaattgcttgaacctgggaggtggaggttgcagtaagctgagatcactccactgcactccagcttgggcaacagagtgagactctgtctcaaaaaacaaacaaacttacaaagactagtggtccaaaaaagaaaaataaatgcaagagatatatgctttcacctgcttgacttgagtgctctctctgtcttgctaaatctctgctgggagatggttgaggtggcactatgggaacctgttgtcttccatgaagaattaggtcggcacaaagctctaagttgtgttactaggtaaagtgagattaacttgggaattgaagggaaagaaactggattcagaaacgtgttcttgtagattgtaaacagatgaatagaaaaacgtaactaaaaggaaggatacccgcttccacctcccacaaagtcagggctgaccttacctgcacagccaacagaatcttcctacccatctttgagcagaagtttgcaaagctctagagtagagggtagtccatctggaattttgcatcatcactatccattttcagctctctataagcctggcctgtctgctcactccagcattctctatttatctcctcatgacgtgctatctcaaattggaaagcattcacctgcaaggaccagaagacctgatgaataaatagagtttaatttctcaagtataactggtctggagtaggttatgttgggttgctgcagtggttcaatgaggtcaataggaaccaggttctttgtctttgcactcagccacaccaagctagcatgctagcttgtttccttaatgtagccaggtacctttgccaggtctaagtagccagacccactgtaaaaacaggggtaaatgaagctctagtctggctgtcctttttatcaagaaaggatacaccttcctgaaaactcaacagtggacttcagcttattcaaaagtgtgtcacttggtcacgcctagctgcagggcagggtgcagaaacaagtgtttatagattttccagcctccctggtggagacaggcaagagagaaggggcctgggaatggtgttgggaattggcttccccaacagtgtttgccacacacactttccagagccacatgcatttgctcgattccttccagaagtgactcccacaacccaatatagtgcttcaactgtggtctgattggcctgaggttgaatgggactagtgccttccttgccaaaaaagccatctgattagtactgtatcatttggggcagctgcagtactgcctcctcccccttctctcctgaatatgaattattgttaggtcaggttttttacatcttgtataggtgcttttttgaacttaagataggacttctctttcatttctgtcaaaacctgtttgttgaatggccccacagtccagcttgtcattagtgacccttggaatctttgtgtgacttgtagatccaatacatgcctctgtgcctttcatccttgtttattcataaattcaacaaacatttttgtttacttactagatgcatggcattgttctaggaacatccaaatcaatgataaacactttagggtgggaccaggctcccgatcaagtgagtgatagtcttttggctaccactctcaggacacagttattcaaacacccaactttgcccacctctccatccttttcgtaaagatgtccgtgttctcagagaggatttgctgaggttaaaatatgaccgatgcctgtagcatctcgagagctgccgtcggtgccagcttcatgggcatgtgacctctgcagtttcacaaggccccatgcttggtttaatgccctgtcaccatcttgaaaacgtaatttttgaacaaggatccctgcattttcattttgtactgggccccacaaattatgtaactggtcctgattcccatactggtaacagatctgcagctgtagatgtgataggcctgcctctatgcctttcattcttgcgtattcatgaattcaacaaacccttttgtgtacttactagaggcttggcattgttctaggaacatccaaatcaatgacattttgggctggggtacaggcttgattattttaagaaaaagaatctatgtctttatttcatatatatatatatatatatatatatatatatatatatatgtaaaataattatcaagcagagtcctgtggatggacaaatttaaaaataaataaaacaagctccttttgcagtggcacgtgcttaatcgttttcttgttgctgcttttcttaataattttctatcagatacccatacttaccagggtatggaacaaggattatcatgctatctcagctaaatacttcatgttgggcttgtctcttctactcccttgtttatgcagcactcaagagtgatctctcttgcccgatgaaggttttgtcacctctctagcacgtgtcagtggctgtgaaatactgtccagtcccttatcacttccagggtcccagttccagggacttgcttccacagaaagccaggtctactcagatgatgttcagacagtttggccgcaggagctggacttctgcttttcctcagcaatgcaaaatggacaaactgctttctttactaagtgctttcaaaatatctttaataaagtgtatgtcagggatcagtcaactgtatcagtttacaatgtctacgttagtctacttccccatgttttgaaaactaggcagaccgtaccaaggcctctgtgtcttttattaaccagcaccatcttcccaagagtgaccctgccactggctggcccctgtggctctgtggtgctggtagtgttctcacagcttctgctccttagctgtccttcgggcccggctccttcacagatggtctgctggccagggtgctatggagttggaatgtccagagcctcccctcgctgatgcattcactgctttggaacctgctggctttcctctggagtactgaaatagctttacctgtgttgtcggttcaggcctgaccctgcccagcattacctccagggtgtcacagttcccttctgtccaggtacctttcaagccacattgccacatcaatgaaaagcctcaaaaacacttccatgagatacaagattatctgcaaggcaaacgaggaagtttttaataccctatttgttgacagaatgaggcttccagcagatggtgcttggaaagttacttccccctcactgtcatcccttgcccctgggccagcttagggacctaacttaggaaaggatcctccccagcttccttctggctgagtagcctgccagggtcttaagcaacagtgattctgttcccctctcactcatttcttctgtcccagcacaagtacatgcaccattcttttaccttctggcacattaattcatttcctagttctttgaattaaaccacatcatgaaggcccttttgtggaaaaagagaacagtttctctgtatttttccaaagagcagattaaggaccagtgaataaggtgagaaactagtccactgtgtattagaacgagggagggctgagtcataagagcaagggcatgacagagtggggcacaccctccttgtcaccggaagaccccagcaggagttgagtggttgtatgtctggaaggcagtgggtgggattcacacagcccaagctctcaggcactatagcttgggtatttacctgcttcagtctctttaccaaatgttgtcctatcttaatggctggctttattggaacatttagattttttcctgtatttaaactgaagaaggggtaagaagaatctaagcggggagttttgcttttctgaatgcaaatagtccggccctggatggagggataacatttgagagtagtagttctcagccctatgtacattagaatcacattaacgtggaagtgggatgggtttaaaaataccccagtgatcagccccatgccagaccatcagcataaaaacaaaaacaaaaaacactgctccgaatgttgagaaccactgttttagagagctccctgtacgtggaggttttcaagttgaaggcagatgatggctgagatgttggagaggggattcttgaagagtccttccaaatctcagattctctgactctccatagagttgttattattagagcaatgaaatatgattctctggaccatgataccttcaaaagaacacgtgcaagctgaattctgctttgaaatataacttactttaattggactttcttcctataataattagatgatatgcagaaacacacacacacacacacacacacacacacacacacacaatcttacagttcttcagagacgtttgttttcagcatcctgcactcaggatatcactgaaactgttagtgttcctgtgctttggatgcttagaaagcacatcctctatttgttatcagggtgattacaaattatgtttcctacagtatgagaaattgattatccatttctcctgattaggcagcagatggatttttgtttgtcgtaggatgtgaccgagggaagatactctttgtctcagagtctgtcttcaagatcctcaactacagccaggtattgttcatgctcctgttgatggtgggcagcctcacagcagtcagaagtgtcactcaattttgtcagaataattatagtatacaagtcacatgtgaacttcttccagaaaattcttaacttcttaacagataaattaatttagacttagaacaatcttgtaatatgttccgtattccccccattgaaagatctgactctgatctgatcgatagcattatggctttcttctattgctgcaaaataaatatcccacaatatgtggcaaggacagagggtaagaggctatctgacaagggagaaaggtaggcaggttaacacaataccagagaatacgtcacttggaaatccactccatactgtgtttgcagtgctgtgtcacttcttagctctattgaacctcagtttactctaaaaattaatgataacttataggatcaaataagagtaacatttataaacgcttctagaacagaacttttcacctattatgtcccccagagtttttattcatttattcattcactcacacactggtatttgcatggaagcttggtaggcagaagacttgaagaatcaaaatgacatttatgtaaattagaattaatgtaaatttaatttttccaaagatttctgctctttttagtctcagagcaaagttatggaggaagttgctgttatctctgttaatagacaaggtgactgaagcatatgatatgcgtgacttgcttgagaacagagaggctgaacagcagagctggaatcagagcccacccctatcttctgccttctgaggtcttacaggggaattccaagattgttgccttagaagagcataaactgtttatataattgagggttttcccgtcatgttatcaaaaccaacctccagatgcctccttcctggtgtcaggcaaagtggttggacatatgtacaggttcacataggaaaagtttgaggtctcatgcacaaaaacacaaaggcaacatgcagactgtgcatgcttacttgttgcataattgattttctgcatgcaattgacttgtcatgtttaacatttcatctccccagaatgatctgattggtcagagtttgtttgactacctgcatcctaaagatattgccaaagtcaaggagcagctctcctcctctgacaccgcaccccgggagcggctcatagatgcaaaaagtgagtaccagagaggcctcgcatttcctcagcagcccactcacaggcagccaaccctgagtgagcagagggcgggtgtgtgtgatgggctcagcctttccagtcctacttctctgtcctctttctggggcaccagagctatctttggctaaatggaattatttatgttctttggtcttttacataaaaagaagaaaaaaatctcaatgtccaaatttattgaaaagaagagctatttagactggattctttctgatttttagacttttcttttttctttcagaatctagaaaatcccagttgtatgctcctgagtttaaagggctaagtttgatttgttctcccagaacaaatgggctctatttacctgaattgcacacaggcagcctcataaaagtaagaaaacgtcaactataaatatggtgtttcttcaaccaaagtgttcctccttaggttggctcccccacctggctttcttcttttgcagtagtggaaccaccatccacatcgctccctctgcccccagcttcctgctactgcacacacttctgtgcaaggccccagtagctgtcatctactttagtcctgtgggaggctgtacactcctacagttaagaatgagagaatgaggactctggctgggcgcagtggctcacatctgtaatcccagcacttcgggaggctgaggcaggtggatctcttgaggtcaggggtttgcaaccaacctggccaacatggcaaaaccccgtctctactaataatacaaaaattagacaggtgtggtggtgcgtgcctgtaatccaagctacttgggaggctgaggcaggagagtttcttgaatccaggaggtgggggttgcagtaagctgagattgtaccactgactgcactccagcctgggtaacagagcaagactctgtctcagaaaaaaaaaaaaaaaaaaaaagaatgagaacacaagggagattactgggctcattccggctccaccattcactagctgtgtgaccttgagcaagttacttaacctctctctgtctcagttttctcatttatggaagagtacctatttctttgggttgttgtgaggattgaaagtgttaatgtatataaagcaggcagaacagttcctagcacatagtaagaacagtatcagtgtggcctaatgtcttgctcccaagctgtccacgttaatccctggaaaaaaataccaccagataatctccttcaagtcatctctttcattacagcacaccgcttgttcctaaaagtaaaatgcagactttggtatctgttgttctttatagtctagccttggcttttttaagtgaccttaggagaaaaatatgaatggcatttgggccttgcctttgaggctcttagcatatagtcagagaaatgagacagacagcaccctgcatagtaataggtacagccatagaaatagtgccaggcatagagaacggatgattaattctcatgtgggcgcaaggacaggcatcactgagtagatgacaaccgaggtgggtttgaaaagatgaattaatgtttgccaggtaatgaagggaggaacaaagaggaaacaatctgtgcacaggtgcaggggtgtggagccacatggcttgcttggtgctattggacaaaacgtgcacggaggggaagggctgaaccatgaagaccatttgttctgtggggacacagtgaagagctctgagttgggtggggcaggctcggattggcattctaggggagatcgcagagctggcaatgtgggaggtagatgggatgggaggaagcccagaaggagccctgggcagtggccattcctcggcacacttgctcgtgtgatggccatgggtgtgttttccctcggcttctgtactgacacctagccagtgtttggtaaggaggtgtgctcctcagaatcacctgggagcttttcaacatagtcatgctccacccccagagattctaatttggtttttccagacagcacagtccaataaaaacataatgcaaaccacaaacatgagccacatatataatttcatattttctggtagccagactttaaaaaataaaaataaatgtaaaattaactccaaaatatttcagcatgtaataattataaacaactaataagttcgttcacattcttttatttttctatactgtctttgaaatcctgtgtgtatttaacacttacagcacatttcaattcagaaaagccacatttcaagtgctcagtacctgcatgcagctagtggctaatgcattggacagcacagatctagaatggggtccaggaatctgtaggttgatcatgcatccagggtattctggcctacaagccaggttgagaacttaaggcagtccggctcccaccttgccttcccaatatccatatcctacccatccttcagtgccagcccaagttccttctcctctgggaagcacaggttgtctttgccatttatttggcactaatcatacatcaccctgtcctattattaatcttttcttggtgcacctccatttgccctttgttagccataagcgtctattgggcaagaaccccatactatatttcttttcatccccagagtacctaatccatttatttagtagcacactctgtgatttataaacatttccagactgacaacacacctgtccatgctgcatctgttaaagcctaaacttgggagatatttatctcatgtcatcattataaaacagtgaggcaggcaagaaaaggctttgctcaaggtcacactccccctcctgacagacaacactgctctcagtttatcacattttgtgtattgatttgcagctggacttccagttaaaacagatataacccctgggccatctcgattatgttctggagcacgacgttctttcttctgtaggatgaagtgtaacaggccttcagtaaaggttgaagacaaggacttcccctctacctgctcaaagaaaaaaggtaacaatttaacagtccattaaaaccctgtgacaggtgaagcatgctttctgcagcggagctctcagctgggcgttggttccatggtttctggctggccagagtggcaggtcccaggactgcagacaggaccctgcagtcctccctatgtgtagggcagttgggagcagaggagagagctgaaaagcctgatggcagagatttgtggagaggcctcctctgtttaaattgtgtttcttttaacatgattgaggaagaatactctcagccacaatcctaactgccttatgaacagccaccagtccaccaaaattactctgagctcaccagtgaccttgatgttgttaaatgcgatgaacatttttcctttgtcttccttcttgaagtgttctcttctcctggattccatgaaaccacattcttcttcctcctccccgaccccctgctgctacaggctctcttgctggcccctttgctggctgcccctctctgtcctgggctgcatctctgtctgcagtctctctctgttggtcatgtcatctactccctcagctttaaatgccaacaacttccacattcatatttccagcctagacttgtcttttgaactccagattcataaatatactgcttactaaatcaacctgctttggatatctcaggggagtctccaacaggatacgtgccgaagtaatcacctgagcctctcctccagcataaatggcactgccattcagctggctgctcatgctagaagccggggaggtgccctcacttctgcttcaccaccccactcttcaatcccgttagttatgaagtcctgccacaatgagtcccatctgcaaaagttctctgaaatgtttgtccctttccatgctgcctactttcactcagctccaggctgcccccaactctcaccaggtctcataaagtgtagacccacatgctccccacccccaacacagcagccaggatgatctttttatcagtccccttttaaaaacccttcagtgttccctattgttcttgaagaaaagctcaaaatatttaacgtgaccatgcagcccccgaccctgccactaagcacatgtgagccatgttgacttcctttgatgcctcaagccccttctgggcaatgcttctgcacatgctgtcgcttcctggttggaatttcttccctctccccatgaactcccttcacatggctctctccaacctcagactgccttatgtcttatagcaccctactggtttgctttctagtgctttcttatacttgctgttatatagttatttgtgcgattatttgtttaaagtctgtctcccccactaggctgtaaactccacaagggcatgtctgatttgtttttcactctattccagtaaccagcacagactccacgcttggcagacactccatagtggtttgcttgttggtgaagtctataggtgctccacatttaatgtgtcccaaatcgaactatcttttttctctctctctcttctagtctgttttctttcttctctgagtcagtgaatgacaccagcaaccacccaatccagaaaagttagagtcatcttcatttgtttctttcccttaagcctgatattcacagcaaatcccaacagtttgatctcagaaatttctcctgctttctttctctgctccctctcatcttcactgcactgccatagttcagtcctcctaatctcttgctgtattatagccactggcccctgaatcagccttcctacttctgttttctactgtcttccagttcatacgtcactctgctcctacagcatccaaaccacaatttgattttgctgtttctgcacttaaatacctgtagatgctctccatttcctgccttaaaaagacagaccaacattggttagaaagtaatccaaggcccttttaatcttcctccaacctgcctttccaatttgcccctcactcccagtacctccaatttcacttcaaccacacagagctcttggccagttcctatataggctgtgcctctgtgcctgtgtacgtcatcagcctttatacattctagtccctcagccactgctcatccttcttgatccacctcctctactggttttttgggggagccttcctctccctaggaagagttagatattccttccttggtgtatgtaatgaatgtccatggtataactggccctacttaagcattctgacactggatgacagtttgtttctctttccgtctgcccctttcattagatgcttacttctggagagtgaagccttgatttttttttattttttgactccctacctacatcccatcccaccatcggccgtgtacacctccatggcccaaacctagtgctgacactaaccacgaactttgctttctagcagatcgaaaaagcttctgcacaatccacagcacaggctatttgaaaagctggccacccacaaagatggggctggatgaagacaacgaaccagacaatgaggggtgtaacctcagctgcctcgtcgcaattggacgactgcattctcatgtagttccacaaccagtgaacggggaaatcagggtgaaatctatggaatatgtttctcggcacgcgatagatggaaagtttgtttttgtagaccagaggtaagagtctacatactacccttgagcaatgatggtagaggattttcaaccctgatctaaaaagcagagaagactgggccatcagctggcttttctaagaatgaagaaagaaagaaaaagctgggtgcagtggctcacacctcaaatcccagcactttttgaggccaaggtgggtggatcacttgagcccaggagtttgagactagcctgggcaacgtggcaaaaccctgtctcaactaaaaatacaaaaattagccaggcatggtgacacatacctgtagtcccatctactctggaggctgaagcaggaggatcagctgagcctcgggaggtcaaggctgcagtgagctgtgattgcaccactgcacttccgcctgggcaacagagtgagaccctgtttcaaaaaaaaagagacaaatgatgagagtctctgttaaaaaatgagattcaataggatatcatcataaatacagagatttttctgtcattctttggcatatagagacaattaagtggggtgccttgatgtccatggctaaaagaaaaacagtagggatagcatgctgtctgaatctatggaatgttccagaaccattattgtgattgaaattcttttgaatctaggacttggaagcaattatttagtcctgagctgtccaataaaatactcgttggccatggtagcctcccatgtggctaacggcacagacatagaacatttccatcatcacagaaagtcttgttggacagcgttgatctaatccaacctccttattttatggatgaagaacagaggccagcctggggactggtctcctgtaggattcacaattaattggtaatagacctggaccaaggacccaggtgtcccaaatttactgctgcctactgctttccctcagaatatgcacaggctaataatttttctggctactagagacagccacaacatgctggaaaaagagacagcctcagctgtcttgtggcctcagctgctgcagcttctggcatttggttgtcctgataaaaaggaggcagcaaaaactagaagccttgcactgaggtttagatttataccacattttaatctaattaatgtggttccttttttaaagacagatctcagtctgtcacccaggctagatctagtgcagtggcgagatcttggcttactgtagccttgacctcccgggctcaagcagtcctcccacctcagcctcccaggtagctgtgaccataggcatgtgccaccatacccagctcattgttctgtgtttttggtaaagacagggtttcaccatgttgcccaagctaatcttgaattcctgagctcagacaatctgcccaactcggcctcccaaagtgctgggatgacaggcatgaaccaccatgcccgactggttgcaatttttaaagccccctcagatttgatttcttgtgataatagtccctttacaaaggctttgctctgtttccctctatttttatagccttgattaaattcagatgcctgaaaaaaagagagaaagatccacacagtgagccctctgaaaatccatccagctcttttgcctgcagctttgaccttgctctcataggctgtagcagggtttatccattgcaaagttgcaattaatcatctgaatggctttttcttctttaaatattcctttattcccttttagggcaacagctattttggcatatttaccacaagaacttctaggcacatcgtgttatgaatattttcaccaagatgacataggacatcttgcagaatgtcataggcaaggtaagctaggatgtatgaaagatcttaagttgaaagtgtccccttgcttctagactagtcaacatgaccttccagggaaatctgtccactgaggatgtagagtcagccagcctaggactcttcaggtcagaacatctgtgtgaagaggaagctgatacctgcaggcactgtttatcccccttgtagttgccctgtgctgactgcatggcagtttctgaaagacatctcttgttcagagggttttcccagaccctgtaaagatttagtatggcccagactgatctgattctcttttccattcaagcctgcactacctcctgtgttttctgtcttgactaatgctgtggcttcatgtgcaggctcctgagagagaccaacattgaccccttctttcactgtgtctccaccagatcctgttcattcacctcagacatgcatttccaaaagtctactttttaccacctctgccatcaccctggttcaggccctcgtgcctacttagagacctgtgatagacttctcagggtttctctgatccctctcacccccagttcatcttccatagttatcctatttatccccagatagattgagcctggtaacatcagcctgcttaaaaacctcctgctttagactcaagcccaaatgcttttgacaggcaatcaaatgtgagaccttccaccttctggccccagcccacctcctcagtttcagtccccatccctgcctgcagaggcctgtgctccaggcacactgacctcactggcctctccccaaccagaccctgctgctcctcaggcactgctgggttcttccctccctccttctcttggcaaactcgtgttcatccctcaaggctctgatctcttctccctgtatagccttccctcactactcttcttgagggcaggagtcatagcctgtctcctcttgtatctccagtgcctggcacatgagaagggctcattacatgttacatgaaagaatgaggttgaataggtgagtagcctctgttgatttggatgttcttagaaatgagataagttctatattgcccttgggctttgtgattgagataaagcatgacattttggacagtgccttctcatttgctggtggtcatgttagagctgattccagttagatgtataacatgcagtcagtaattccctagagcctcaattttacagactatggaaaatcatgacagcttcacaaatgaattgaaaggctctgagttagaccctcagaaacaacctatttcctgagtgttgaccactgcagtttccttggcttactaaagagcgatgtcgttggagctcaagtacctttaatattttgtattggatgtcctgtttaatactttggtctgagaaaacaacaatgtccatgttttctttacattttcagttttacagacgagagaaaaaattacaactaattgctataaatttaaaatcaaagatggttcttttatcacactacggagtcgatggttcagtttcatgaacccttggaccaaggaagtagaatatattgtctcaactaacactgttgttttgtaagtacttttcctatatctgaagctccccttgcttcaaacagatgcctagggttcctcatctgggaaatggggtgcaggcaacatccagtatcacatcctttaatgccatcttgctaatacctgtgaagcctcaggactggcagaagctagaaaggattgttaacaaagggacaagcttcaggacttgtaccatgcaggccctggcttatgaaactgctccaggaaatagcaacatttccttccagataaagcagctaacctttgaattccacaggccctgcaccctaggcatccacttgtgctgctgtggaggaaggggttggcaatctatgaaaggctcattcaggcactagctcacactggccttggctgaggatggggaggtctccatacctgtcaggcagggggcccaagcactggcagctggaatgccatctcaaaaggctgctacctgctagatgagcagagggaggtgaaggagcctctctttggccaggcctgctccccacttttccttccccatagtgtccaaaaccccacctatggtaagagctgtgtgaggggccggggctaggtgcactgcaggctggcaggaggaggtgctgtaatgatggcagtaggttactgcagccaccacctctgctgaactgtgtcccacacatattaggaaggcctaggcaggcagtggggccaaaggccaggatgctatccattatattatcaaacagtgagacctgtttacccactcagacagacacttcattttctggcctgtccaggtccagagtggacaccggacaccttggccaagttgaatggtgcacagttctgagcaggcctgactcacgtttccttattgctgggatgttcacagagccaacgtcctggaaggcggggacccaaccttcccacagctcacagcatccccccacagcatggacagcatgctgccctctggagaaggtaactatgtgctgctggggccctggggcttgcccgtgggaaggtgcttgtggtcaaatatcctcccctaaagtattcagggtcccctccattcatattctgtggaacaagggaggcctcgaggggatgatgtgcggatttccccatgaatgcagaggacactgtcatgtcactttctctgttgagccggaatactaggagctcactgctgcacttcccaaagctgctggcccctggaagcccttgagctcgcaaactccctactccccttgtgctttcctcctgtgttggctagtggccatgatgtgaagtgctctttcgtgactgtcactaactcctgtggttggcaggcaggtgtctttcggcaccagggtgtgtaccatacccactgggctcccttctcaggctcagccttggccctgcccctgctgtccacgctggactcatccttcctgggaccatccccacatgcatggctgcagcccccatcgatgactcccacatccacatctcctggcccagtctctctcccgagctccagatctgtctctccaaatgcctcatagacagaaccacctggagtctcagaggcacctgaaattcagaatatcccaagctgattttctgcactcccctacctgattggttgtttaagccagaaacctggctgttgtctctcccccattatatctaaacacggagtcctgaaccttctatctcttaaacttcgtcaccactattgctatttcaccctcctcatctgctgcctggattattgcaaatcacttcgcaactctagtccccctctccccaccccatcctccattgtagttcattctccctgccgtggactttctaataacccagttctcatttgtgccttttctgtgtatcgtcctttggtactcctcattcccttgtggaaactgtccaaattcgttagtacggcatccaagaggcccctcatgatcggattggtacctgctgccccagtttcatctatcatgctctcatcatcatttatgatgaattccttggaggagtctcccaagttttaacctgcctcagtgctcctgcacgtgttggttgctgtgcctggaatgctttctcctccttacctctctgccaagctaattcatattcatctctcaagactcagctcggggttaacttgctccagaagctgcacctggccccagatgagttggttgcctcgtgcttgcctgtcaaacttacaacattttgctttagccattgttcatcttgttggttttcctgttaaactgtgagctccttgagggcagggacttgtctctgtaaccctggcacatacagtggtcttcaataaacgttttttttcagtgcatgaagggaaagaattagatgctgtatgaagggaaaaaactggcctcagatcctagaaggaaacttgagcctttccctgctggaatgccttttcctgacaagctgtagccctaaagtccctcaaggcacaactctgatgttgaactgcaaatggatcatgggataaactggttttactttaatacataatagtatttcttcctcagttttcccctttcctactctcagattcctttgttgtaggtggcccaaagaggacccaccccactgttccagggattccagggggaacccgggctggggcaggaaaaataggccgaatgattgctgaggaaatcatggaaatccacaggcaagtaacaccttctagttcctctgttaaaccagtggttctcaacccagggaaattttttcccccaggcaatattttgcaatgtcaggagacatttttggtcttcacaactgggtgggaggttgctacttaaacatcctgtggatagagaccagggatgctgcttgttaaacatcctacagtaaacaggacagttccctcctccccacccaacaaagaattatccaatccaaaatgttagtagtgcctagattaagaaatcctgccttaaataaagaagctaaaccaaaatagcccagcgctaaagagaattcttgagaagacttaactttcttatggctcaaggagcttctcagtgcggatagatgtacctttactttacaggaatgcaggagtagagctgtgaactatcagagtgatctggaccttaacaaaacattcactttttttcaatcaaagagctgcccaggattagtactagaaaccaagcagatcagctagttattactagctgtcttgggagagacttcctttccatatgaaagagaaggagcttagaagcagtccacctgggtctgagtcctgggcctgtctctctacctggctatgctgagacttacttaacctcttgctctctgttgatttaaaccataaaaagaaagcactatttcccaagaattgtgttaggattgtgagggcactcaggaaagttccaggaacacagcctgacatatagtgagtgcttaaaaattaattaaatctgtctttaagagcagtcgagagggaagcagttatcataagtctgtccaaatttggggaatagagaaggtggtaaccagattcttcagaacgaaacttaatgtaacataagaaaaggaagaaaacactgctgccgctggattctctcaggagaattagaggctggcctgttttccaattggccataaaggggctgttatccccctataggtaacacagctcttttccaaccccacaggattagtgggtgtgacttctgcatcaggaaggagacatgagggtagtgtgcagtgtaatcaggttcaaaccctatactttgcatttgcataccctgtattttgcttgagaccatccaagaacagtatcaaacagtccttgacctcaagaattttaaaatcttttataagtctattttctttatgataacaggaaaaagggagggtgcatgggccaaagcaagcaaaagaggaaagatttgaacttggccttagccagggtttgcaataagagtggatgttccctctagaaaagccagggctattcttgagtgggcatgtgagtggcaaattcagggtcaagaaacaagctacctaactgggcaggctttgtgtaggaaggagacacagagctatgataggcgattaagaaacacaagaaatgatactgtgcagtttggaagaaacctgtaagaccccatttgttgtaggatgctgaacaagcatccaaagtcttgtgttacgctttgtggaagttgcattggaatagggagagatgaaggtgggcatgtttgacaactcaggaatgaggccttatcctacagagatgacactgccaaaagagaaatcaatcatctaaggtctagcgtttgaagatgaaatcaggaatgatgaaacagcaattccaagatgagaaacctgggaaaatagtggtttcatagacataagtagagaaaggtgggggacactcagcaatttttccgtaagcaattagcagccgtttgtgcatgctgagaatacatgatatgtagttgtaaactgccgttaagaagcttctaatccagaaagaaaacttgttcactcataaatctagagaactaggcagtacaagaaccaaaagacttctgggtggtggaggagtggtctctgggtcacccaaaagctacattcatccatgtaggagctgagagtcctgtggttacacaactgccatcacactctccctaaactgtagctgcaatgccaagtgatggattctttcctgaggtccttcagcctgacaagtatttaggtggatttacagttctaagtcttcccttctataaatcttctgagagatatgctagataagaaaggcctggacccatttttcatcaaccactgccttcgaaggctgcttttcctgtcactactactaggctaccttttagaccctggtgccgtccatgtcctaagagtattcactagctaaacagtgtttgtggagaaggggacaaattgttttctgtggatcaaagatggaggttgatcttagaagttctcctccaattcacctggattctgtgaggaaataaaactggccacttacttgaaattcaccaactgaatgcaaactccaatccaagggctttgtcagtgagatgcttgactctagggactgcattctagatcaggtgcctgtagaacaaatccagcttgtcatctgtttttgtaaataaagttttattggaacacagccacaccgattcgtatctgtggctgctttcaagctgcagaggcagagttgagcatttgtgacaagacaccatatggcctagagagcctactatctggccccttacagaaaaagcttgccaaaccctaatctagatcttcatcccctttctcacctttaccccttaacaaagcacatacactccactgaaaaaagaaaaggcagtgtaattctcttttctgacaggataagagggtcatcgccttctagctgtggctccagcccattgaacatcacgagtacgcctccccctgatgcctcttctccaggaggcaagaaggtaagactgatgattcttagcctaagctagagaacctcttgcccaagatctgaaatgttgggggtgggagtatggaattgcaactgcgattgctgaaacaatttggactacttcctccttgaagtaaatgcatctgtgtgaggctggatacaaagcatactggtagggctagggaggcttgctgacatcctcagaggctttcttccatgtgagtggaagaagggagaaagaataaggaatggggaactgtcagttcatttaattgagggagcaattcaagagttcccatgagggaaagattattgagtacctcacatagaaaagtttctcattttctgccaggaattttcaagggagaaaatattagtgtctagggcaggcaatggaaacagcaatgccaccagcagtgctttggaaatcaagccatgctttatagctgcagaatacttggggatctgctgcctgggggttccattggtgtgacagcattggatccaagcagtggatcaatcaccagccctcatgaagagcttgctataagactacactataaataggtttaggaaccagtcatttgttttcatctttgctggagaacttataagcctaggcccatcttaatcgtaaattataaatctgtttatattgcctgatgccagtagagcttaggacagtttaaaggccatcattttggacacaatggcttcctttccccatctcctaaaacagagagagagaatatcaggaatttccataggcaggactcctagggcacaaaccatcaaaagcagggcaaggattttcaaaactgagctcctcggaggtttgttcaggttaccaagagctgtggtgttaccaggtgggatgggcgtggggatagttgctaaggagagagggtaagagtagaaatcctgcttctacaagggcagcaatacttcttttttatacaggaatcttctgcaaacatttctatttgaaaaagcgttttgctccccccaaaaaaggttgaaagttaacaaattaatgggtaagactacaaagtaagacctgggttcgaagcttggccttgccatgtgctagttatgtgaacttgtacaactttcaagccctagttttctttataatggagctaataatggttagggtagccagcatctttgcacgaggtcctactgtgagataatatatgtgaaagtgcttggcccaaaataccactgacagatgaagtctgagcttggtgtcccgtgacccccgcccccctgcccacaacacacacactgcttgccagctgtcttcttagctgttcttctgttatacctccaggtccttcctgcatattggatccaccatcttcttagggtggtcttccagtctctgcttcttaagttaacttttaggcacttgacttgactcctggtattaccaaggattctacttcttggttttgaaaggttatcagtccagtataggcttaaatattactcaaagaactttcatatacattgtctcatctcaccttcacaacattatagtgacaagatccaggctcctcagcgttcgttttataagtatggcccccaggctacaatcctgggctcatggcttccaattcttttcacatcaacaactaccagaaatcaaaagctgtgctctgcatcataaagccccagctatttttgaggcacttatgaaaattctcccttttctttgagaagaatggattataaaatggatctgtgagaagaaatttggatgtgttctcacgagatgagtcctgggcagcaggacttataagaaaagcagcttaaacaagacagttaaaactgacagcagtattaaatggtgcaccatacccagccctttccagtcactttcaaatttggaaggtccaaaaatgaaccatttagcctgcagttgtttgtcaggatcaagctaaaaaggaagcctaagtgagcctccataggtcgcaagagagtacagacatccagaagcactaaggaaaattcagataaagcagcagttctacaaatgtcatctgcagtctttttccagaaagagagggggcacaagatccttttaagggtctgcaaggttaaagctattttcttaataacattaaaacgttaattttttccctgtattgataatgtgcactattcatactaaaagcacggttgggtaaaattgctggcattttacaaaaatcagacaagtggcaccaaactatactagtagtcattgtattcttcaccaccacacactcacagtaaaaaaatagtttaaagccagtttcatttaagattgtccatcatggctaggtgcagtggctcacccctgtaatctcagcactctgggaagctgaggcaggcaaactgcttgagtccagcagttccaggcaagtctgggcaacatagagaaatcccatctctactaaaaaatacaaaaaaaattatccaggtgtggtggtgtacctgtaatcccagctactccggggactgaggtgggagaatcacctgagcccaggaggttgaggctgcagtgagctgagattgtgccactgtactccagcctgggcaaccagagtgagaccctatcaaggagggaaggaggaaaggaaggaagggagtgagggagggagggaaaatgtccatcattacttttataaaattctcaagcacacatctttttaatgctctgtgacaaaatgagaagtacacagaacttgtgctgcataccaaagtatgatgtttgtctcaaaaactacttgtgtgattaagttgtgagttgaactagctactattttcattggacaccatttttattgtatatggtcattcggttttgggtatttagaatactttttttttggaaatgaatgaagtgaacctgtcactttaaggaaaatgactgacatttgttgccaatgataaaatctgagctttcaagcaaaaattggaatttttagaaaacttgtctctgctactttgaccttgagatcttcctaaaacttaaaaaatgttgttgatgagatagggagtattaataatagtgatattttgatgctctataatgaaatgtgtcaatatatagaagatctgcataactcagtgaaccaatattttgtaactaaacaatgcaaggtatttcaaaatcatgtaagggtaaaagatccatcctaagtgccaagatataaagagtacaaaacattcattgatatggtttcagattccacattgcaactcacctttaagaaacttctacgtgtcaagttttgaagtggtatcaaaaaagaatacaattatttgaaaagtctattaaaatatgcctcccttttccaactacttatctgtgggaggttggatttccttcatatacttgaatcacaagacgtatctaaatagactgaatggaaaaacatatatgagaatccagttgaaaattattaagccagacattagatttgcaaaaatgtaagataatactctgcctggtaattttttgttactgttttagaaaatagttatttttcattaaaatactattcattatttatgttaacatgtagcgggtttattacatttaagaaatctattagttttaatttcaaatacagtaaatattgataaatacagcctacataagcaaaagttctttggagtcctcaatgatttttttaagagtgtaaaagggtccctagaccaaaacgttgctgtggaaataaagtaagttataatgccacctgctggcaaagcctgaaatcattgctgctcctgaaagcagcagctaccaaactgtttcctcacgtatatccagataggtctcaaagaatgctcttctttgagactcagccaggggaaggcagctggggtgagtgggggagattttgagacagagttctcttactgagtagtagtaataatcctccccagtagcctgtcttaacttaaaccacaggttactgaagttggcacctgtagtataagagatttacttctgttttcttcatttgactccttgagctgtgtctcttcacagcttgttaactccactttttcttcttcagaaatatctgtcactataagatgttttattcccttataggggaaacgtctagctgggctcattgaagtttaggcattggtcctaaagaaatatgtgggcatcatgattccaggcagttgaatgctcttgggattttattcagcctttaagttgcctctgtgggctcactaaaatggagagaaaagaatagttcgggggagaggttttttcttactctgaccatgtctgtctaacagttccttgtttgaaatcatccaatagaaaactgaagccatttgaagcttctccccaccccaccccatgcttcattttccttttggcattgctcataatactgattcaaacttcacacttccctccttttgtttgtagattttaaatggagggactccagacattccttccagtggcctactatcaggccaggctcaggagaacccaggttatccatattctgatagttcttctattcttggtaagtggcatcattattcgtttccattgcaatgagcttgcaaaacatcttacataaagtcaattttaagaactgaactgtgtgaaacaagctaatcctagataaatttgataggaacagaataaaagtttaaaatttgtttaaatctctaaaaagttgaccagtatttgagttttggtggaggtccaagtttgtgcctggaactcaagaggaggctacagctacctagacataggctttctcccatgtggggcataatctcttcagagagagaaggctaatgaaggttcagagataatgcctagaagggtgattagtaagcatatcagaaggtattaaaagtcattaagtgaaaagagtttgcttttcccatcacatccatctttttctcccctgggctttctagatctgtttttttcctaaactctcccttcctatttgcctttctttttgtaactcctcttaactggttacatcagattattaaaataagcttgactcaaatatttttaacatttactaaattttaagcgctttgtacttatttctaaaatgatcatttgattccttagagctgtctcttcacaacgtaaccccacttatttcttacgtatttttaaaaaattggttctttcctctaaaaaacagcgatataaaaaaagatagccatgcagcccaaaaagcagcatctcaccctaccattaaatgtaactttcttattaaaaatgtgcttaggaattgcttacttaatctgaagatgctttaaaaaagaaatcactgaccagtctttatctcctcccacaggtgagaacccccacataggtatagacatgattgacaacgaccaaggatcaagtagtcccagtaatgatgaggcagcaatggctgtcatcatgagcctcttggaagcagatgctggactgggtggccctgttgactttagtgacttgccatggccgctgtaaacactacatgttgctttggcaacagctatagtatcaaagtgcattactggtggagttttacagtctgtgaagcttactggataaggagagaatagcttttatgtactgacttcataaaagccatctcagagccattgatacaagtcaatcttactatatgtaacttcagacaaagtggaactaagcctgctccagtgtttcctcatcattgattattgggctagctgtggatagcttgcattaattgtatattttggattctgtttgtgttgaattttttaatcattgtgcacagaagcatcattggtagcttttatatgcaaatggtcatttcagatgtatggtgtttttacactacaaagaagtcccccatgtggatatttcttatactaattgtatcataaagccgtttattcttccttgtaagaatcctttactataaatatgggttaaagtataatgtactagacagttaaatatttttaataaatgtttcccttgttctataaa

SEQ ID NO: 15440 - DNA, 109473 bp, Homo sapiens
agtggtgcgacatttagggaaggcagaaagtaggtcagggacggaggtgcctgtttacccgcgccggactcaccgccgccgccgccgcgggatccgagtgcgggcgcgggcgcgggcgctcccggcgagccacggtgagtgtcaggccggcggcggccagcgacgcgatcccgcgcaccccgtcgggggccgttagcaccctcgcgggcgctgcgcccctgccgccgccccgggggcaacccggccgccgaagaaccctgcccgacgtgcccgctgccggccttaaagggcccgtgaccgctccctgcccccacccgggccgtggggaggctgcgccccttaaaggcgccgcgcccgtccgcccccatcctcctcgcgggggctgccgctgcgggctagggcaggcagaggtgctgcaggagcccttaaaggggccgggaaagtgttcgctggagtacccaccgcccttccgcgggcatcgctacctggcggggggagggggcagctagctgcctcttaaagggatagctctgcccttgggggcagtgactcggccgaagaggactcctagatgtgtccccgggagcttcggggatccccgaggggaccatgcctggtggctgcccctcaagggcgttgggcgaacggtgccgcgtctgcccttcctccccgcttcacttccctttcgggagcccgcgaggctgggtgggggcggggagggcgtctccgtcgggcttggggagtccaagtccgcccgccccttcggccctgtagccagggctggcgctgcacccgggaatccccggccggcacggggccgaccccagcctgcgaactttcgtggggcctgtgccgtccaggtcctgggcggccctcaaggatgccccgtgggtctgcgggcaggtgcgcgtcggcctggggatgtcgcccggagcccgggtgcgggccggccttggagtcccagagctccgcggagggcgcagcgagcctggctccagctccgggtttgacagatgtcagggaagaaaaggttcccgctcggctattgccgggcgttgacatcccagagagcttcccgtttgcttggaagaagacgaggaaggtagaggtgaacgtcgaccttgtggggcgcatgttagcctccccgaggggtcgcgagagccggcagcggggtgagctcaggtgcccgccggcaggagctggggagggaaggggagtgctggacaccggcgcctgctgtcaagttctcgccggccggtgagagacccgctgccgccgcgcaccccgcacctcctgacccctctcccctctccgcctcggccccttcccggtcacctagcgttgttttggcgctttggcgcttgcggtctcttccttcttccaccgctactcctcagcgaggaattattagccaagttttctcacccagcttccaaaaatcagattccgtatttgtgaacaagcttttcttgacactacccgtatacccgtatttccagcatcgtcgttttattaaacatccataaaagctgccccttagatgcattcatttcccacgacacctgcttgcttgtcatttgtccttctgacatctgctgttgttcacccctttaatctattattaaatgacaactattattttaattcttctggtctcattgatatccggatctgtgaatttgggttggtggagtttttaattaatgtacccgttgaatcatgagcttaaaataatcattgctgctcctgagcagttttgaataatatcatgctctctctgcttgcaagacttaaaaaaattcgctggtgttatatttgatttccatatcaatggaattcccaaatatttttgaaaatacaaaattcagtctttcagtccatgttttgttactcagatcattttactgataagtctttaacgcagcttatagaacatatttagaaggtttggaaatttcctggacaggatttgaaattgcctgtatcatctgaagctggttctgtagaagcattttggttttgattgtagatgcagccagtgaatgataacaataagttaaaactgtagttaaatttgttctttattcaaccctctgaagaacgaacagatctggtagaaaagcactaacctgggagttaggagctggacatcctggttctagtttaggcttgggctctcatggccgttccagtcggggcaagttattaaagatttctaggttgtgtttgcctctgatggaaagtaagacggttgaactaggtgatctcaaaggttcctctcttttgaagttctgtaagtctctaaatatttaatacatttgaattcaggttggtatttacctcctggcacctccagaatatctgagctgaagccctattttcataagaaagttaagcagatcaacagatggtgttttgaagaatccatttcaaatgatttataaaatgatgactacttacgagtttgtctgctatttgcagaagaggtttgcatgccacagggcaggaaaaggaagtggccatgttttcagatttatcccttcacaccaacaatctctgtggaatttatatgctaaaagatggagaagcaccatagaaagatttggctgtattaacaaaactgcatatgaaaaggtaaaaactagatagttaatatctctctttggtgtaagggttataatgtatctgagctttctttgtgatttcatcatcaactctcactgtggtaggaaaatcaatattaaataaacagtttcagccccgtgattacatgcagtgattttaggaagcatcatgataactaaagtaggtacttgcagggaagtaaaatatcctttctagaccttgaggtttcgttgggagctagggacacaggcatgttatccttctccacagtcttttttcattgtcaccttatcacaagactcagatttatcccaaatacccaccttgtcttttcttctccctctcatgaaataagacctgctctgactcaaccccctcagcatctcttacttcccacccaaaatgtcctgtctctatccccatcgtcccctcatctcctcccaattcagagaaagcaagtggacctctcctctgttccttttcttggcctctcaccatgggcaagtgcctgggctctggtggcagaagaatccatggctcaggtttgggctttgtggtcttggatgtgtgcttgactcctctgacctcaggtttctcctcttggtgtaatggcagtgcctgcctcgtggagtctgtgtgaggattaagggagatggtgcatgtaaaaggcctggcacacaggaagcctttcctttgtgccagctgccattccttctcacctctacccgggtcctatcactagaatattatttgtgctgtttgtccttagtctcccctgccccaccctgaaaaccttaggcttgacttaggagaggaaggatggaagaggcagagtcagacttgtggtgagcctgctgtgtaccaggcaatttacatgtgtctttacttggtaccctgggttcgtaagcctctctttcctccctcctgccagcctcccccactctcccatctcctgctccattcttagtacctgccctctggcttctctcgctaccacctttctttatatttcttctcaaagttttctccaaaactttgtcgtgagttcctggggcccatctgcccatccttattcctgagtggttgttcttggcccctttgcagtatttcttttatttttttaaacatggtctcagtcttgcctggttggagtgcagtggtgcaatcgtggctcactgcagcctcccaagtctcaggtaatcctcctgcctcagcctccagagtagctgagcctacagacacgtgccatcacacctggctcatttttgtatttttattagagatggagttttgccatgttgcccaggctggtctcaaactcctgggctcaagtgacccacctgcactggcctcccaaagtgctgggattacaggcgtgagtcactgtgctcagcccctttgaagcttttacctcacttgttttttgtcctttgaaatcctttcctctctcagcctttgggtcatgctggtttcttgattctcttcctgcacccctgtaaagataaatgtctgtcctagcttctgctattcacactgtccgtggcctggggtcccctctctagccctgacctgtctctcctgtgttctgctagcaggtccgttgtggacatgaatggcagcctgtaatctgcatttgtggtctcggagttacaggtttgcagactgcttgcaagcactgtcacattgagtcctcatgacacactggagcctacatcccttcattccccaggctgtcctaaaaggcagtttggttgggtagtttagcatacagactctggagccagatttcacatcctaagtattccctactggcttcgtgacttgtggtcaattttcttttgctctctatgccttggtgtcctcatctataaaactgggatcatagtagcccctacatcagagagttgaggtgtggattaaatgagttaaagcattggaaaaagtgtgccagtctattcatggcacattgcaaacactcagtgaatgttgctgtcagtcttgctgctcttcgttgccttgccggggtgccttggcctggtttgtagtggtctccacattcagcctgcctgtctgccagaccttgccatgtgcctggacactgtagtcaagctgaggggctgtccattccctgtaccagcccttggcccagtccatccctcaattttcacgtgtccaaatcctcctctgcttttaggacccagggccttggtcctgcagcactatttcttcattttgttttccttcctccccacacctggcagcaatgtccacattgatttttctccaattctcttaggttctgctgcattccatattgtgttgggctgtctctgaaaatatctcacctgctcgctcagcctgagcattctgggagaagtttatcttgctttttccaaaatgacaggcacagggagcctttaggccatggttgtccaatgcacattgatcttgtggaggaggagatgggatggggtgggcactcagggacggagcaggtggagggaacaggatgcacactgcatagaggtgggggtgcaacagggccataagtggacatggccgtaagtacttaggtctgcatggaaggagggtttgaattggggacttaacctcagggggagataagattggataaggtttagtcatctttgctgcaggggaacgttgagtactggcatgtaatggagagtggtttttaccttagtatgtgctgtccttttaaatagtgtaaactaattctttatctagcctggttaaagaaggggatggctggtctgcctaatttaatatttggctattgctctacccactgggttttgtgcatatactgaatgaagcattggcttgtatttattccttcaatcactgtttgaaatgtctgacctgggcaagttaattagcttctctgagtgcaaaataggaataataattattacgataatagcagctaacatttattgaacactttctatgtgccagcacatatgtgagtcacctttgcttattaactcatttaaaccccataacaactacatgaggcaggtactattatccttacttcacaaatgaggtggttttataaactgcccaaggtcactcagctgttatggcttggggcagaatttgtgctggtgaactccagagtctgccctgtaacaccctagtagattcctactgggaggaaacaccccgttatatcccttacctcactcagccgcaccatgccaggagcctagtaggctgacagcaattgggaaccagtcttattgttgacaaacatggtatgagcctcttttagagcggagctgcctgaaaccctccgcataagggatgcggacctggatgctacctgagcagcagctccaggggcttgtgaacattctcctcacatcctgttatgcatggctgtctctctggcctccccctgctttctctgcagcattgctctgacccaggccccctgtggctcagccagctcctccccaggcagctccttgtgtgagatgaaccttttaacataactcactaaccccacctcccaccctcatctagccatctgcagagctcctcactggggaggggaccttttcaaaggtccctcaccttcgtccttttctccctgaagaccaacgtccacaactttggtatatccacagtgttggggtgtgtgtgtgtgtgtgtgtgtgtgtgtgtgtgtatatatatgtgtgtgtgtatatatatatatatgtgtatatatatatatgtgtgtatatatatatatgtgtatatatatatatgtgtgtatatatatatgtgtatatatatatatatgtgtgtgtatatatatatatatatatatatatatatatatttttttttttaatgccagttgttccccaaatacatttagatagtaagggacacattgttttatgtcaagaacctgttacataaaaatgtgttatataatgttcaaatatatactgcacagtgaaattagataccactttttttttttcaaagaataaaaggataataaacacaggccgtcctgaatataattaacctcagatttgggaggcatggaaggacgtgccctgccctcagagctctcgtcctgagctctgcctttcttgagtgcgccgggagcaggatggatgggaagttggcctgaatctgccatggtgtggtactgtgagatgctctggaaattgtcttttttttttggcggggggtgggggatgccttcgcatcttgctcacttgtatctttctcacacctaagcagagggaagaagctctttttgccccctcgtacttagaccacccaggtcatcttttgaccagttttctgctctgctcaactcctttcaatcttcccagatgacaggccagctttgcctgctaagaacagccctggtgccagtggcatgcaggtggcacccctgtgtccagtcttccaggctctccagggtctggtcctgttcctcctccccagccctgcttccccgctcaacctccattcccagccacagccctgtgcccgaggttcagtcctccttgcctctccgctgtcctccctaggccacctcacttcacactctccctctggctagcggggtctttgcttaaattgttcccttgaggcctctcttccttgcccgtgcctgccttggatctcacttctctgtgaggtacctctgataacatttgttccctttgtgtgtgctctcccttttgctcttgattgccaaccattcattcgttcagaagcaggggtatgtcataatgagcaaattaccatatcatactgaatcaggatggccagttgtctcattttttaattgtttcatggttaattatcttacgctcacttcccactctccagtttcactcagttactccgtcagtgaagtttattggatgcctagcactgttgtgggcactgaggatacagcagtgaacaaaacaaggggcccgcaggaggggacagatgatgaatagtgaaacacgttcatgccttgttgtgagaagtgctaggagtgctaggatagcaagcaaatagagtaaagcagtagcgatgaggtatggtgggagggagggtaccttatctagatcacaggggagacctctctgaggaggtgacatttgaacttagcttcagaaagatctgggggaaagtatcccaggaagagagaacagcacatgtaaaggccctggggttgaaaggtgcttgatatttttgaggaaagtaaaggctagtgtgactcgattatgagctgcttgtgtacagatgttttctgcctcttttatactccctttaaccctgagcccagtgttaggaaggccttgtaaatacttacatacagaattatagcatttgtcattggttatatattataaaatagtaattttataaaataataatttatcataccctgcttagaaggcttttaataaaacattatattgcatataaacaaattaagggtttgaagggttttcttataaatgcactcctagcatgtttcaccaaatattactgttttaattgtgtttagtgcagaactttagacctcataattctgcttcatgtgcacaaccatcttaaaaacaggttttgttccaaaagtttatttgtaaggcactaggtggaaacttgggataaatttttctataagaaacaatgaagtaaatagtgatgtagtttctaggcgagccctcaaaagctatttagtggtgactgtagctgaaaacatactggttggtatcagcagtcgtcaagccttctgctggtagaccctcctctcagtagcattgtacctcatttgctgttagcaatcataggacccatttacctcagtcacttctcctactgtattttcagtctgttaaagttttatagaagggattttttacctttatacctttaagatttggttgcatgtgttataaatgagacagtagtgcagagagtggggaaaactctggactgggagctgggagaggcctgggctccagactgggcccagccactgactggctgagtaaatttgagtaagttatcctctttgaactttgatttctcaggttcttcttggctgtaaaatcctattgttttctcaccatagcagggaaacgtagatatacttcgttgttcaaacctgccctcaaatggctgcctctgatttcttcttgaagaagtatatggcactcagcaatgaggaactcaagcagttccccatgtgcagagctctgcagtgacattctcagtaggaaccttgattttgatctgctatctttcttgatgagttgaaagaaattttgtcccagaacttttggtccagataagatttctgtgttcttggccaacttatcttccatataattatgtaaattgttttttctttttaactcttagggataaaaatggtgactctggcttgcctgcttataaaatatagttataagtgcccttagggaatggaatgagtttgcaggagagagcagagctgaaagagtgtgggatcaaaaacaactttaaatgttaaatgcaaagctattttcagtaccctgctggaagaaaaaatttttttcaaggttttagaggatagaagaggtttttgctccaaagaagaaaggaacctaaggttttgcagtggtgaaaagtacctgatcctttaaccaactaccaccctcccttcccacctctgagttttgttttcgacatcatgaaccacatttgccatttgagaggtttgatatttaagtgacgttagtggcagagctcaactggcagtgttcaaatgacttaggtgcagagtgctgtgctgcaaacttccccagtgcattctagggtaagggatgcctcatagagagtgacagagcacttttagctctgcctctatttggtcagttgtgaatggtgtgttcctttttttccttacttgaaggcatagcgaggagttggtacaagaagttattgcttcatggacttcactttggagctagagggtggcattagacctagcctgccttcttggatgctggaataccagtggcaatgtcatctcttgttctctgctatacccctagcaatgaaaacagtgtctgtacagaaaagtctctcaataaatacttgtttattccttcaaaaagtgaattcagctttggataaatttttaatttcctccactctctagcagtataggcttatgaggttggtcttgcaaggtactttggagtttaggttgccatttctttttgacatctgtgtttttcttattcttcaggttggtcaggtatcagtgtcttttactgatgatggttgtccctgccctgctgatgttcatcttctgttatctttaattggctccaaactgcagcaaatctatagctgagccacattaactaaaagaaaacttgttgcatatttatttaggcatagtactacacatgtatttattcagtcaacaaatatctgtgagtctatatgccaagaatgttactagacccaaaggaagagcagaaattgttgttgtgaccaaggagcctgcagtttgattgccttgtggaacatctttatgagcattgtagaagggaggaggcttcatagaactggtcaggttttcacctttaaggatggtaggatttcgattcacagacaaggtgaggacaggtatttccaggaagtggctgagcggaaacagcataattaaaaacacagaagtaggaatggaccagtttgcattcatggacacagacttgtctaaaatggaaggttcttaaataatggtgggaatttaagtatggaagatcactgaaggcccaaacctgaagccattttagacacctagtgacttgcctaaagtgacagctgataagtggtagatccaggcttaaaataaggccatgggagctctcgaccactggcactggacttggctgtttcccagcagtctctagatgcaggatttgggtttgattggggattttcttttttctttctttctttctttctttttttttcttttttttttttttgtgatggacactgagattgggggttttagagtcatgagctggaaataggcaaggctctatttagcccactctttcattttgcagttggggaaactcagtgaggttaagtggcaagtcggagtttacctagtgagtcagagactgctaggcaatggataaccactggatttgttttattatgattatgattttagtgacatgaaatatttctctctaaagcatcagtccagtgttagtgttccagttggattggagcaatgaaggactaaatgcagcagagacctgacaggaggctgctagatgaatccaggaaggagagagagaagccagaactgagaattaattgtcaattatgttaatcagcatggtgttatcagtcaccctttagatttctagagtgcggtgaacatctgcctgtgtgagtggctttcaagtgtgtgaatctgcactgtactgtgaccaagataccttaatgaattctccagacagaaagtgccactatggaagtcgaatgttttaaaacaaatgcccacattttctggaaagagcaccagattaggagtcagatgacctgcattttaggctgcttctgctgcttagtcaccatatagccaaagcaaatcacttaatgtctcaaactgagcctgactccttatctgtggaacaggtataacaattcctgttgagcccttttcagtgtatgtgtgatgcttgtgtgagctaaggaaagaataggcattttgaagctgtaaagttgctttctggctgcagggagcagcagtgcagttttaatagtgaagatgtactggcccttacaggaatagcctaggagaaccagaagaaagttcccctacctccagggcatgtttagggaatctggcgctgtccaccaggtgggtgctgatgtgtactactttattggatagggccatgttttttgtttatttgtttgtttttattatactttaagttctagggtacatgtgcacaacacacaggtttgttacataggtatacatgtgccatgttggtttgctgcacccattaactcatcatttacattaggtatatctcctaatgctatccctctcccagccccccagcccctgacaggccccggagtgtgatgttccccgccccgtgtccaagtgttctcattgttcagttcccacctataagtgagaacatgcggtgtttggttttctgtccttgtgatagtttgctcagaatgatggtttctagcttcatccatgtccctgcaaagaacatgaactcatccttttttatggctgcatagtattccatggtacatgtgtgccacattttcttaatccagtctgtcattgatggacatttgggttggttccaagtctttgctattgtgaatagtgccacaataaacatacatatgcatgtgtctttatagtagcatgatttataatcctttgggtatatacccagtaatgggatcactgggtcaaatgatatttctagttctagatccttgaggaatctccacactgtattccacaatgattgaactagtttacactcccaccaacagtgtaaaagcattcctatttctccacatcctctccagcatctgttgtttcctgactttttaatgatcaccattctaactggtgtgagatggtatctcattttggttttgatttgcatttctctgatgaccagtgatgatgagcatttttttcatgtgtctgttggctgcataaatgtcttcttttgagaaatgtctgttcatatcctttgggatagggccatgttttaaagatgattacatttcacccccgtaagcctgggcatggacggaaaagttaggcatggatagccatgtgaatctattatctgtagacacctttcaggatagtgacaggcagctgtgaaccagaaaaacaagtgtcagaatctagccagctggccagtctggcattcttggatgtttcatctgtcctggggcattaggcagcgatccagaggaaccttgattagcctgggggattcatggctgagccagcatgctgtccaggtaatacctggctgcaaagcctgactggagatctgccaaatctaaatttctgccagcattacaagtgtatatattattattattattattattattattattattaatagcagtatctaaccttgactacctaccatatgccagcaactgtgctaagtgcttacatactttttctcattcagtcttcacagtattcatataaggtgggtaatgtcagttctgttttctagttagagagactgaaactcagacgagcttcagctgatacatactaagtgtaaaagccatgattcaaactcagaacagtctcagtccagtgcccagctgcataactgctatgttcttctttctctcttttcctggtacctgaaaatacttcttgtctctggttttgaggtttctgactgtgttattggttgatggatgggttgccacacagaggctcagctcagcacagctcttttttcttcatagcttatgacggacatcctcctggatactctggctggtgagcaaatgggtgccagtggtgaatgcagcagaaagactaactcttgccagctagtgcatgtgggtgaattttaaagacaacaaaagaaatttctgtaggtcagtttttcaaagagtaactggtagcttgtagtctacttaaaggccaagtttgatgttcatcaaagtcaccctgtaaaaacctttccaaatgctgtgattctgataacaataccatagaacattcctgtgtaattgacaagtagtttttacatacaatgtcttgtttagtcatcatcacaaccctatgagggtttgcaactacatatagttgcaaagaagactgggagatatctttagttgggaagccatgagtctagcaaaatctctgtttttaagggtggcgaggggagtgaatgaggggagctagcaatctgatgtgttgtggtggtgatggaagggataagtagagtttgaagctgttgtcagtagagttgggaggatgcctcctagtctatgacatctcctagtgttatgacatctcctcttgtggactgggaaattgcttagagtttaagcaactgtccagggttctacaactggtcagcggcagaggcagcacttaagtattgcttttgtgacttaattcactctctattcaagtttcatctttgctttctctattgaagttcttaaatattctgattcactgtatttagaagtcggcaggaattattaaagtgaacttctttgtggtatacactgttactgaatcagagtaaataaaaggtcacatgattggttgttgtgttaggtttaattgacgtgtactctgtatgatacagaatactcacatatcttttgtgggatatcattggtccaacagctttaaaaatcccaaggctttaatagatgataaaacacggagtttgtgtaatttcttgaaaaagttggccatcgagttcttggtcaggaacacaagcttcaattgtaacagtttccatggagacattagccttggcttgcatcatttcagctttcagtgcctttcctaggaatggagtgaactgctaaaagaagagctctggttgtggttgtcacttagagctctctcccctactgtttctgctggaggctgatttgcttttctgggtcttctcagttttttctgtgacctaagcataaattgtctttgagatcctggtaatctcatattttaaaagttttccacaaaagacaactgaatggaacacttttttttttcacccctttaaagtatttaattggccatcaacggtggctcacgcctgtaatcccagcactttgggaggtcgaggcaggcagatcacgaggtcaggagatcgagaccatcctgctagcacggtgaaaccccgtctctactaaaaatacaaaaaaaaaattacctgggcgtagtggcgggcgcctgtaatcccagctcctcgggaggctgaggcaggagaatggcgtgaacctggggggcggagcttgcagtgagccgagatcgcgccactgcactccagcctgggcgacagagcgagactccatctcaaaaaaaaaaaaataaaataaaatgaaaaataaagtatttaattggtggcaaggggctttgctagaagaatggacacctggtctcactcaagcttcttgtattagttgggataccaggtgagtccctctgttaaagagacccacaggcacaatggctgaaaccaggtagaagttttctctctcatgtactagtccctagtagatagtggtccaggcctagtatttttaacacatggcttccatttgatggttgaaggtaaaaacttaccatctcccagaggaaacacccaagggggcacacatccagtcatttttaagggaaagacccggaagcagcacattctctttttccagtagccggaatttgcaactacatatagttgcaaagaagactgggagatatctttagttgggaagcaatgagtctagcaaaatctctgtttttaagggtggcaaggggactgaatgaggaaagctagcggtctgctgtgttgtggtggcgatggaagggataagtagagtttgaagctgttgtcagtagagttgggaagatgcctgagtcaagggtgagaatctaagcaggcacacagaaaccagggcatgtgcagccatctagaggtcagggaagctcttggctctgaaactaagcagtggggggcacccaggcatggaagggaatgtgaattactcagaagacattaggttgtcagtaaaaggaaattcaccagtgtgactgaatcagtagaaagagcacttagactaggagtcagaagacctaggtttgagtccagcccttttacttcataacctggggcaaaaaactcccataaatatttgctttattatttagataatggcaataacagtgatggcctttcctgcctcccaggcttagtgtgagaccaaagggtgaggaagtactgtgtagactgcagccccatggagatgtgcacagtgtctgcccagcccagggcctgccatgggtgtatttgttgaatgaagtgtgaactattaaaagagttgggaaaaatgcattatactaaggagatcttaatcctggacagtcttctctaccaggcagaaaggttctgctctccactggtcaaggccttgggcctatgtgtaaaactgggtacctaacaaacacatgggcagacgcctgcagctccttactgggtagcacatgacacatagtatgtccttggcaaggccatttgctcattcctctgtgtaggtaaccaagtgcaacagaagtggaggtatagcccatgaatgtgaactaatcatttttaaatgatttggtccatgggcaggttagaagatgaaaccttcccaaggccaccaaaacttgatttcttgcttgaaaatgataagatgcagttataaaatgcttctgttgatttggaaaaaatgtgtgacttgttcaaaacaatatgtattaatagaaaatgtaacataaataagaggatacaaaaaagagcttaatgtttctatcttctgggcctagcaatagtgatttttttttccttttggtaggaaaatgggggctcagtggaataatcagttttatttctttttcttttaacttcatgaagggtttgtattgttcattttgttatttaatttgttcatttgctaaggaaagaacttctttcttggaactctgcggagtgtttttagatggactttactggaaaaaaacaggaattgaaattatattcacagtgcgctctaaactcttttaaaatctcatgcatggatggaggaaaatgcactgaaatatcaatagtggttctcacctcatggaattagaggtgacttttattctcatctccttctctgtggtttcctatttttcaacgagtgtgaattacttttatcatcatgaaagaccagttaaaaattaatctcacaaattaacactctcaagccaaaccacgaatttttgtttttcacaacctggcttggactataaactgtcacactatctcagacctatgcagattcttttctgagtgaggcattgaggaacttgttataaagatgatgctttccttctggaaatcaagaaacaagccaagggcttataatgtgttaggaaagatgtcctgagtaactttcctcctggaatctgactagcctttattacagctacttaaggaaatgagttttgtgggttccctgttcactgtgtcaccatttttttctttatcctgtactcatatgtacctcagggtccccagattttcttatcctgggattgcatgaccttgtccttggctctctcgggcccctgccgtttccagtgttctctgttcatgttcacaatattgttgatttggctgtggcttcttcccgcagtgttcttgtagactgaagagagcacattgctgcccttgtccctgtgcagcttcctcttcctctttatcattgctcaggtgagtggcctgagcagtgctcctgggatgaggtgaagagaagcagtcaagactgcagggaagggctaggggtgctgagctggccgagcttccctgggggaaggcactgggccatctgtccagcagcagttggcccacagctggcagggcaggctcaggagtggctcttgaagatggctgcttggtgtttgaagacagttcccagggcatgcattcatttgttgagcaccttcaatctggcagcctgtgttctagatgctggctgatgaccaaggctgacatggctttggctgtcatgggagtttcattctagtggtagagggagagagagagagacgatgtggtagagggagagagagagagacgattagcaggggaatcaatgaagaagataattacaggttgtaagaacagccccagaggaggttacaggtgcctgtttgtcgagaagtgggagggccagagttgggataggaacctatgtccctgattgcaaggtctggctccttctgtgtcctctgggctttctggtgggaagggaggaggtggaggagaccccttgcgagggccgagcttctcccattcagccagtctggaccagcctggggccttcagatggagatagcaaaagttgagggcataagctagggactggctctcttggtcactccagttgcccatctctgtacttccccaggtgaatagccatgttttttaaagaacacggagcaaatttgcatacaagagtccagatttatgcatgctgcagctttgtctgaaggcaagcttatattttctctcctattattttcaacttttaatgagttaccagcatctcagtgcccctccagcaaggatattgggctggtgttttcagggaacaattttaattaactcctccttgcctccctctcacccagccacccccagtccccttcctggtggctcagagtctggctttggcatgcaataagaatatttttgccttggtgttagcctttctgaaactcttgattaccagtgctcacaggacctttctgcagcactgtctgcttggctgtggactacccagaggagcttggtgtcaggcaaacttaggcgatttccctgagcatccttgttgagtctgcctttgtacttctttgtcaggtctagaggcttggccgtttgtcctgctcttttgtcccctccttctgggaaccctcaggaccctcactccatggagactcagcacccttcctcctgcaaacatcagtgatggggctttcccagccctttcccctatcttccttttcaaagaacaaagcctttgaagcttgtctcatacctgtctgatgcagtatgggaatctgtaagttctttgcctcctgaaggggtctggggaatcacttggctttcagagctttcctcgctcctctcccacccacagaccgattttaaccagagagtaagtcattcatgctgtgcttgaatactccttccagtcccactaggaagactctttgttactaaattctgttttcttgggaaaggggagcttattactatctcattttgttggttgttattaccctcctttaaaaatgtatctacatacacgcatgtgtgtacctacatgtttctatatttcccttgtgaatgtggccctcagagggcctggatttaaaccctgggagtggtagtgaccctttgggaaatgtatactttttgttccaaatcttctctggcttaaatttgtgaagttttgtttcagccttggtttcatagtttttcccagtttccaagataagtttggggctcactgtaatcagcatgtaaaggagaatatggccatcagctctgccccttaaattcatagtcagactcagtggggaagccgttcctgtcccatcttgcgctcgtggctctgtcagcctcaggcagctcctgcaccgtcctcctgcctgtgacagtgttgtcaggagttcttggtacctgggtgctgcttggcctcagggtgccagggctcccatgtggagtgtgcttgctgcagtctctacagcccaggtgtctctgcagccctcctcttacatagccacagcgtggtaaagtacatccagtttgcgctgtagtaagcaattttattaaaaaaataagtttaatatgtaagtggtcccttagttcgtttgaatggctcccctctctggctttggtttgaatgagctacacctggctggagccctgctgctcccctcagcatggagtcacctccctgtgctatggaggaaaggaagaagttattcttaccttggttttgagacaagacaagcctggagaaggctgtagggatgaaggagttgcccatttgtccagcatcagttgagagtctactgtgtgcctggcatcataggaagcctctggagtgctgtgagcaagaaaataatacttgatttatgtttttaagggttcttctcgctgcctgtgggccggcagtgaggaggacaagagcgcagcagggagatgggttaggaggcagttgctccggtgcagggagcagtgccagcttgagggctgctggtgggtattggtgtgagggtgggcaggctgcagataggccttcgcccattgcccttgccatgtgtccccatgtgtccccaggggaggctctgggcatcccaaactgtgagcctgccctttcccaagtgtgctaggccctgccaagctcctgcttcatggcctatgctgttcattccatctggaatgctctcttccccctgctttccatcctagctgagtgacattgggcaagtgaccagatctctcttgagcctcaatctcttattctgtgaaagagtgctcatggaacctactgcatgggaccatgaggataagactatagttgagtgtggtgattgcagtagcctccaaagctgtctcctgcttccaatttcatcccgctactgtgcattctttacacagcgatcctgtgaccgagggtcagatcagggcaggcctctgctcagaatcctctccacagtagcttcctgtcccagtcagaggaaaagccaaatcttagcatggccctcagagcttcctggtacttctgacctcatctcccaccccaaggccatggtgtatggttgatcatgctgggttctgcacagctcattgtggtgcatgtaagtggcactcacttcctccccaacttatgcattgcacaacttgtgcagctgtacatgctgctcctacctgcgcctctctagctccactccagccacagtggaatccgtgttgttcttcaaacacaccaggcatgcttcctgtttaagctctccctactgcctgctcccttggcctggaccattcttcccccagaggtgtgtatggctagttagctcaccttcttcaggtcttttttcaaatgtcaccctatttaaaattgttccatctgggtcactgccccccaaatgttccctttttcccttgctctttatttttcctcctagcacttatcaccatctaatatattatacgttttccttatttatttggtttatttttatttatttatttatttctcaacagaacataagcttgatgcaggcaggcaccagtgttaattttgttcactgctgtatccccagtgcctggattggtgcctggcagtaggggttcagtgatgcatgagtgaatgagtttggatgcacaaaggtaaagtattgggtacggtgcttagcacactggaagcacctaatacatggatgccagtattttcattgtctctgttaactctccaggccctggctcaaatgtggctttctctgagcctttctgcagtcccttctcaggctgaattaagtcaccaccacctgtgctctgtgttccccttcattttgccttctctgtctgctcggcatttatcacactgcagtagtgggcttatctcacactttttcctgttccaattgcaattcctgtggggcaaagactggcctgttcagatttgtatctcaggcggtctgcgcccccagctggcatgtggtaggagcttaggaagtgcttgctgctggtggctgtgggaggtggaaagagctttttaatccatcaggacccttacaagggggactggctccagcatcactgccgtctgatgtttgtgccccctcccaaggggtgtcaagggagagcttggcaaccacttaaatgagagtctccagtggtatatttagagcaaattttggagagaggagtctcttggataacagcatctgggtgacctgattgtttcacatataagagtttggctttttggctactcaggctttgagaggttggggtcattcaagggaggcagtgtaatacccatgtgttcagaggtggctgggacgagagggtgcaggagaaaaggcttgagctggcctgtaagggatctgagttggtgaagggagcacagcttctgggggtggcagaaggaataggagagctgcccctgccatacctggggaggggtggttaggtaggtgccttgggaggcatggttaggtaggtggtttggggccatggggggaaaactgtaatgccagggcaattactttggcctcttgtatttggcaggaggggtccacactggggattgtggtggcgtgagggagagggccctgggagagaagctctagagtcattttcttttccagaggtggagttgtcttggggacctgcacgtggcacgcagagcccatgctctcaggcacctttggggtggcagagtttcaactgaaccaacagaggacaaggggctgagaagtcggaggccttggctgaggtgcccagtttcttggttcactttctttacctgccaggttagcagcaagtgagcaaatccctcctgcctttgctcagcattagcctcagagacttgaggagagctgggccttcaggtgggagcctggtggccacactggagaggaccaagcttgacattgagtgtccgaggggctgaaagttgttcgctcatccagagatggattcgttctgcaaacatagggaaagttcccttcccattcctcatggctgtttgaggatggaattcctgcattgaccttggcctttccctgatcttggcctttcccctgcactatggcctctctactcttaacattacgccccagcccttttccatgggcccctcgtcttccctatggccatctaaaatggccgtataatattctatcaagggaatgttttcagtaagccatgagcttgatatggagcatttagattgcttctaatttttgctctttcagctaatgctacattaagccatctctgtgtattatggaatcatttcattagttggcatttgtctagctaatggcaatggcccaagatttaatagcgaatcagaatttcttttttcaagaagaatgtcatgaggatatataaaaaatttacttaaaatgctaggaatcatctatgttggggttttcatgaatgaggaagcagggaaacagtaacatgaaattagttgtaagtgaaagactgtgtgtataaaagtaactcgtgacttgtttgttcctgagtgtggaggggagccaataaatccttggaaggagcaatctacctgtgaaaatcaaagagatctgtattcctgcatctgatgaaaacataacaaacagtgatctcttcttaaggatatttttagaaatgccctaaaacaagaaaaagtaaataagatttccgagaaaaaacatgtctccttaattccaaatgagcctctctggaaatgccatttagtagtggaagcaggttgtagacttgctgaaaggatttggttctttggttattaggaaataactagaatgaaattgacaaacagacaacactgacttggtccccagtactgctttgagcctgaggtatgtgttggctttggaatgatggggaaggcttcctctgacttgctgatttgttgtagttgttgttgttattgttttgagatggagtctcgttctgtcaccaggctggagtgcagtggcgtgatcttggctcactgcaacttctgactacctgattcaagcgattctcctacctctgcctcccgagaggtgggattataggcacgtgccaccacacccagttaatttttgtattttcagtagaaatggggtttcaccatgttggccaggatggtctcaatctcctgacctcatgatctacctgcctcggcctcccaaagtgttgggattacaggcatgagccactgcgcctggtctgttgttgtttttattgtttcagtctctggtggcttattatgtagacttgggctgtaagctttgcatttcagtttaaaccagcaaatgtttacactatataaggttgcaagggctaaaactttagggagaaagaacccagtgcacccctgtttctgagaagctcatgaccagggagtgggaaggataaagcaatgttaaaaccaatggttattcaagggagattaagaagggggccctgggagagtcagctccatccttttagagaagggaggagttctacctcactgctgggcagggtggggctaaggggcaggagaatcaagaaaggttttatggaactagttgcatttgtcaacatcttgaaggacaggctgaaatggaggctggacattctcagcaaaggtaaaaggcctgagtagaggagatggagatggaaggacatggggcaatgtttgggatttggctgaagaattgcatgcctgtagtaatggtcatagtagcactttatggagagtatcaggtgccaggcatggttctaagagctttatatgtagtaactcacttaatccatgcaatgaaccaaatgaggtactgttattatccccattttacagatgaggaagctaagataaatagcaaggaattaattgcccaggatcacactgctgtggagccaagatcagaccaagttcatctggctccaggctctgtgcttacgaccatgaagctgtcctgtctctgatttggggaaagaacagtcactagaatcagacagatggacagatgccgtatgtttagaggctgggattatcaacattcaggaatgcagaggtggaaaagagaccagagatggagatgaggggcattggagaggtggggatgggaggagggtttggtgagagccgtgaagggccacaggaagacagagctttaaggagaagtttgtcagtgaggcccagagctgcagacaatcccaggaggtgagacctgaggaataggtctgggctgaggagaaagctgtgagggcctcgggagaggggcagcagggtgacccaggctggagctgctgtggtgtcctatcctggctgcagagtgctgcgtgttcctgggggatcatagctgttgatgagtatcactgtccctgtcctcttatctgtagaaagaggtgagtgtgacagagggggcaggtgagagctggcactgctaatttggcaaacctggtgacttttctgcagcctaatgatttttgaaagctgtttgctatgctgaggcacaagtgtgacttcccccatctaaatgctgtgcaatcgctattttccctggaaaattgggcccatgtgggctctgtgtgtggtttatttgagttccatttttatagccttattaccttgtccccatgatgcaagaggcctctctcttttcttgagctttgctgtgaaaattgtttcttaaaaggcacaaagtgatctctcgtcatctgggtggtgctcgctccacaagcagcacttttctcagactccgcacacacttgtcatcgcccctgcccccacttggcaggttcctctgattgttggcaatttactgagaacttttaggcagctcttgaagctcactacctatgtgtttgtcttgatttcttccggaagagtttgtgcatgtaaatatccattcagcctctttctctccgagatgttgccctgccactgaccgtgcttggggctgaaacccagtcttgtcctctggcctcgagctgattaacaatagcagtcatcatgtacagagcctgagtggttatcaggcactaagctaagggatttacgttcgtgatcttaattattcccaatttctttgaggtaggtactattacttcccccattttacagataaagaaaatgagccttcaagggatagagtaagttaccccaggttacatagctagtacatggcagagctgggcttaagcgggcctttctaaccttagactccatgtgctccattcattcattcattggcaacaaatgattgtctgcaacaggctgagaactgttgtagacccagggtgtacagcaaagggaaaaaaggccaaactcccaccttcagcttatattctaacttggggaggtagagatcatataataaatgacatatacattatgctatgtggtaatgagaactatggagaaaaatgaagcaaggaggtcagatgggaagtgggaggattttgaggagtggtcaaagaaggcctcattgagagtacaacaaattgttaggttaacaaacaaacccccaaatctcagtgtagcaacacaacaaaactgcacttctctgcagaaaaaattccaaagtggctgctcctggttagcaggcagccttccttgcagtcatccagggacctagactccttttatcctgtgtctctgccttcttcaagggccttggtttcctttgcattcaaatgctggagcgtgaggaagaagaagagagggtagtttgtgaggaaggctttatggaccagtctggaggaagcatacctccctcccacccactggccagaattcagtcacatgttcactcctgactgcaagggaggctgggaaaggaagtctggccatgtgccgcctaaaaaaaggaagtgggttctggtgaactcatggcatggtgtgttgcagcgagtgaggtgaagaagtgagctatgtgtttagctggaggaagagcattttacacaaaaggagcagcaagacaaaggctgctggaatggagtggggaggagagaaggagagtgggagaagatgagggcatggagttgtgggggccaggccactggggtcactgtaaggatttggttgccttgggaatgacaagcagagccagaacatagagttttgaaggaggaacgacaggatctgaggcacgtctcacagggctcactctggctgctgtgttgagagtggactgagggagcaagggggatgcaggggagaagcgggcgtttgcgggtgttatccaggtatgtgaccagaagggctggccctgagccggggtggtagaggtggggagaagccgttagatttgagatcagttctgaaggtgggccagcaacttttgctgtgggattggtagtggggcatgagagaaagaaaggagtcaagattattctgaggttttggctttgcctaatgagtattagtctcacttcctaccctcagaagcaagaggggaaattttttggaaaaggatatctgagtgttctctgggccctgacctgtcctccataacctctttcactctgtgatacttttttcagcacagatgggcaattcccattcatgactaggctttcagacatggagagggcacttggagtccctcctggcacacagcagaggtgaggcagcactgggaattgtctcactttggggtctttgggtcaaaccttgggacccctttagagtgacatggcagggactgagtgtgccctctaggggggtgagatatgcctactggagtccacttccaatgcctgccatctgcaaacactggtgaggccctggctgaagggtaacaacccacaaaagtgcacaaaaggaggaagttctggaatgcgagttgatgctgccagcggtccggttggctccttgccttctgttctttgtgtgttgacatcagacctctctactgcagacaggctgccctacctgagggggcacagctgccagcagcctcagtttacaatcctagcaaaggaggagagcctttctctacatctaggtatcagtttaagggaaaagcctctgtgtttgagagtgggagcggaaactgtttcccacgtacttccttggcagtcatgacctgtcaaggctgaaactggagatgggactttttaatagaccatgatctcactgggagcatatggggaagaaagttcatcttagagatggcagggcgtgagctgtgaaaacagatagtgcacacctactagatgctgggcccccgctaggtattttatttcactggagagcaaaacaatatatcatccctgccctcatggcacagatggcctcaagtggctaaaccatagaatggctagctgagagaaatgatagttctttctttttttctttactgattgcgaatggggttgtatttttaattttggtatccatgtgttcattgctagtatatagaaatccaattgatttttttgtttttatgttgtatcttgcatgtttgctaaactcactaattagtcatagaaatttttttttgtttattccccaggattttctgcatagacaattgtatcacttgcaaatagggattgtttcatttcatcttttccaatctgtatgttttttatttctttttgttgcctgattgtgtggccaggacttctagtcctatgttgaacaagagtgctgggagtgcacatccttgccttgttcctagtcttggggaaagcatcagcctgtcaccattaagtgtaaggtcagctgtggatttgttgtagatgccacttgcactttgctggcatggttgtgagtaggactgtgggttttgtgtgtttgtgtgtgtgtgtgatgtttggctgaaatacagtggttattatctacaagttttctgtcttgaaacagggagatttgttggggcattttctctttgtgctccttggcatttctgagttgctggtctcctcagttccaagtctgagctatatgcagaaaaggaaatgcaggaagctcaccactgtgttgttccttggatcctgaggtcccagctggtctgccttcttcagactgccatttggagtcttcttatagtcatctagcatagaatgcccaggggttttcattgttcttagcaggtggaatcagggaaagtgcacctgctccatcctgctgggagtggaaatggttgggggaaattggagcgtataggtcggggctagtttagatgcaagggctccgttctgtaggtgcaggagggccgtggaggctcagccctgacagcagtgggagggggatgggaagagggggagtggagagagcctaggtggctgctgcctgtgtccaggcaggaggtcctgaagtcctgaggtcctggccgtgacagtagaactgcagcagaaagaaggacaggaagttccatgaggacagtgaggaagtgcaaggagaccaggttggtctgaggtttctagctagagcagctagctggttctgagataacagagacagagggaggggtctaagcgtggcagaggggtgtattctaggcattgtagagcagatctggaagactggacttactgtgcttcccctcaggggaggcttcacagaggaagtctggctgctggggaaaaatccagggagtgtgcattctgggcagaggaattctggctgctgggtaaaaatccagggagtgtgcattctgggcagaggaaacaacgtgggaaaaggcacagatacagaaaacggcgtgatgggcctgttgggactccagctagctgaggcataagtgggtagttactggttccatgactgggaaggatgctgtaggagtgcacaaaaggaagaagttctggaatgcgagttgatgctgccagcggtccagttggctccttgccttctgttctttgtgtgttggcatcagacctctctactgcagacaggctgccctgcctgagggggcacagccaccagcagcctcagttttacaatcccagcgaagggggagagcctttctctacatctaggtatcagtttaagggaaaggctctgattggcccaggttggtgatgtgcctgcctttggacccgtcactgttgcaagggagtggagagttctaatctaggccggatcgtctgcccacccctgttggggcaaccagagtcttttaaaggagaaggcagacaaaatgcatctggggaagataaaaaagactgtttaccatggcttactgtaatagattttgaagaatatgtagtctggcagtgcaggaactcttcatggagattaaagcaggggacttgatcaaagttaggttttattaaaatcattctggacactgtatggggttgtgattggaagtgaatgacaagaggtgtcaaggcgggttcgtaggccactgctttagctccaaggagcactgatgaggcctaagctagcttagaatcctgacttactttgtttgcacttcacctgtagcgacagcatcagtgaggtggagaacagggatagagtcctagagatgttagacaggcaagacttggtggccagatggaggcaaggagaagggggtcttatggaggattccccactgccaccaagggcataaagaatgagtctctggagggctagccttatctttggaaacactattaagtgttggcagactcgatgtaccttattgcttcttcagaagtgttagtgttgttggcttcttgtggtatccagctggaaaaggaagctgattgattgcatttccctccctttaaagagcttccttttttgagaaatcagaagataggtgatacagtcaggactgccagtggagaaataggttggggagagggagacactggcttggagactctcctgcccccagcctgccccgaggcccgcgagtctgctttaggcacattcgtccttttggcatcatccttgctgggaaggcttttaagggatttaaggaaagaaatgacacaatctgattcatattgcaccagatttcctcctctgttcagaatagactatgggtggaggtagagtgactccaagagtagcagcagggaagcagggcaccaattaggagactgtcgcagcaatctaggatggggacggtggaggtggtgagaaatggtcacattctgaatacattttgaaggtaagaaccagttttagtgaggattagatgcggagtgggagagaaaggagatgaaaatgactccaaatttttggtctgggcagctggaagaacattgtcttaaactgaggcggacacaacgctgggaggagcacgtcaggggtctgtgttggacatgtttaagtttgagacacccaccatgtcttacacaaagctcccatctacttcttacttgacacaaacagttggatgtactggtcaggagttcagagcaggggtccaggcttggagagaaatctgagcattgttagcatggaggtgatatgtgtgaatccaggagactagttgagatcaccaagggagtgacagagaagagatgaaaacaaggactgaacacgctgacataagaggtggggagatgagggagaataagcaaagataagccagtgaggtgggcggaaaaccaggagagctagagggcatgattaactggtgtcaaagctgcaaggtaaggactgagactttaccaatggatgtagcaaaatgcaagacaggccaaatgcatatgctgttggacctaagcttaactttgcaaataagtcatagttccttcccagaaggagaatataattttgcaaaaagggatcatttaagatttattaaaataaatctgagaaagatgtgaagatagtaccgtaggaatccagcagaaggaaacagtgcttctggcttttgtggggaggattgagtcagattcattcataccttcattcatttgtgtgttcattcatttggcaaaaacttattgggtgccaggggttgcggggaggagggaagagagagttgttatctagtgggtatagagtttcatttttgcagatgaaaagagttctggagatggcttgtggtaatggttgaataagaatatgaatgtacttaataccattgaactgtacacttaaaaatggttaagactgcaaattttatgtgacatgtattttctcacaattaaaaatggagagagattaaataaaaaacagagcactttttggggccccatcatgaacttggtctgggatatgatgtttgaaatggatgcgccatctcagtagatggaggtaatgtggagaagagtggaggaagacgtccagctcagagggttttgggaactatcagtcctgtttgtctggatggtagggtctatcgggggaaaccatgcaagctgagactgcagccgggccagttggtgcaggcccagcatcctggctgtggatttgggcctgccttcttagattctgggagcctctgatggtttctgcccaggggagtgtcattccaaaggtgtgtatttagattaatttcattagtccttcctgttaaaccattgcctattaaaagcagtggggttgaggcattcatttttatggtgaaaattctggcctagcagaattttagatatccaagcatgtgtcaatgaagtgagtaggttatttttccatccattttacaagtatttattgaggatcatctaagtgcccgtagtgttctaggcagttgggggtatgggacggggtgaatttaacaggtctcttctcttaaaaagcctacagtctagagaaaccccctctccttcctaaacaagaagttatgccacaacgtgccatgtgttaccataggcatgccgccacagttccatgggtactgagaggagggggtgcctggcctgcctggaacactggggaggcttacagggaaaaactgtccaatggatttaaaggacaagcagggattttctaggcaaagaagcagaatgggcatcccaggagtatggtaaatcaaaacttattgggtgctatgaatttaaagctaaacttttatttcattggcttttaggtggtgctggctagagtgtatacgtttggacccaagcttaacttttccaatgtggaatcctgggccttcattggtaagtttgtttgatgccttcttaccaaattatgctatcaaggattggtatttggaatgaaaggcaaggtagttatcattggcaagttctctgtggaggttaccagccctggacctggagaagcctgtagcacaggctgaaggggtacataggaaaagtgaaatctcactgtaggtttctgtggtagatgcagagagggaggccagaggaggggaaccaaggggtgcgggggatggatgcagcgggccttatggagaggtggagctttggctctgttttgaagggcaagctagattgaaaaaagtccggggaggagtgaaagaagattttcgggacttgagaacatagaggtgaggtgtaaacaaagtgggcctagcagcagtcccataggagcaaaatcttcatcgaaaggagtcacgggcaagaactgtggtgggatctgctggcgtctgatgattctagtccatcagcaaactttttctgtagaggaccagatgctaaatatttttggcttcgtaggccatgtggtctctgtcacagctactccactctgctgtggtaacatgcaagcagccatagataatatggaaatgaatgggtgtggcagtgttccagtaaaactttatttacagaagcaggtggtgggctggatttggcctgcgggatgtagtttgccaactccttttctagaccctaaatgcccggctaaggcacatagactttatcctgaaggcagtgggaagccattgaagttattttggataaagaagtgaagtggcagaagtgatgtttacattttaggaacattcatctgatagctggacaagaggcatgggccccttttggaaggcagcagcagtcatccaggcatgaggtcttgcggtgaacagtagtgaaaatggaagcaaaggatcaatggaggagatactgcaaagggagaaccaatagcgttttcagtcttcttagacttaagaggcaggagtcaaagaggatgaaagtttaagcttgcttgtttacggtggtatctttgacagaaatgtagatgttgggggtggaaaggatagctgatgcatctggttttagatatgttgaattcaagataacagtggttcatccataagaaatgtccagcagagaattggaaatgcagggctgaagcctggcctgagaagattaagtctagagatgtggaatggaagccataggattaaacacggtctccccaagatgagcagtgggctgagctgtggggaatatgcgtaactgtgggacgggaagacgatggaagagacccagaggccatggaggagagtcccgggaagggaagagaatggggcagcagagaccagggagaacggacctgaagggaggctgctgaatttgtgacaaggtctttgcagatggccttgagaaatgtaatgtcacaagaggggaagggaagaggaagccaggttacatggagttggacataaatgaaggataaagaattgagatgttacaaaaatagaccgctcatagaaggtttgggtagtaaaagaagggagacacataagatttagatacttgcttgtcagaataacctttgctttagctttgaggcaggcaaagcatgctgtgaccagttttcatttccttctttggagccaagctgtgtttgggagtttgtgtgtaccttgggcttgtgattgtgttcttatgctcccttttgaggtgtggtgttcgtaactctgccacaacttgcaccacggaatccagcccgtgtttggacccttgccatgagacaagatgtgatctgttggggaagtagttgcatttgtataagttggaggagaaagtagagtggaccaaaaattgaaataaaccttcttactacagagtctatccaagtatggggacttgaggataattcctccagtcatgatttaattatgtatcaatttgtgctctgagtattttgagtgtaccttctttggtttgaattctaagtagtttttgacttggtttgtgtgaatatagcagttagagagctggtaacaaaagcaacagttgtaactggtttagagccatgatttattgaacactcattatgtactaagtccagtgctaagtgctattgtgtatcatcccatttcatctttgcaatgacctatgtggggggaattattaatagtattcttatttcagccagaaataagtcatagatgagtaactatgcaaggttacaagggatttgaacccgggtctgtataatccctggcttatgctgcttcctactttatcttgcctgtgtctggaatttttcctcctactaatgtagaaggactagagatagatcgagtccctcaggttaaatattcagaggctgtagtgggtgtttccacttcttaggagtctattgaaagggcagaagaagtgtgggaagtctggaagagactaaggccaaacctcaaacacttactttaactgtttccccagataaaatttagttgaaggcagcagccttgggcttggaaagaaaatagcgctagaaggcatgagagtcagattccagtcctagcattatgacaattataatgtcatttttgtttaaactcttggcatttctctccaattacctccagctttgagctccaaaggcaggctcctattttgtcttgtttttcactgtatccccagcatcgtagcacagaatctggcatgtagtatgttatgtactcactaattatttattgcttcgaatgcaccaagggacttggtacaagacacttagcctctcaggcactgctcttggcatcatggttatagaggtgaaacaggacaaggtctctgctgtcgtgaagcagacgtctacatgtgtgagatgtagaatgtgacgtcaggtatgatcatgctctgaaataaaagacagtgagaccggggtggagagggaagggcctgtccaagaagtgagacagtgagctcgttgggggtaaaatccataaaattcctcttggggtgactacagattgtcagctgcgctgtcagcaccttgttttaattgttttacttggctgccattgccaatgcccagctgactgctccctgcagcgagaactcccacctcaggcctcgctttcttcagctctgctgagcgtgcctctcctgggtcggctcccggttctcctccagctgctgagattccagcctccacagcctgctctgctggttctctgttctttgtccttagcttctggtttggcttggtccctttcacgtcatccttaacgtcctccctgggtgagctcatccaccactcacctctgtcttgaagacacccggatctccatatccggtctgaacctcctcccagtccacactcctagtggtctgccccgagggcacctcaacctgtctgtcccctcctgagtgccacatgcgtctttctccctgtgctgcctgcttggtccacgcccctcagttgcttctgcttcatgagtcgtcctggccttgtcttttccctcatattcccttggttaccacatcctgaagagctcatcttctaatttgtcaactcagttcttctctgtctctccactcctgtgtttaggattcatcattttgttctatgacagcctcttaattggtcatcctgtgttcatctttttcctccctcattccactgcccacattcctatcaacgtgatctttctaacacatgtctgatcagagctttcttttgcttaaagctctccaagagctcctcattgcttagaaaataaaagctaacccccttcagcggggcctgcagtcttctcatcatctggcccttggccccctgcagcttttgctcccccacccccaccccactttgggttttcctttttccctaactcacatttctaacctcagcctagctaccaacagccatcacctcctagtgcctttgcaatgctgggccctctcctgggaatggcgtggtctctgttcaccctcttgggaactcaactccagtttcccccaaatcttcaggacaccatccttccctacccagcacctctccatgacctggaaatgaccttcctcctggctcccagaacaccctcatgtctctcttgcaaagcacttatcggtgttactgttgatttacttacctgttatgctcagcaacctgagctccttaagggtggagaccacacacacacacacacacacacacacacacacacacacacactctgtctctctctctctgttccaagtgccagcatagtttacctggctcaggaagtttttgttgtaagagtgaggagtggtctgtttgtgcagccaagcaacagattcataatgtgataaaatgtacctgaaatgggaggttcattggccattgggtttattggggtgctcttcttgtcagctttgagtgcaggacaggttgtgttgggcttgagtttgtgacgcctgttgtgtctcccagcatgctgagacctcaggaatgtctcttctctatattctttgcccctgactttttatttttttagctcttgtttttgatggaccgataatagcaattcaaaatgaaaaataatccatcaaggaattctcaggaatgaggtccacccaccttggtcctggatgaatcccaaatttcctaaataagccagaatatctattcttgcgaactactgtctgacagcctttttcccccttaatccagctgagaatgcttttcttgaagggtaaggatacctagtggcccttcatgggggtgcctgagggcctctttgtcttcattttaaaccttgtaaagtccccagtgaatactgaggagtctaacaaataggaagaagctctgaccccaggggtcccaagtcagcatctgtactttgcatgggagctagcacaatgcacctagccaatagcatataaactctcctgttttcattcagtgccttaagcttgttgcttgttgtgtcttcttcacttcctatctctgccagagacctgagaagttgtgccaagagtgcagcttttatttggggcctcacagtaatctaggaaagcttttcagaagagagccattctcagcaccgaggtgtcctgcagaccaggacactccagcaggctcttggaactgctttcctgggatggaaatgcttgtgatgctgcctccccttgtagggactttccatatgctgttccctcagcctggaatgcatttttctcctggtttgcctagctcatgcctgttcaccctttggaactcagctgattggcctgcctcctcctcagaagcctccccaacctccctgataagaaggctaggtcttgtcctcaccattcccatgccagcatctagcgcttatggactgctcaccttgtgtcaagtactgttagaatgcttcatgcgtagctactttgtattaggggcttggtagatgttggctgaggtaagtgtcatcattgtcccaaagacactgtgtgaggaaactgaggcctcgacccattgagtaggtgacagagcaggagtttatcccagatgctggactgtgggtttacgctctgacccttctatacgccaccgttccctctgctccaagtccttgcagtctgtccttttccagcacttgtcatggaggtcatgacctcggtttgtgtggttatttgattaatgaatgtttgttccctcactgggcagcccttttgagccccaggatggcaggagtacctaggactctaggcaggtgcgcagcctggagttgaccgagagcatgtgggactgcccacttgcccacagctgcttcttgccttttgcatcacaggagggtgggctaggaccataaaagagccagcccaggcctccccctttctggagctcactgagtgcgtgcatggggtttggccgtcaccctcacttccatggttctgcatcagaaccagctgtgctgaggaaacatctgtgccttgttaaggtctgttccttctgcccactccctttgcccttttctctaccttacaacccctttgttgtccttcttcaaggaaaggggccccctttgtctctcagggcagagccagctgcccttctcctggtcctcttgatctgcacacactctgaggatgactgcccatggcaggtcatgatggtccgtctgccctggactgtggtttctgtggcagagcaatactttgtacagtcagggcccatggccctacggaaggctgagggagagcctgaggtcattgccttaagagaagctgcttcatggtgcagttggtatgtgtgcatgtgtgtgtggatgtgtgcttttttcatgcatgatgtttttatttgtgttatttatccccctgctatatctccctctctcaggggtctaacatggagctttgaatagtagatacatcatagctcttggctaaatacatattttctcccccgctgatctgaaggcacctcccttttcccctacccctcactttggtaccttggtgacttcacagggttgttatgacttcccagacctcattgagattgcagtgatgtgaaaaccctacctagattccagccagctgggcaggggccttggcagcaggggaagcccagttccctagggcaactcaccaggcctccagggctctctagggccaggctggctgagcttcaactgactcatactgtttttgactgggaaaaataaaaattttaaaatggcttctgaccaaatggggaaagtggatgtgggaggaggagaagggggacgttagccacaccctaggtacatttgccagcagcaaactgagatgggcttaaagtgtggctggcctctaagacgcctgcttcaaagggcattcggcacactggtctcaggctttggaggcccacctgcttcagaacatcagctccctgtctgtctagcgttgtgacttaagacaaacccaccaagctcccttagcctccattttctcatctgtaaaatgggattgtaatcattagaataacctttataaggttcttgtgagagtggaatgaagatgtgcttagcaccgtgactggcgtgtagaaagcaccaaatatttattatctgttaacattgtttttgtttgtcaaagtattattgttaataataattataagaagactttggaacagatataaagtctaaaatgcaggctgtgatgaaagggagatggtatataagaaaagtgctttttgaattgcacattatgtccagatattattattagcacaagtatgtttattattgttttgtctttgaaaaaaatgctggagcacaattttatgatgttgagtctatgtcctttgttgttttgttttttgttttggaaaaaggtttgtcacattggcctttattggaatcttgtccagtggatgtatgacccacattggtgaccctgggtgccaaatgcctggacagcacctggcaaagaagagccattatttcaatggtcactattgtttaaaatcgttatggtaaacaatacctgacagaagttcttagaggttcattgacagtaaattgtgggcaatgcactgagttattatttactctagacctgagaaattctccctctccaagttttgtgccttgtatagctaaataaatataaacaatttccttagaatttgatacaaacagctaccattgtcttcacaagtatgttagaaatactttcttaatagcaactacttgactgttttgttttttatctccattccctgccattactctgcctcttcccatctttctgaaataaaagtgagccaaattagccatttaaaaaatacgtagatactttcaggcagaggttgaaaactgtctaccccctggctgcatctggcttgcagatgtgttttgttcagcactcatagtgttttaagatgtttaaattagtggccaacatttaaaaatgggtagatttttgaatcaaaatccagatttccagctcttcataaaaaatcaaaggtctagtgggcctgggcccgtcttccttgtggcagtgcggaagagtggtggtccctcccctgggagcttgtttctccagcctgcctccggctggcccagcctcactgtacctttccatggcctgcttggcccctgtaggaatagagtttgtagtctctgcttaatataactaataccccttagatactgtgtatcagtttagaattatttccactagcaactgtgaccataggtaggaaggatattttacttgctaagttgtcattcttatgatagcccaaatggctataatagtattttaggctcttttggatttaatagaattaccttctctcctctctgtgggatttcctcattaacaatttttaaaaagtgttcagcaaggcttatatagcaacataaaattttaaataatgcaggatataaatttctatagctgctattgaaggggggttgcaatcaagtgaactgctttaattcaacaatttatggtgttgtaaatttgaaaaataaaagacacttagttttttttttttttttttttttttttcagaataaaataattaaatagttgacctttggcagagtctttgttgaaataggcaagggttttgagcttctcagaacttgagaccattgccttctggagtctttcctcagatgagtctgtgcctccttctagctagtgcactctgagcactgtggccacatctggagggtggagaggagacttagcttccaatggtggtcactctaggggaggggggcccttgcaaataccaaaatttttttaaattattattttatgagcttttaaaaacttttttgtttttgtcatcacaaaagtaataaacacttgtgataaattcagacaacactgaagtgctttaacataagcaacaaaatcttctgtgacctcccccaaccttttccaaccattccccaaacataagcacttttgagagtttgcttcttatactcctggacttttgcatttgcttgtttctctccacccctaccctttgccctcaaccacgacatagatactttcccttttgttttctaaagatagactgtccctgtgcatggtgttctgcaactttctttttacagctgtcaattattatggttatttttccaagtccatatgtacagataaatgtacttgttacttttaaaagttgtactccatgttatggttgtatgttaagtaaatttcgttttgtattgatagacactcaggttgtttctgaccttttgccattgcagtcattgctgctgtggaaatttttgtgcacacgtgtgaacttttgcctgagattttctttggtatagatacatagaagtaggacttttggtttaaatggtttgctgtttaaaatttgaatccataatgccaaattaccctccaaaaaggctgtaccaattcatgctcttcctaggagcatcccattatggctttgctaatctagtttttgcttacacatgtgtaagaaagtaaatcttaaaagcctcacaaataatgccatcaaaattacacgtttatcttagaaaagcattcagaatatatgtctgtagatttaattatatgatttttatatcttgactttgatggtggttatcatcctgcaaggtgacaaaaagttccctaaatactgtacacaattattaaataattattaaggatatcagttgtgccaggtagcctttggaagaattacagccaaatcacagcttccttttccacagctctgccaggctggcttgtctttcccaccaagggctgagccattaatactgaggctgggtcagcatttgaaggggccctgccagggagtgccaggccttgggccccagagacctggggagtgggagatggcaagtgactgctgtgaggctgagacaaagtttttgcctacaacaccccatggctgtttcctttactgagctagatgaggaaagcaaagggaagtgatggtccaagacttctggtggtcacttttgttcatagatttctcacaggagtgctaacatttaggctcatgtttacgaaggtttgaaaccttagcatttgggaaggatctgcaaattctcagccaggggccttaactgatcacaggtagttgtgaactcttggtccaggctgtatctcaaggcttcttcttagaaggacaggtcagcttaccacctgctaactgcatgtgaaattttgaattctgccttctctagctctcctctctggctctgagctggtatctggcatttgcaaacagtttaccctttgttgacttcttagcactaacctcacttttatgagtctgagtagacttgatacccaggccatttatcctttgagggtgccctcagcttcatcagacccatgctgggcagtctggcatagtggtaagaggcacttggagccagacagacctgggttcaaatcctgacatcatcacatttactaacagtgtgaccctttggctgatgacctcacctctttgagcatcagtgtctccttctacaaagtagggacagtaattctttcccaggggtattttgaaggatatacgaattaatatttgtcaggtgcctctcagatgttcagcacaaaataaacagtgtataaatatgagtcctctcttatcttcctgctgtagagagaaagttcgttggggatgctccaagttggtggctactggctgaggatcctggagtaagaggaaggctaccatgtaaacccagagatgaatcatgaacaatgtgtattctcaggagcttagtatttgatatgggagcctaacaagcaaatagtgtgtccagtaataggaactgattaatagaggaaagattaattaaccttctaggtgggtggggtggaaaagtaggtggggtattgaaggttcaacaggagttcgacagagaagatagaccataaataataaatatacggctgtatccactagagataaagttacattgttttttatgtacatgttgacttcttttggccttgccaatgcactgatatattcaaattcagctcctctctttttctcttcccttttcccttcactctgcctttcctccagccctgccttgaaatactcagccactgaaaatttcttaaagaatttctttatactttagtaagtcctcagaggataccagttcaccctactgagattttacaagaactttggtgtagctggggttttttttgcattcctttttctacggtagatataagttcttttgggttgcccatcaatgaacaaactaccaaccatttgatgtttactgcgtgactcctgtataccaagcacatgtgccatttcacttagtccccagaatgtcagagcagctttgtgaaatgggctgcccgttctttcttatggatgaagaaactgaggcttaggtaggttaatatactgaatattatacatgtagtgagtgggaaagccacagttcacctccagggtctttttctccctctttgctgccttgcttggggtcctgctcatagtaggtggacagcagatgtttgtctgaacatatgagaacactgcctgccacgtgccggtcagtttgatttgtgctgctggttttgtaacccacatggggcaatgacagctgctcaggtactttcctacctattagtggggccccagggtcacacatcagtcataattgacaaaaaacacaatttccctttcctctcaacttttatttctaaggtacttgtaagcaggtagattagattgttaacttttcattttttgctttgtctctctcctttaaagactatgtgaaagaatacacagtgccctgagagcctggcctgggaatcagaaacttagattccagcttcggttctgctggtaactcctcagtcattatgggtaaataatattccctctccagaactactagattgtgtccttggtgcagtctggggttcgggtggtcctagggaccctgcctactgcatgaacctgttatcaccatgtgaggctggaaggatctcagcgttggtgttgggcaggcctgagtgagcatcctggctcctgtacttcccagctctgtgacctcgggctaatcacctgactccctgatgcttgttcttgtctacgaaggagggctaagaggacctgcttcccaggatcactgtccagattgaatgagaaggaacgtcggcttccttccttctgtctccaactcctgagtgcactggttttagactaactgggtgtttctgcagttgaaaccaaaacaccttcattaggtacaatgttcattatacctcgcaacaccctgagatactcaactcttagatttcttgaagctcttttttgttaagaaactcctcaaaggaagatactcttctaccccattgagctttattagtgcttcaatgacagcaccttattttttcacttttttcccccttgcagacagaagctgcagtgtgaatcagtttgcatttatataatttcttttgcatttctttgcaaagaggaaaactccattcatttagcaaatgtccgtcatgcccaggccttatgttaggtgaagggatttggagagaaatagagtcactgacctcaagaagcttacagggaggaaaggtgtaaatacataaagtgacacatgggtttgtcctgtcaccaaggtatgcagtagatgctgtgggagaagagaggatgacacaggttctctcttggaagacctcatagagaagaggtgacttgtgagcaagtctttttttttttttttttttttttttttttgagagagggtcttgctctgtcacccaggctggagtgcagtggcatgatcctagctcactgcaactttgaaatcttgggcttcaagggatcttcctgcttcagcctcccaagtagctggaactacaggtatgtgccacttgcctgtctgatttttttttttttaattttttgtagagacagcgtctagccatgttgcccaggctgatcttgaactcctggcctccagtgatcctcccaccttggcctcctaaagtgctgggattatagacatgagccactgcacccagccgttgtgagcaagtcttaaaagatgagtaggaaggagtctgtcagctgtagaagtaggaagggcccaggcagaaggagcacagggcagaggctagagccctggtaggaggtgacacactgggtgcatgtctggagctggagccaagaggtggaggacctaagtggctacatcttggcagtcacccatatattggcaagccccaaatctttgtaaccagcccagattgtcttcctgagcccccaactcccatacccactgcccattcagcagctagctgcatgttgaagtgtagtggtcttcccagacctaacataactaaacagaagtcttgatttgttccttcaaaaacaaacaaaaaactagccttgctcctcctcagtcttccccatgttatgaggtccccatcatttttacctggctacccaggcctaaaatgtgggcatcatctttgattctgcttcctcctgtgttcttcacatcatctgtttgcaattctttttttgtttgttttactggttttaaaaattatttatttattgagactgagtcttgctttgtcatccaggctggagtgcaatggtatcatcttggctcactgcaacctccgcctcccgggtttgagaaattctcgtgcctcagcctcccgagtagctgggattacagtcgtgcgctaccactcctggctaatttttgtattttcagtagagatggggtatcaccatgttggccaggctggtctcaaactcctgacctcaagtgatccacccgccttggcctcccaaagtgctgggattataggcatgagccactgcacctggccaatttatttatttttaattaacacataataattgtacatatttatggggtacatagtgatgtttcaatacatataatctgtagtaaccagatcagaataattaacatatctgtcatttcaaacattgcagttcttgacaactcttactgtatgtcctggaagccaccactgctccttattattagtttgtttctttatcaaccaagcaggccagaccactgctctaccctcgttcaaacctccactgtctttcagcaggtctcttgtcagtttgctacataggcaaagaggtcttttaaaaagcaaatttgtgtcatttccctgctctaaactctccagcggctttctggcatctttggaatggaatctaaacatctcgccttggcctgccagcccctcctgctcatcttctctggtctcatcccttggcactctctgctcactccatttcagctgccgcatcttttcttactgttccccctgttgtctcatgggctttgcacttgctgtcctccgcctgagctgctcttccccagacaccgcctgtctcaccttcactccacgctggcctctattcaagtgttctcccacctgtctgaaaaagcaccgttctgccccctctccccgctgcttcaaccattctgtcctacctcgctttggtttctctcattagcactcatcactctctgactttatatgatatgtttgtttgtcttcttatttagtgtttgtcttaccccacaagaatataaatccatgaagatgggacctggtcttatctattgcattcagcactctagggcctaaaacagagcctggcacacagtgggtgatcctgaaacacgaggtgggtggatggacaaatgactgagttaatgcatgcctgcatgcaagcgaagactttggagtttatttcataggcagtgcaaatctagtagacatctttcaggaggtgagtgacgtggtcagcacttttattttagaaagccagctggtggcagtgtgggggctggactgtaggagggaggcagcagaattactttagcggctgtgaaaatcgtccaggaaattgatgctgagtgttgtgctagagctgtggggatggagaagaggggacagatgacaggacctgaagatctttgagtgtctttgatttctattgggataacttggtatagtgattcctttataagaaaagcaggaggggacgaactggtccagggagagactgttgacactctgtggtgtttttctcaccaagaaaacctaagccctgggatgcatgttctctgtagtggcattggctctctggggagtgactctgctgctccgcagcctcccctgttccattttttaataagagaatagtcaagatggtggtgtcagtgagtgggagtcttcttcatgcagatggatccattgatctttgcatactccaagccacactaagtcattggttcttttctcgcagtgggtacatttcaccttatttgattctgatctgacaaatgctgctttttttcttttctttttttttctttttttttgtttaaagaatacctagactgtgctcaagttccaggtggggtttacagataactggggttccagcatctcccttcttacaaacacgaacaggagcctttgccgtccttgggtctcagggaggcagaccggcagcaggcacacattcctggcccaggcgtagccatgctgtctggtgctgccttttgagaccttttgtgtgtgtgtgtgtgtgtgtgtgtgtgtgtgtgtgtgggcttgaatgattccttctttcaaaaattcaaccctctccaaattttgatgaaaaccttttcatctctgagtaagcacattatttcccatcttgatgaggtgtgtcccctctgtgtccctgagagtatgtcatcccagccttttaaattttattgtatttttttattttttattttttcatactagtcaagtgcagtagtgagaagcggggaaagagtagaacaaggggccgggggcggtggctcacatctgtaatcccagcactgtgggaggctgaggtgggtggatcatgaggtcaggagattgataccatcctggccaacatgatgaaaccctgtgtctactaaaaatacaaaaattagctgggtgtggtggcacacgcctgtagtcccagctactcgggaggctgaggcaggagaattgtttgaacccgggaggcagaggttgcagttgagccgatatcatgccaccgcactccagcctggcaacagagcaagactctgtctaaaaaaaaaaaaaagagtagaacaaggagtttgatctgttacagactgaactatcaatggagataactcactaccttcggaccagcctcatcccagtcttttaagcctggtccagaattcctaatcctgcttgtcaggcccttcaaagtgaaatgctgtaccatctgtatagctggattctcacctcctacctctcctctcccttccaaaggttccgatgtcataggaatctacgctagagggcttcctgtgtgccgggcactgtggtaagcacttcacatgcattctctctaatccttaccacttcggggatgtaaggattataatcttctttttacagatgaggaagctgaagcttgccactgcttagtagttaagagtatgggcttacagccaaacagaccctggattgattctcaactagctggggaccttgggcatgctacttaatttttttaacctttttcacatttagaagataaagataatatatagagagataatatagaagattatataggtattatatatatatatatcttctatattatgaagataatacagagttgtgataaaaattaaatgaaatgaccagacatagtggctcactgttgttttgttttgttttgtttttttgagacagagtctcgctctgtcgcccaggctggagtgcagtggtgcgatctcggctcactgcaagctctgcttcccgggttcacgccagtctcctgcctcagcctcccgagtagctgggactacaggcgcccgccaccacgcccggctaattttgttgtatttttagtagagacggggtttcaccgtgttagccaggatggtctcgatctcctgacctcgtgatccacccccctcagcctcccaaagtgctgggattacaggtgtgagccactgcgcccagcccatagcggttcactcatgtaatcccagcactttgagaggctgaggtgggaggtcacttgaggccaggaattcaaggccagcctgggcaacatagcaagaccacttctcttttatgaaaaaaaaaaattaagaaaaataaaaattaaatgaaataacatgtaatttcctaagtacattaagtacgtgcctactatgcgccggacattgtgctgtcagcaaataatagctcatcgcagatgctgttatcatcatcatcatcccaaagccacagattgagtctgtaggtgaggccctgcctggctccaaagattgtgtttttttctcctgttgctcccaagttcacctgtcccaaactttctagcccctaagtttgcttccttgcgcttttctggttgtgccatttgtccctgtctgggcagtgggctcaagctaaggcacagcagttttccagtccctttgagctactgacctcttttctgtcattgactgaacagtttccggtggctgaatcgtctgtgtaagagcttggacaattttttctgattgttaccatcatcgtgtttactgtgaaagggcttcctgtatagttgtttgtgttagcagcattgtctaaatgaaacaagagtggcaacagaaagggttggtgagcagtcctagtcttttggggtcacagatcactttgtgagtctgaagaaatttatagactctctcaaaaaaataaacgacaagacaaatacaagcccagcatttttcatgagacgttttccctgaagttgatctggaaggctatgtgctcttttgtcattgtgctactccacattcacagccatgaagggtgtcatgtttctgcagggtgtttgtatttaagggttgttgggcaatttggcaacactatacctgtttcattgatactatgtgctatttgcatttatttcccatatctgagatacgtattcacacatgagaactggcctggccattttgatgagatgtacctgctgatttgcacataaacacaagccatggcctgcatctagaggatcgactggagaggcttttttttggcccaaaacatcagactagtaggaattttattatgagttatagactaaaaggggggataaacttagcttcagcagggtttaatattctcaattcaggtaagtgtaaatctctacttttcattttaaacatttttgaaatttcagtctttaaaaaaatgcttgttttttttccttccaagttttaaggtatgggtttgggagaaggcagattccaaacactttaactcttcgacctcagacttgcttatgagcctctctttggaacatttccagtgaaccgtggagcaagcctgccacatccagcagccgtaggcatgatgatcactggtgccgatggcccctccactccctgcctggcttttgaggccccgcagaaagaaaggaacagaatcctttcataaggaaggccccagaatcctttctcctgctgtagctatgctgccagtgtcctctgtagatggaaatggaacttggattttgggtgccagaactgaattcatcacagataagattagttgatataaagctgtttctgatgagcagtttttcctccagagttttcatttttgctttttctaaattatacaaaataatagacactcattacaaagggaggatcataatgctccatacctggttttgaattccacttctatcacttattagatgcagccctgggcaaaacacacgccctctctgagccttgatttttctcattgaatgggagatctaattattttacctcataatactgctgtagggattgaaggagattggtataaataatggttttctgagagtctggtgtgtatttgctttttttcagttaatatgaattgagtacctactaagagctggtcactgttctagttgatatggaaccagtcaagagcaagacagagagggtctccgctctcatggtgctcacattctaatcagaggaggcacaagaacacaagatcacttcagttattaagaaattagaacccaggggtagcatgagagtcacaggaaggacccctttacgtcggatggccagcagaaccctccctgaagagctcaatgctttgtgacccccccggtcccaagttttccaggactcctacttttaaaaacactgcccctccaagtatataggtctcaattttgagtttggaaaatctgaccacatattagttctcttgttcattaatgggcttcccatttagagagtgagttcctggggcaggagccatgtcacaggaccttttgaaggtctcagggccaatatggacgacacttctcttgaacactcacccagttgggctgacatgaaaacctcatggtgggaggtggggggtgattagtttccagccagagcccattttgctccattgctgctttgaacattctggtttctaaggagctggaagtagtttctctcagcgagaatgtggcacactgtcatctcctgattctctgcatgcagttcttcaatggcttgttgaggctgcgtggaagcccagaggtcggggcagttccaactcacacactggcatttgaacggcagagcagtaagccctacacctgacataactgcattgccttcttggggtacggtacggatttttaaatgaccatttcagcctgctgggctgggcaacggtgatccaaactgatgagtcaggaagccactgaacagaaaggcaggctgcatctgactcacctgtcatgtcgatagttgacctccttttgtttgaccttgatttgctcagtgcaattaaagatgctgttgtgagtgcacttctgctacctgatttaaataaagtctaacatgtgacagctcagggtcttaaatgcacacacgacttaggcagacggacagatgggtgagtggttagcctttcacttacctctgaattgtaattctatcacaaggaaagggcttaatttcaggaacacggagtaattatttgagactagatacaatgccaaagcagcaggccttgattccttgctacagggcagcttaatcaggaaatggcctagatggccgcctttcaagtaggtccttgcagtagcttggcaacaggcacagggtcataattggaagaatttggctgtgagtgtctgtgggtgtttacagtgcactatagggcagggcttctcttatttatagaatattttgagcaacaagcagcagaaggctgaaaagccactaaaatctcgatttatttttaacaaattccatttttctcctcatcccagaaggagaactgagttattaaaaaacagttaaaaaatacatcattgcagagcatgccatatctaattatggggttgccagcatcggcctgcagccacatttcaagggcttcgtaaatcaaccatccattcaatctgtgaacttatatgactcctgttctccatttagatgtagagcgaaattattggcaagtgggtgctgatcagaaaaagttcttccctgtctaaattaggagatgggagggataaatatagaatagtatacttatgttctcaaaaggagataaaatcattcttcattgtccattatacttagctgcacaaacatccatcccattgcactaaatagccactttagagttttcacacattgcaatggcagttctgtgccactcaaaggcgcagtattgtgatatctcgctgagcctaaacctgagtgattattgctcacgtagtcatgaagagacataaacccagtgcttttttgcctgtgttgtcgtagtgtactagagctacaaggtgggccttcagagagacactagttttaagtatatctcattgtaggtggggaagcagaggcctaggcaagggagtgacttgcctagggtcccattaagagtcatggcagaggtgggctggggcggcagtctctgtgcttctcttgacagtgccctgctgtgctcactggagctactgtattaaacagatacccttcaggggttcacagtcttagaagacacaggcacgaagatggccaaacaatcagcccatgcataagcagaccaagatatgtgtatataacagattagttgagtggtagagaaaatgagagtggggaattttggaatctatttggatagcaaagcaaaggtaacatcagttgctctctgacccacttgggaaaagcttatagagatgctatgaagttttctaatggaaaaaggtgcagtacatttgccatgtgttagtgggaaggtaagtatgatgcagtggtgggtggtaggaggcagtgaagataagtattgcaactttggaggagccctgggaatggattgttgaggtgatttcataggaatacgaaagggagcataggaccagggcacaggccagagacaggcaatcccaagttccctggagtaccctgcccttttctgggaaagcaagtgggtggcatgagtgctatgttcccaatgctctggccccacccctggtagaagaataataactgatcatggtgggttttttctgagcctctgtatctttgagtagcattctggtagccaatatcagtggactggtgccagcctgtgtggtgaacctctatctctttcttgccctgggctgcatgtcaggcacagtgcctaagccggagtgggctttggggagttacttctctttctgaggctggaaggggcagagggacgtagggaaaactttgctagggagggcaaactgtgaaagcctctggagaagtcacctgttgggataccaaaggccagcggttttagaggatgcgaagaggccgggcggggttggtctgggcctaaactaaggctgtagcggctagcatggagaggaacaagcgacggggagtgattacggatgaggaagacgtactaggatttggctacagacagacaaccaaccagagagtaaaagacagtgacatgctaggatgtgaaccacctactacagagaaggtcagaggtggggagggaggaatcagggctgtgggcagatccagcagctgggatccaaagctgaagcccttgggttattgaatccattctttctgagaagagatggttgatcttcctgcccagggagttcctagccagactggacagtggttctcaaacatggtgccaggtgttgtcagatagcaaacaattagtttgtacacagaatgtccccaaggtcacctacacatatttgtttttcctaatctttgatacctacagccacttacctgctttcgagttctcagagttgagaacatataaatttgcagtaacaagtgcacaggaaatacttggaaaatggctgatgagctttagtttggaaatttcatttttttcttggatctggattataatttcagtacaagctagcaatttttcttgttggtaaaatagtttctagttttaaaattatttctgtagttaataaagttaacactatttcatgatggaggctgccccagctctgaaccaattttcaaaaggcagattctcctctttctctctcttatttcttgctcttgaacatttcactgtgttctagcaacttttcctgtgtgtgactcggccaggagactgacttgagtaagatccaggtcaaggggttgtgtgggtgggtcggtggtaaggaggtgctgaagaacactaaaacctttgcctgagaggagtctgggaagtagcctgcgaactggaatgaccccaggcttcctgtcacggtcatagcccatggagttggcagacttgatcactctatattgtgtgcccccaggtaatggcattagtcatcgatactgtcttttttttttttttttctttgagagagagagtctcagtctgtcgcccaggctggagtgcagtggcgtgatctcagctcattgcagcctctgcctgctgggttcaagtgattctcctgcctcagtctcccaagtagctgggattacaggtacatgccaccacacccagctaatttttggatttttagtagagacggggttttgccatgttggccaggctggtctcgaactcctgacctcgggtgatctgctcacctcggcctcccaaagtgctgggattacaggcgtgatccactgcgcccggccaatactgtctttaaatcgtccagagtaagaaaatgttgatagcttgttgtcacagccctgtcattttacacattccctgaattattgtctggcaccagcaggtgttccagaaacacttttggttctttgagccattactggtcattcctgtcaccactgccaccaccagatgtggttctgagagcattaagtaaaagttttgaaggttgtgtatgttaagactggtgcaaagtccatcctccttccttcgggctgatcagccacaccctggctatcagcacttatttactcattttcaaagtgacagaatggtccagtgggcaggggcataaggggtcacttcctctaaccacccgccagtgcaggaggatcccatctgcgcagtggctgcccatgacaggcagttccctagccccagtcggacatctccgcaccaggcatcctgctcctgctttatggacatctttggctcttaaaaatcctcctttattctgaccgcagatctgccttttggcagtgtttccttagtgacctagttctgctttttgtggcaacacagaacaaaggtcggtaggcatggcacaattccagcttagaagtttgaaggtagtgctcatggacccacatcctttccctctccacccactctatctccctccacaaggtttatgttctccagtgccttcagccattctttctatggcatggcagtcagtattaatcccagtaaaggtaacatgtatccagagagtgcttgccatgggccaggcactgttctaagctccgtacgtgaattgtcttatttatgactcaaaatcaccatatgaggtgagccctgtcatcatcctcattttaccaatgaggcaactaaggaacgagggctcacatcttgtcccgagccatgcagtcaagcagcagagcagagatttggggctaggcagtgtgactccagagcccgtgctcttagttgtggtgcaagactatcttacagcctttcctgcatagtgccaaaaataagcccatggtgcactagacttgggctggccctgctttaacttattttgcaagaaatcattagacaggagccttagttgaaccattttctgtgaaaccttcagagtttgttttgacagaacagactgcagggcagaggcatctgcactgtccccaacaaatgggttcatcctgtagctctgccaggccccacagggttcataaaatggtagctttagatcaaggtgacaaatacagggctcttgatgttttttttttttttcctgaacatggtgcctgagcaataggtttcttgtttaaagtgcttagtcatggttttatggccagaaagtagaaggagagaggtacctaagaattgcaaaactgggtcatctcttcaagtgcctaatccaatattcagtctcagagaacaactccagcagttacgggggtggaaggatgtgatgaccacctaccatccaaaactgggatgtaggtgccaaatacacattctcctgaaatgatccctggtgcctctagccaggctcttccaggagtctagagaaagatggcccatgacttcatccagagtctttgcttcctgtgctctgggatgcctgggcttttctggccacagccatacactgacagggccagaagggctgagatgctgggattgaaccatctttctctttgtgagttgctttccagatagcacgcattccggtcactattttccagagatttaagcagcaaagtgagggaccctcgggcatcgactcagagacctggaggggagcagcttgaagcaatgtaaaaagcactggataaaatctggttctaccaaaaatagggctatgagagttacctcacctccctgaaaggtaatatctttatctgaaaaatggggatgataatactactaacctggaagattgacaggaggattagatgagattctgcatggacataacagtccttggcatgatgtctagcagtgaagaaacataaatatgagaataataacttccttcttcctccgctgtctattccttctcttattctagtcctgtctgctgttgggttttgtctgttgttttgggtaaatagctaacctctctgcctctttttgtctgtagaaatgctactggttctgaatgggtacttcgcgccccctataggacatcgtgggaatgtgtgtgggtgatctggatgtcacagtgacccagacgaggcttttactgggggaagaggggaaggcaggggtgctagatataatgcttggggaacaaaagattgcccaacatctgcatagctgcctaatgctcagtgcattcttgtgggcaaaaccctgcttaaaattatctgggcctagagtctgactccaattaacacataaacacaaataatttttgcatgtttttaatatatactgaattttctgcgaacacagctaccaagtatataagatttacctatttgttatgaataggtgcaagcatttcatatatctttcatgatgttttctggtgtagcggtgccccaatacttacatattgatttacatgttgtcttatttttaactatatttcctttcttctttgtattacagttagggcattatattgattatttttggaattataagtgttgtaaggttatattacttacagatttcaagagagctaaagacatatttaaaatatttttattgcatttttgacaatatgaaagagcaagagagagagagtgtgtgtgcgtgcatgcatgcacatgcttacaaattagctagaaaaatcctaagacagactttaaatgaaaagaaatggtttcatagctcctagaaatgtccttttacataaggatatgtagtagaagtccaaatttttaactgcattcattgtcagagaaatgaggtgttttgatgtttcccctgtcccttttagaaagtatatgatcctaaaagagcctgaaacagtttccattgtcatattttttcatttttgcaatctctatttttttcactcctcccacctgtgcatatatatatttaaaagcgtccccatatagacttttaaagaaagaaaagccagccaggctccccactctttactaagtttgttttgattgttttgtggcctctgcctgcacctcggcctgagtcagactgactctgggagctgtgggcaggtccaagggaaagtcaaggaggtaatgaggcttctcgtgggggcaacttgtaggccaagttgggtgggttgaagtcagtctaccagaagcttcctgcctcaagcctgggcctctacctgtcctgaaacctgagggctctccagttggaccacgagggtctgacatccaggaggatccccaggagagagcaaccgtcactagggaatatgctgcccagcactgactgtactgagcagcagtgttgtgtgcctgttgggttgatgccatggatagccaggcgttcagaactgaacacgacacctaaaaggcaaacacgaactgtgaatgtgccagtgtcagatgctgccttggtggtcatgtgtgggctggcagtaagcttttggtcccttaacactcgctgttggaaatttcccaaggctttcatctagggtagctggtgtgtgatttccctgtcctttgttactcctatctggaaactagttgaaatcttttctatgatattgatatagttacagaaaatctgaatacttactactaagttttatagttctgcttagttcaaagtaacacaacctcataagagaaagtttgaaacaggtagagaaattgaaagatgaaaatcactacccattatctcagcccacaaagatagctactatcagcattttggtttgtttcctttcagtcctttctgtgtttatgaaattttattatataaataattcatgtccaatatagaaaaagatggaaaattgagaaattataacgttaaaacaaaactgacccatctcaccagttggagatgtcttaatattctggtgaatttttttttgtcttttttctatagacacataagaagactgggaaatattgtgtatatacgtttgtaccctttttcaccaatgtatatcaatgtatatcagttcactaatgaatactaattaaatgaaaatttattaaatgtatatctatttatatctattgatatattaacagatgccagtgcatatctattaaaagagtactatgtaagagatgatgttcttaaacataaaatttaatttaggcatgaaattactttgtcaaaagatatatcagtttatattcagatatacagtgtactgacctgcccatttaccacatcttcactaatactggtattatctttaaatagaatctttgctaatatgagcagtgaaagtggcatattatctattaaattttgacggttatgagattgagcatgtttttgtatacttactggtctttgtgtttcatcttttggggtttcctattcatagtctctgcttagttttccactgaggtatttgcctttttattgatttataagagattttgttttgttttaactcagaaaaggtagtattgcttcagttgtcacagagctttggagtcagacagagctgggtttgaaccctggctttcctacttgtgagctgagggatttcaggcaatttatctgacccctctcacaattaattagttcttctttgagaactaaacgaaacaacactgactagcatgaaaaaaaagcctggtgtgtggtttctgccaatagtttttgtgttgttatttttgttgtgattcctgcactgagtattttctcagaaaaatgaccttgagctgtacgactcatgcctgttcagacccacagacacatgatactcactatatccaaagctcagaaaaatgaaactgaaatcactgaagtttgtgggttttttttttaaattcttcttgccagaaggagacaaatgaaggaaaaaaaacaagccgatttcattttcattaagaggaatttgtagagttatttctggggtcaggcaggatacattcagacgaacattttagatctagggctgggaagatcccgagactcgttatagattacatcatcttcctccaagtgcacttgccaggcaaatggacaagtgcattttagaaaggttttcagttgttcacgtttaaacagaaaggatcacctggctaacttttagttaacccattgaacagatgtgccattcccccagcccattggttattcatgtccttgttactggtttttgatatccttgccccgtaggtgggaggagggatgggtatgagcctgccctgccctctttctcctacttgggacagagctgttgcttttatttgctgagtcactgaagcaatagagcatgtgcagagtcccagcctggaggtgggcatatctgggttccagtccctgctctagcccttctcagctgtgtgatcttggacaagttgccatacctctctgagcctcagtgtcatcttctatgtgatgtcgatgcctcccccaaaaggtcgttacgaggaccaaaggagacacgtcagggcaggaaccatcctaggcacgtgtttgatgctcagtaaacgggacgtggtcagtgttcagagttgtgggggtggcaggtgactgctctgtttcacctccactcacagcaacagggcctgtggtgtcacctagacatctcataggcatcccacactgaacatgtcccaaaccagcagctcctccctggatgggtggatggtgtacagggacctcttcctccagctgtcacatggggcatgtacctggcaagtggctttgcagccctagctgcccccttggctgggggcctttgtgcagttcatggactgggagtcacccccatgtctagaccgtcaggaaacccattggcttttcctttagagcataccaagaatcaacttctcagaacatagcaagagttgactttttgtcaccctgccgtggccactcagactgactcctcttacacctcacatcccattgatcagcacagcccctggaaatatgtctagaatccagctgcttctcatcacccccacacctaatacagagggctgagtcatagcatctcttccccggactgttgtagccgtctcctaactcagcttcctgccctgcttttacacacacacacacacacacacacacatggtatcttctcaccactgcagccagacttaaaacctaagagggatcatgtcactccccattttactcagagtcaaggccaagatccttactggggtctgcaggcccccacacctggccctctgactgcacccctaccttccttagctgtctcctctccctagcatgccccaggtcgctggtcccctagcactgggcagctccctgcggccctgttcactagctgtcctctgcctggaacacatctgtcacctctcacctcctcctgtccagcctccttggggcctttctaactgcctccctcctgtggtctgcctcctccccatctctgactttcctcccgagcacttactgccatccagcacccgacataacttacttgtttcgtttgcttgccttcctcaccaggaggtgtgccagatgaggacaaggatttttatatccctacccccatctgcagcactgccatggagaacagtgcctggcacttggatgccctcagtaaatatttgttgagagactaataagtgatcgtgggccagcatgccaacagtgtcttcgttattacaaaattgtcccgaattgaaatttggctactacaagcagtttgtggtggaaatttactcaaattaccaattctttcactgaagaaattacctggcatatgtgggttctcaataaactgtgttggattgcctcaaggctttggggcagtggtagccgtctgaggcctccttgccagtcaaccaaaccctgtgctgggtgggacataagagatgcccccagcatccttagctgatgctactatgtcaccccagaatccctggggcagcccacccctcagcagcagctgtcaccctgctgggttccgcttttcctcctgtgggcttcgtctccctaaggaaatcattgtccttgctttctacatcttatctccctgagcagctccaaaattctgttattcatatcccactgacctttctcattgtcctagtccaagcttctcacaggaggagttgtctctctgttttatattaaaacaaagcggttggactcttaaaactctattcacttttcagattctttggagtcctcaatgcttcctgctatgaaatgctgcgctctggaatgccttccagacccacccccaggatacctgtagccttccctgcagccactctcctcaactccctcctcgttcccaggggtcaatgtcctggatctctccagctttaagttccttcatgtcctcttgccacccctgctctcaccatctctgagttcttgtatccccaggatttcaacctgagtttgcatctcctgacatcacttttcccagccttctcccttttcaaccagcacaaggccatccacttccatggccatagtggacgccactgagcatgctaggtgttttcttctattcaactcatgtggtctgcacaacaacccagtgcggggaatccacccctttcacagatgaggcatctctagctcctggaagtcacctaacttgcctaggacatgcagctagtaagtggcagggctgggattggaacccaagaggccccgccctgaccaccatcctgccctgcctctcctcgggcacccagaatcccctcactctattgtcaaaacccaccttgtcctgcctgtctggtacctaggggagaaccctcagcctcttcttctgctgccacttgcttcctcttctgccaggaaggtcccacgcctggccagcctgctctggagacacgcccactgcctggccttgccaggaggctctgatgctctgcaggcttcctgtcccacggatcccttcctgcctgtcctggggtcccaccaccccactttgtagttggccttgctctttattgtggtgaaaggtgcaggccattccatccaagatcctataatattccttttctctgctgttgaatgttcttcccattccccccacattctcaaagaaggcatgtggctttcttcactgcgtctcggcctgccctgagtccagcccctgctgcctggcccagcctgtcttgttggcatcccctaagccctagccagaaacacaagcacctttcaggtgctccatcctaactccaccctccctcacactggcctctctccctttgccaccagataacagcagtgcattcttttgtttcctttagaacaagatgcagatgttttccagaattttcttcaacttcaggcagtaagttttttggtgaaaggagtattactccctgagtctgtagaaccaggctctctcctcttattctgtagcaattaaagacaaagacaggcaagaaaacaatgaaaagaaacaggagccaggctgatgcaccttcatttagctggtccttgagcatgactcattgatccttcttgcttccatcagggattgcaccctgtgccctctttgaatgcaggggcatgtcaaggccaagggtcaggaagagagctttggcctcgccagcctggtccccagagtggaagtggcagggcaggaggggtgtggcagacagagcacatatcgcccccagccttgcccccagatgttgagtgctgggtgccggagtgcagaggggaacaaggcctggaccctgcctggggagaggcagcacctgggagatctttgtggcttcagatcccatgtggtcctccaggtaaagcagagcatctctggggtctaggctgggggaaaactcttgcaaaaaattcctggttctgggacagaatgcatggggtctgcgtgaggggcagaggacagtgccaggccagtgagcacgcactgggcaaaggaagtggccagagaccactcataagaaaaagtgggacatgaacctcagagcctgggctgctttcagaggagccaagagcctgggaaataagcatcttctggtgaggaaatcagcagggggaggggagggtcatacaggaggggacttttaatcctgaatggccttgcagggcatggttcccctagtgtgccccatggaacccttggctgttagatgtgaggtgataaatggtgtgtggatgcatacacttgggactcagactctgctgcccttagactttcaccctccacagggctgcgtttaaaggtccaagaagccctgcagaagaaaaacctaactattgaaccagcattccctatacgtatttggcccctgattttttcccccgaataacatcattacaatcctatgggattagtgttccatggcagaactttgggaagtgttttttgaagaatttgtaaatccctgcaccctctggactgtgcccatttcttagattgcatggaggctgtgctgtacagtggaaggagtatgggctttagatgggactggcctgtgtttaaatctgctttcccattatacaaaatctctgatcttgatcaagttacttactctctcaaacttagtttccttatctgtaagacaggggatgaaacattagctagttgtcttatgaggctgttgtgatggttaatgggaagataataatgacacttacagagggcttgttatgctccagacaccattctgagcactttatatatctcacttacttttcaccacaactgtgaggcaggtaatgttatccttatcctacaggtcaggtcaggagaccaatgacacatacaggctaaatgttgtgcccaacatcacacggctggtaaatgtgggacctaagatttgaaccctaggcactcatacatgatggggtcaggatttgaaacttgaccgtcatctcccatcagagaacatgctctgaatcagtatgttctaaagggtctagagcagtaaaagcactaattggtatcagttcccttttcagatggttcgtggatatgttagggggattgatggttcctgggactccaagtcattctgcagtcattaaaatcagccctgttgaaagagtaatctcctcgatctgcttgcccactcagatgctcccattgtgaccattttgtttgctctgctgcctcatcctgggccacttcaatttgggtggctgctcagcgttcaggtggagtcgggccactttccacagccatctcatctgtggcctgtgcctccacttccaggaccaagagtccccccaggatgcccagtgagttggtagcttgttctctttctacacctcagtgatggacttgacaaagggttaagaagacatcccttttatcattcagcaaactgagtgcctttactgagctagatgcatgccctgggggaactagcactgtttggtgacttagttagacctctgaatccctctaccaaccctcagtagctgtctgggagactgggattctgtggactctcctctatcaacgatattgggggtcttttccacaaagaccagcctggttttgattgacaaagtgcctcagatttacaaatcttaccccttgcaggatcctctcaactgatcaagccccatagctccaaatgccgtctccttgattgatgtttaatttggggatccacaagcatctagagctaccagttgaatttgggtacccaagggccacaaatgggcccccctcacaccctgacccctgacaaccagcacctttgagactgaagtaccactgcatatagtgctgtcctctgctcagggcattctccctaccagccaggccacccggcaaacccctgcaacacctcataagacctcttcgctggtctcatctccttttattaacacctcctcagcacccctccacacacacccaagcccacaagcaaatcattttttcatctgttttgctcttgtaccttacctatgctccactaatacaaaaaaagcacgccttcctcaagacacttgactgccacctgctggagagttgtcatcatggctcaacaaatatctgccacttctaaacccccaggcacctctggagtagggcagtgcattgcttgtacagctgtaaacatggcctgcctgttgaattggtcatgctgtcatgtacttattaaaacactcgtctttctaactggactgaggacatcttgaacgtaaggactgccgatttctgtcttcgtccccattgtggcttctgctaggggctagagaaatgcttattgaatgatccttgtgcaaacacctgttaccttaggttcagggcatctgctgtcattcagtgaaggtcttctaaatctgtctgttgcaaagcaaggctcgccacaggctgtcagagtaaccatggaggtcggacaggacttgcagtggggacagggccccatcagcctctcacctctgctcagaggcaccaccctctgaacagatcagagcataaacaggtcagagcaattcagcattcattccctctacagacatcagggcaggcaccatgtagtggagagtggggccaggggccatctgccatggctgtttgggctggggaaggagagcagtacttctggagcatgtgctgtgctcagggccagctccctgtaggtaggttgtgggaatgcagaggtggcaactcaagcacccctgctggggattcagagttttgtggagaagtagatcagtaagcacatggataccagatagggttgtcaaggatgttgattcactgttgtccctattttcctaagctcgccacatcatggaaggctgctacccaagtgacattcttgggcttcaccaagtgttttaacagagctccacccagctgtcacactaggggtaacacagtgggccagaaggagaggcaggccttccctggggtcccattttaaaaagggggaagtcctctgttcttttacaacacttgtttaccccaagccattcagcatagtattacttaggtcccatacagagaaccttccaacagatagctctccttgctcaggcctgtcctgatgaactccctgatattcttccaggtcttaaaagagtgagagctgagcatttccctctctgccctggctgccaggaagctcagagataacttgtttgctcagttcctgtagctttcctgacccaggacttctttttcttataaattctccttgttccttttccaggaatgcttgctttttatgttttgtttgtttatgttgcttttgtctctgtattatactttggggggtggtttttggaggcaggattggcagcagccatggtagttagaagcaccagcagtaaagctggacacacctgggtttcatccccacttgctagctgtgtcattttaagtaagataagttgcctcttcagttctcggttcctcaccttgaaaattgggataatgatcataatgaatggataggttattgtgaaaattaaacttgtttattgtaaatgcattgtttcctgttcctgctcttggatcaggcttgatctgtggctgtagaatcctagtcttaatttccttcttcctgcctgtgtctgtcagcatatgatgagttgtacaatagtagtgactaggggaccaaccatcccggtttgtctgggacggaggggtttcctgggatgcaggactttcagtgctgaatgggaaggtcccaggcaaatggatgagtcggtcaccctggtaataaacaacctcaacatctcagtggcttactgtagcaaaggtttatttcttcgttgtgctactgtccatccagggccttggctaaaggaggagcctctatcccaggaaattgacagtcatgggcacagacagaggaacacatgttaaaggtcctttagaaagttgtggctgtcacttctgccctcattcactggttggggccagtcacatggccaggcctgccaccaggctgtgcagaaccttcccactgggtgggacagctcagcctggaacactgatccactctgccaggctcacctttctcttcttttgcattttagggtgctggagcagggaccagggaaaggagagagtcacttggtctgaactgggggtcttggatgtgatcatcttcctgtagatggtcggtatgggtttcttaaggggcagggttcagcttcaccctgctctgctcagaggagcagctgtgtctcctttggacgccttctagtggttgatgccctcacctttctcagctgccaaggcctctctcgacagggcaggctgggctgtgacttctcttccaccctccttgctccttcctgtggagcccctgagatcctttccccatgctcctgggtggaatggagggtgccctctcacattcttccaaggcatcttgcgcaagtccctccatgccctgctttctctggcggtccagcatgcctccatctcacctttgggactctctagcttggaagtgggcacacctgcagcccctgactccaggaccacaggctaggctctccccaaagcatcctcatcacacaccatgtggatggccaggtcagggcggccgtcagagcccaccctcggcaaggataccctctcaaaggcacctctgttggctcaaatcccttttggaagtagcccagaaagaggctttcttttttcttatcttttgttgttttatttattgttcttgcatctaagaacaccttcttggtcagaaaacagttttccagaaataatgttaagtaagtgtcacaactggtttagctccctaacctggtctaagcatataagagaggcttttgaggctgggcgtggtggctcatgcccataatcccaatactttgggaggccgagatggagggattgcttgagtccaggagtctgggcagcatagtgagaccttgtctcttctaaaaataaaaaattagctacgtatggtggcacatgcctgtagtcccagctacttgggaggctgaggtgggaagatcacttgaggccaggagttctaggttgcagtgagctatgatcacaccactgcaccctaacctgggcaacagagtgagaccctgtctcaaaaaaaataaaaaaggctttttgatttttgttttgcagaagtaccaaaatctatattagcatttattatttttatttctataaagtaaatttgagtattgggaaaattgatcaaaatgagaaatttcatatggagtttagtacttgaaatttggatccttcatctaaatttcagggaagtcagggctgggcatggtggctcacacctgtaatctcagcattttgagaggccgagatgggcggattgcttgagcccaggactttgagaccagcctgggcaacaatgcaaagcctcctctctacaaaaaatataaaaacaagccagacatggtagtggtgcatacctgtagtcccagctacatgacaaactgaggcaggaggatagtttgagcccaggagatggagattgcagtgagccgagatcatgccattgcactccagcctgggcgacagagcaagactgtctcaaaaaataattaaataagtaagtaaatttcagggaactcagagaacgagaaaggacatgaaattgttcatttatttagcatttgttgagtaccacctggagtgaggcacgagatcaggcacaggagacgcctataaataaggccctacctgcctgaagcttatgggaggtggaggagacacgcctacaagcagagaatggtcacagggcgtgaaggagcctgggcaggagctgctgcaggagagccagggagagaggatacagctctgaaggcttctccaggaggtgtgcccacgggcacaggaaaggaaagcaggagtttatcaggtgactgggtggttgaaaggagccacacctgcaagaaacgtgggcccagcagaggcagggtggttttgggaactcttgtcttttagtctgtcggggggctttgggtagcagatgggagggttgggctgaagactaagcagtgtttcctgctgggtgggtttgaactttgtttggaagacttagggggaacagtgaagctattgcagtggtctgagcaagggggtatcccgcctctgaccacagtggagaggggatggggctggagacgacagcagactgaacagaggcagtgacaaggatctggagggaagtggctgggcccatcccttagagggctgtgtgggggctgtggggtgtgggaggaagagaggaaggaagcccagggtaggttctgggttgctaatttgggggctgggaggatagcgtgtgacctaaacagagaatcagatttagatggaattacctatattaagcctggggatttcatatctatttgctgctgctttaccagttgaggctcaagaatgagaagcacaaaatttctggtcacattatttgcatgtgcccagactggggttaacagaatcggacagtgagcgttcctgaatcagactgcaatggggaatgaatgccttgggaggctggaagcagttgtattcgcagatattcatttggagatctctatagcgatcgaggcaaagataccccaaagactgcaagaattagccagtggaatttgaaatgccaaaattttttttcagaaaggtcaggaaagccccgtttaaaatctaaattttgccatctcaaggcagtgcagggatggattaggaggatgtggggtgacccttttcttcctttcagagccagtttctgccagacacaggaatcctccacatgagtcatagggtggagaggagacccctcagtcctttcagtaaggtgggagggcagtaccgcccggtggctaccatgaaccctgtttcagaatttctttcttaacttcgtgtgtgcccaggtgcacttgagattcactgatgttttctttagaccgaggagctcgcttcagcagttagtttcaggtgttggctctgctggcattatgcttcggcttaatgttttctgaagacttgttttctgttgtttttcattgttcttgttgtctggcttcaggccactaccttcaacctagcaagagctgagtggtgccttcagcagtgaggtagcttctgaaggccaccactctcttgctgtgtgactttggctagtttctccacctctctgtgcctcagtctcttctgtaaaacggagaacacaggagtatctccctcatagagttactttcaggtttcaatgagttaatctacataaaacaataaggatagagcctgacacaaaatcacactcaacaagttttcacaattatgattacttgacccagtaggagaaataaaaaacacaactaacttccttctaaggacatgcccaagaatccagttttagtaactttgaaggcattgtttttcaccgaaaatatctcctgccagattttttcatgtgtttgcagcttagctttaacaaggagctgaaggacggccaggcagcaaggggtggtgagtgccggtagagtgtgacgagctcgcccagccttcctccctgtaattaggagtcatgaaccatctacaccatctcccttagctaataagagatttttacatttacttacctcaaagtgacctgtctgggttttcttttcttgtggcccccactgtaggtttttggaagaagctgaccgcctgaaaagaaattataaaacatgaaaatcgctttgaggtgaccaagtccagaggcccctaactcctcccaagctggatctggggtgtaagaactgtgacttcaggtaacaaagtagtatcccctccctgccccctgtgaactcatgattcttggtagcttgcatggcagttcttcctttaggaagtgtagtttcttccaggaactctgaaacttggggtattctacctcatgcggttgtttggctggtcaaaaaagggagtgggggattctggaggtacttcatgtctgctgcatggcccaagggggccagggctccataaatcaccaagaccctgagggcagggctctgtactcattcctggccctgcttctgtaaatgttaatgacaaaataacaatgtcacccacccaacagggtctttaatatgattaaataatcatgaaatacttcttgaaggataaatcagagagaatagctaggaaatttccaaaaataaagagcagtaggagagtatttgttctgctagctattaaaatgtattctaaagcacagttgtaaaaacagtatagtactgtgatggaaataactagatcagaggaacagagtagagagtccagaaataggtgataaatcaataaaggtgtatttcaagttagtggcaatgggatgcatggactagcaaatggtgttagaaaaaatctcctatccattagagggaaataagaaattcctaagcttaggtagtatatcaaaataatttccaaatagcattaaattaaaaaaatcattaaaatcttagaaaaaagaatatttatattattttgggtaagaaaagacttaaaacatgtcacttttggtcccacatacaaatatcgtaaacaaagttaaaaagcaaaagggtgggaaaagtgtttacaacatcaatgatgaacaaagaattaatattcttagtatacaaatttattcgttcattcaatatttattgagcacttagtatgtactagaaagtattctgggcactaagggcacaagcagtaaataatgttcctgttctcctggtacttagaccctgatggagaggactgccagtgactatggtagattattgtaggtcacattttgataagggctaaggacaaaacattacgtaggtggctgggctagggaggcttggcagggtttgcattatgtggatattcaagggggcttcactgatggaatgacatgtgaagaaaaagggaaagtcattgaatgtcgagctgatagcacatttgctgtttttggaatgtcgagctcataggatttgctgatggattgaatgcgggttgtgaaagaaaggagtcagggtggcttctaggtttggggcctggcaaccagaaggattgacataggaatgactgagaggcttggcttggagatagagttttggttatggatgtttcagtttaacatctctcttgtatattcaagtgaggacgtcagggaggtggtcggccataaatatctgtaattcagggtgacatctaggctggagatataaatttgggaattgttgcagtgttgatagtatttgaaagaatgacactagctagagcccctggagagtgtgtgtagatacagaagagggcccaggacatccatgggaccctcccttagagttgagggagatggagccagctaaagagagcaaaaaggagtgaccactgaaatggaaggagtcccgtgagaagggggatctcccaagccaagagacagtgagaagggcgaggtcagctctcctctggatgtgctgatgggcaaggagagaactggccattggatctagcagtgaggaggtcactggtcaacccaacaagggctgttttatgggaatgatggggagagaatctgtttggagttggattattgagaataagaggaaaaaaactggagacagagaaatgggacaatagctggaggaggatggtattcaagtaagtttatttttcccaagatgggagttacataactcttgttttcacccaagtggaaatgattcagtagcgtggggagagtggatggtgcaggattgggctggggtgagggttctgaaatggtggtctcgaggaggtgggagaggtagaatccaggcatgagctggggaagggatcctaagtaggagcatctaaggaggtggtaggtgtgcacctgcctcttttctcagttcactaagaagcagagtcctcagcggagaatggagactaaggagacgatggaagtttgaggagagagggcaaagtatgaagtccttcatagcagaatgagaaaataaatggccaggggaatgaaggattgctgggcggcatgcaggcctctaaggggtatgtttctccagccatgtcctgttacacaggtgaacacggggtaggaggccattgtggtagaaaaacaggacatgagcagacacaacgtaagacagagaaacgcctgtaaagagaaaaagcaacatcagtaatagctgaagaatacaagtaaaaacaatgaggttttctttttttctctttagactggcaagagctcttgttggggatagaaattattgtcgcttttctggagcacagtgttacagtatgttccagaatacaacgtgtgtcccgttttgacctgtcagtcccacctttagaaatttattctaagaaataattgctcaaatgcaaggaaatatatgcacaaagatgttcaccccagcagtgcttatcaaagtgaaaaaatggcagtcatctaaacaggaggcagctggttcacttatctgtcggcctaacagtgatagtgggaaacagtagctcacactcaccctcctgttttgcagatgagggaagttgggtccagagaggggtagtgacagctccagtcctactccacggagctcagaccccctggctgtaggcaggcaccctgcccaacctcttcaactgggcttggagtcagagtcccttgcaaggcacttgtcaagcccttttcaagggccggtttgcttaatgcttttaaaatacgagttctcaaaatgttttgcaaatttgtttacaatgtcttcatttcatctcatggctttccttgcaaaggatgctgacagtggggggaaaacaggccgactgcctggccgtgatagaggggaccatattttcctgattcccaagtaagacttacagtggaagaaaggatattttctgctttcttacagtgtttacaaaagtcataacaggatgtgaggactatctggctgcaacatctgtcaccccattggtcgccagagttgattgggctgatctggctggttaggcaggtgtcccattcctccctcaccactccatgtgcgtccctcccaaagctgtatgctcagaaaggatgaccatccccgatagaggaggactggtctttggtcaagggtatatgagtagctgcaatcttctgctagggacccccaaacaagctctcaaaagtcataacaggagtacaaagataataaggaacttgcatttatttgtttccttgatcatatgtttattgattagaagaaaataaaattagcagccagccgtggtggctcacacttgaaatctcagcactttgggaggctgagacgggcagatctcttgaggtccagagttcaagaccagcctggccaacatggtgaaaccccatctctactaaaaatacaaatattagccaggtgtggtggtgtatgcctttagtcccagcttcccagcgttttggatggctgaggcacgagagtcacttgaacctgggaggtggaggtggtagtgagctgagattgcaccactgcactccagcctgggtgacagagtgagactttgtctcaaaacaaataaaaaataaaaataaaataaaattagctttgtgtgtggagaaaagggaggaaaaataattagcattgtcagagaacatctgggttatttggtcccctccgtgggaactgccctgggttttcacttctagagtttctggttctggtttaatttttccacgccacagcacagggaccgagaagctgctcagcttctctaggcttttatgtcttcaccagaaaaatgagcgggtgggcttaaatttcctacaaaaactcttaaaataaatatgatgctctttccattctatcacatgcctgttctgggtccgggggtgtgagagatgcattagtgctgctgtaaaccagccccgggtctccccccccggccccccaccaccaaacccccaagcaccaacctgggttctccaccacttttgagagctcatcgaaataaacacacctttgtgcctcttgtaacaattccagatcatccaatggcagaccagagaatggacatttcttcaaccatcagtgatttcatgtccccgggccccaccgacctgctttccagctctcttggtaccagtggtgtggattgcaaccgcaaacggaaaggcagctccactgactaccagtaaggcctttggggcatgtcttcctcttgttaaacttggtgtcagttctcgggcatggaacatctagcagccagctactgtttcatcctggaaaaggggatgggaataaaaaacccaactctaggtggcgacacagttggtttttggctttaccttcccctagtttgtaagcaagaaggagccttcagcagtgctgaggcatttaacttccacttcctgtccccaaaatgttctacacccagagaaaaagaacagccttaaggccaagttctgtcttttacccctttcttcgtcttctttctttgctcctttgagcaagagggttaagtctatgggtgtcatctcagggggttcaaagagagctttgcctgagggcctctctgaggaagacagcaagtgtcaggtgcttaatgaatgtttatggaaggaatgagtggaggtcctctctgaaaacaatttaggaacattgatgttgtccttaaacattatttaaattagtatgaacttgttatattaaatagtatttttgtttatttttagacttgttgacttttcgtttgagtaagtaaattttcacacttacagtcatcccttctatatatgtacaaacacctagggaataaggcagtgtagaatattcaaaggcacattttgttttgccgaagcacctgcgtggaatcttacccaaatgtccatttaagaggttttcttttgtttaatgagggaaaatctccgaggaggtataccccctacagcagatgtcctttctgctgaagttcacaggtcgaatttggggagcacaatggctggaggtcagatgcccactaggagatgctatgattaatatgtaagttatcccagatgattaagacagccaacacccaggggctggagagtgggtatgagggctgtgagggcgttcttccatagcagtaactccccagcagaaagactgcgagatgttggccacaaaccctttgtcttgagcaagcgctaagggagccactgatgtgttctaaggcctctgtcatctggacctgtgggttccagcctggtcaccacccaagatttcccttgtggactctggtttgctaatcttctgtaattcatggagactcaattaattaagcaaccttaatccctttcactatcattttaatgtaactgaagtcatctgtgactgtcaggcagagctttttctcacctgagattatcacctggcctcaaggaacagatagaattctagacaaaagggagaggggagtttttgtccttccgtgcggcctgcgtgatctctgaactttagaactagctggggaaactctctgcctgtgaggaaccccagggcgtctaattgggaacactgttctagaatgcccatgatatgatccagtgctcctagaaacagctatttttgcccttgggattacattgtttgaagggccatgctctctcctttcctgtgggataaaggaaaaaggagagaggcccagctggcagtccatgccctcctgataaatgtatggattggagaaggcggtgagggggatttggaactccttcctctggggatttcagtctgttttcttctactgaaccacaggatgcaacgaaacttggttttctgaagtctgtgaaagggagggagatccttgctgtgaccccaggacttctgtggccctcagccccactacgcccctccatcccaattcctaaaatctaggggttcccacctacctgagaagcagaatatttggcagtagtgcctttgaaaagctgcctggggctctgctcagtactttgttggtactttaattccaccctcctcacttcgtcccttccctgccaaatagatatgtatgcacatttatctttgatgctcaatatgttttgcaaacagaataagcttcatttatccagaatgatggggggggagaatgagaggttatatagatatttcaatcctatggttaactaagcatttttataaacactacatattcccaattttcaaacaatcagaatatggtaaaatatatgttaacacacaaactcttttgagatgataacttttgtttgataacctgagaagctggtccaggttttatagtaagttcaagttaattttcatttgttttacccttattatacatcattaattgatactgtggctgttcgaactttatgattgtttggtttctggataaatgagagccttctgtcttatgataagaagctcttctgtatgtctttattaacatgcagtcacattctcttttgttttttcagagaaagcatggacacagacaaagatgaccctcatggaaggtaccatgaacctagtaatttgaacttcagcatccttatagccattttctttgcactgttacacattctgttacttggggcagcacccatgtcctcaactggagatgagcaaggaggccgtgagcctgtgggcgctcactgtgtccctccaacccccagtccccttgtgtgtctgcagagagatgacaggatcaggcagaagaaaacagcaatgtgtaactttgccattcatctccagagaattatgtttttatcttttgctttttcctccccccaggttagaatatacagaacaccaaggaaggataaaaaatgcaaggtaagcttggaccttattttgtctacaaagcatcctagttctggttgcttagagagcagctgaggaggctctgcatgtttggtcctgtctaagagttctgttgggcactgtcacctccttagggaataggcaggtagtgggccttggccgaggtggccttctgccctccatgctctccatactggctggcctttactctttgctgtctaagcacctttaacctgaagtggatttgaaggtagcagaaatcaatcaaggctcaagtttttccccagtcttcagcagagaacgtcttcctgactggagcgccctccgcaggagacatggctcagtgatttggttcctgggctgggacttgcctctgtcaggggcccctattgcactgcgagttgcaactgaatgcaccacatggggcatgctcggtgtctcgagtagattctctgcctgggtctgtcctgcctccagccacacttgctgacctcttcccattgcgtcctcagttcttctgccgttagtaccaggctgtgttctgaggctgcgtcatgacagactgatacagggggctgcagaaattggctgccctaaggcttcaagctcttccctcggaggccagccttagcaggagctcccatggctctgtatctgcggcagctgcagcaaactacatttccatcgttgctgcacctccttaggaggaccatcaccaatggcaggtgcacatcagtcagtgtcaccctgcctcagcgggaggagtgtgacattcctcagaggaggctcctggggacagatgtagcatctgctgcacctaggtggggacctagttttgatccaaggatgacggcgttggttactgggtgccctagtcagtgaggctgtgactggaaagaattggtgccctgcccaggtcacatggccacacagcgggctcctcacagacctcagggacagcccacggggctctggatgctctgtgctatgaagccaccacctcccttctctttcctttcacccccatttcaaaatccaatttgacaaaggctgagaggaaaagaaacgaggagaaatgaacaattcagtttactctgaagagacaatttttgtagcttttctcctgaattctaaagatgaggtaaacataaaaaaattaatactgacctggcagtgagaccattttcttggagactttagttgaaaagtctaattttaaacattctgcaaattctaaatttgccttgtcagatgaacattgaaaacagttacaactcatttatttttgtcatcttttcttgatgcttggttacattttataagaaatcgtttttcatattgttgttcagggaagctcacagtcagattgaaaagcggcgtcgggataaaatgaacagttttatagatgaattggcttctttggtaccaacatgcaacgcaatgtccaggaaattagataaacttactgtgctaaggatggctgttcagcacatgaaaacattaagaggtgagaccctgggctctattgtcctttatgtccttgcccacaaatgttaccacccttgcctagaatgttcctatccctaaggcagatgtttattacttgcaattatgtagccttcagtagtatgcctttactcttcagcaacagccgtgatgccaaatgaagtgattattgagcttatgtgggttttgacatgcaattttgcagtcacacattctcagagcatagaaactgtgctttgcacgtctctgtatatgcatgtaatcaggctatgtgcctatcagagatgatactgctctgatgtctcacatcttgcctatgtttgtgcctggatcccatccttacaattataacacgcagaaatgtaggtgcacacagtgacacagaaaagtcagttcaaagatgaaaattcatcatggttcctttgaaaagtgagtcatgggttgtgggttctcgcgacattttgttgtcaggaatgaacactgaagatattttcatcttcctggaattttcccgaaccagatccactctttgtgagggaggcagtattttccttcttttctgagtgtggggagggtgagaaaacataggcagaaaagtggaagtgacttatccaaaccacaagagaaatctgaaatatatcaggcattttagtgaatgctgttcctggaattttccatagctagtcttggacttttggaggaaattggaaagtgggcgctcagtcagatctctgacctgcgtggtagaagaattgcgtctttttatatttgcacaaggccaccagaaataagaagtagctggttttgtctgactttagatcattacccaaaaatataaatgttgtatcctgtgctggaagaatggcatttaaaaattcatattagcaaagataacatgggttaaattattataaactaatttctattaaattggaaaaaagtggcaaatctcaagttacagtaaagagcagggatagggatcaataggatggttgcaacacgtcctgtctccttccctccccatggtactttgaattgttacagatccatttccttttattccttcactattctactcgctattctacagactccaaatcatttactgctggcatttttctctgttaagtgattgttctcctgaaaaatgccagattgacagccttttaaacctaagtcttgtcccctttcagtcctgggagtgcgagctgcattgactgaagcaatgcattcctccacattgccacgctcgtttaactcacccctgatgaagagtaactcacattaaatgccttccacaatatatttactcagggcctggaagactgaatggtttcccaagaacatttagagtggtgatttgaaggactaccagacaacccatttaatacagatcttaggaggagggaactctctgaggagcctctaccagtttacttccagagctgccttctttcttagaagcagattgttaaacttccttctattatctcttggttttccctgtaatgagaaaaacaggcttgttaggtctcctgtgggtaacagtgttctctcttccatggaattctctttggcttacaggattctgtccaaagccagatctaggctcatctcagttaaggcctaaacaataaaatttaaataccaggtcatagagactaggccacttacagaaggtttgaggcagcaagttagaatgagacattttctgaatatcaagtataccaattctttctctttttgcccctaaggtgccaccaatccatacacagaagcaaactacaaaccaacttttctatcagacgatgaattgaaacacctcattctcagggtatgttcaattatgggattgttttacaacgtttgtttttataaattttcaagtaagtaccagcatgtgggaatttgatgtttcaacactgagcttttttttttaggcctgcttcctctctcaggtccctccctttatcttattgtttggacaggcttcacatttcttccacaaaaccattctcctcctcttttaacctcgtctagacaaaaatggaaggtctatgccaccgcaatttaaaatcagaagagtcaggatttgttaaaaataagggggatttgagaatcacatttctgcatgaagattttaggaagggactgaaaccaacaacaattgagaatttctcttcacctgatttaaccactagcacaaaaaagtccacctaaatctttacaccaaaatctcatcaaaataacaaaactgtggctcacgcctataatcccagcactttgagaggccaagacgggcagatcacctgaggtcgagtttgagaccagcatggccaacatgttgaaaccctgtctctattaaatatataaaaattagctgggtgtggtggcagatgccttcttgggaggctgagacatgagaattgcttgaacctgggaggtggaggttgcagtaagctgagatcactccactgcactccagcttgggcaacagagtgagactctgtctcaaaaaacaaacaaacttacaaagactagtggtccaaaaaagaaaaataaatgcaagagatatatgctttcacctgcttgacttgagtgctctctctgtcttgctaaatctctgctgggagatggttgaggtggcactatgggaacctgttgtcttccatgaagaattaggtcggcacaaagctctaagttgtgttactaggtaaagtgagattaacttgggaattgaagggaaagaaactggattcagaaacgtgttcttgtagattgtaaacagatgaatagaaaaacgtaactaaaaggaaggatacccgcttccacctcccacaaagtcagggctgaccttacctgcacagccaacagaatcttcctacccatctttgagcagaagtttgcaaagctctagagtagagggtagtccatctggaattttgcatcatcactatccattttcagctctctataagcctggcctgtctgctcactccagcattctctatttatctcctcatgacgtgctatctcaaattggaaagcattcacctgcaaggaccagaagacctgatgaataaatagagtttaatttctcaagtataactggtctggagtaggttatgttgggttgctgcagtggttcaatgaggtcaataggaaccaggttctttgtctttgcactcagccacaccaagctagcatgctagcttgtttccttaatgtagccaggtacctttgccaggtctaagtagccagacccactgtaaaaacaggggtaaatgaagctctagtctggctgtcctttttatcaagaaaggatacaccttcctgaaaactcaacagtggacttcagcttattcaaaagtgtgtcacttggtcacgcctagctgcagggcagggtgcagaaacaagtgtttatagattttccagcctccctggtggagacaggcaagagagaaggggcctgggaatggtgttgggaattggcttccccaacagtgtttgccacacacactttccagagccacatgcatttgctcgattccttccagaagtgactcccacaacccaatatagtgcttcaactgtggtctgattggcctgaggttgaatgggactagtgccttccttgccaaaaaagccatctgattagtactgtatcatttggggcagctgcagtactgcctcctcccccttctctcctgaatatgaattattgttaggtcaggttttttacatcttgtataggtgcttttttgaacttaagataggacttctctttcatttctgtcaaaacctgtttgttgaatggccccacagtccagcttgtcattagtgacccttggaatctttgtgtgacttgtagatccaatacatgcctctgtgcctttcatccttgtttattcataaattcaacaaacatttttgtttacttactagatgcatggcattgttctaggaacatccaaatcaatgataaacactttagggtgggaccaggctcccgatcaagtgagtgatagtcttttggctaccactctcaggacacagttattcaaacacccaactttgcccacctctccatccttttcgtaaagatgtccgtgttctcagagaggatttgctgaggttaaaatatgaccgatgcctgtagcatctcgagagctgccgtcggtgccagcttcatgggcatgtgacctctgcagtttcacaaggccccatgcttggtttaatgccctgtcaccatcttgaaaacgtaatttttgaacaaggatccctgcattttcattttgtactgggccccacaaattatgtaactggtcctgattcccatactggtaacagatctgcagctgtagatgtgataggcctgcctctatgcctttcattcttgcgtattcatgaattcaacaaacccttttgtgtacttactagaggcttggcattgttctaggaacatccaaatcaatgacattttgggctggggtacaggcttgattattttaagaaaaagaatctatgtctttatttcatatatatatatatatatatatatatatatatatatatatgtaaaataattatcaagcagagtcctgtggatggacaaatttaaaaataaataaaacaagctccttttgcagtggcacgtgcttaatcgttttcttgttgctgcttttcttaataattttctatcagatacccatacttaccagggtatggaacaaggattatcatgctatctcagctaaatacttcatgttgggcttgtctcttctactcccttgtttatgcagcactcaagagtgatctctcttgcccgatgaaggttttgtcacctctctagcacgtgtcagtggctgtgaaatactgtccagtcccttatcacttccagggtcccagttccagggacttgcttccacagaaagccaggtctactcagatgatgttcagacagtttggccgcaggagctggacttctgcttttcctcagcaatgcaaaatggacaaactgctttctttactaagtgctttcaaaatatctttaataaagtgtatgtcagggatcagtcaactgtatcagtttacaatgtctacgttagtctacttccccatgttttgaaaactaggcagaccgtaccaaggcctctgtgtcttttattaaccagcaccatcttcccaagagtgaccctgccactggctggcccctgtggctctgtggtgctggtagtgttctcacagcttctgctccttagctgtccttcgggcccggctccttcacagatggtctgctggccagggtgctatggagttggaatgtccagagcctcccctcgctgatgcattcactgctttggaacctgctggctttcctctggagtactgaaatagctttacctgtgttgtcggttcaggcctgaccctgcccagcattacctccagggtgtcacagttcccttctgtccaggtacctttcaagccacattgccacatcaatgaaaagcctcaaaaacacttccatgagatacaagattatctgcaaggcaaacgaggaagtttttaataccctatttgttgacagaatgaggcttccagcagatggtgcttggaaagttacttccccctcactgtcatcccttgcccctgggccagcttagggacctaacttaggaaaggatcctccccagcttccttctggctgagtagcctgccagggtcttaagcaacagtgattctgttcccctctcactcatttcttctgtcccagcacaagtacatgcaccattcttttaccttctggcacattaattcatttcctagttctttgaattaaaccacatcatgaaggcccttttgtggaaaaagagaacagtttctctgtatttttccaaagagcagattaaggaccagtgaataaggtgagaaactagtccactgtgtattagaacgagggagggctgagtcataagagcaagggcatgacagagtggggcacaccctccttgtcaccggaagaccccagcaggagttgagtggttgtatgtctggaaggcagtgggtgggattcacacagcccaagctctcaggcactatagcttgggtatttacctgcttcagtctctttaccaaatgttgtcctatcttaatggctggctttattggaacatttagattttttcctgtatttaaactgaagaaggggtaagaagaatctaagcggggagttttgcttttctgaatgcaaatagtccggccctggatggagggataacatttgagagtagtagttctcagccctatgtacattagaatcacattaacgtggaagtgggatgggtttaaaaataccccagtgatcagccccatgccagaccatcagcataaaaacaaaaacaaaaaacactgctccgaatgttgagaaccactgttttagagagctccctgtacgtggaggttttcaagttgaaggcagatgatggctgagatgttggagaggggattcttgaagagtccttccaaatctcagattctctgactctccatagagttgttattattagagcaatgaaatatgattctctggaccatgataccttcaaaagaacacgtgcaagctgaattctgctttgaaatataacttactttaattggactttcttcctataataattagatgatatgcagaaacacacacacacacacacacacacacacacacacacacaatcttacagttcttcagagacgtttgttttcagcatcctgcactcaggatatcactgaaactgttagtgttcctgtgctttggatgcttagaaagcacatcctctatttgttatcagggtgattacaaattatgtttcctacagtatgagaaattgattatccatttctcctgattaggcagcagatggatttttgtttgtcgtaggatgtgaccgagggaagatactctttgtctcagagtctgtcttcaagatcctcaactacagccaggtattgttcatgctcctgttgatggtgggcagcctcacagcagtcagaagtgtcactcaattttgtcagaataattatagtatacaagtcacatgtgaacttcttccagaaaattcttaacttcttaacagataaattaatttagacttagaacaatcttgtaatatgttccgtattccccccattgaaagatctgactctgatctgatcgatagcattatggctttcttctattgctgcaaaataaatatcccacaatatgtggcaaggacagagggtaagaggctatctgacaagggagaaaggtaggcaggttaacacaataccagagaatacgtcacttggaaatccactccatactgtgtttgcagtgctgtgtcacttcttagctctattgaacctcagtttactctaaaaattaatgataacttataggatcaaataagagtaacatttataaacgcttctagaacagaacttttcacctattatgtcccccagagtttttattcatttattcattcactcacacactggtatttgcatggaagcttggtaggcagaagacttgaagaatcaaaatgacatttatgtaaattagaattaatgtaaatttaatttttccaaagatttctgctctttttagtctcagagcaaagttatggaggaagttgctgttatctctgttaatagacaaggtgactgaagcatatgatatgcgtgacttgcttgagaacagagaggctgaacagcagagctggaatcagagcccacccctatcttctgccttctgaggtcttacaggggaattccaagattgttgccttagaagagcataaactgtttatataattgagggttttcccgtcatgttatcaaaaccaacctccagatgcctccttcctggtgtcaggcaaagtggttggacatatgtacaggttcacataggaaaagtttgaggtctcatgcacaaaaacacaaaggcaacatgcagactgtgcatgcttacttgttgcataattgattttctgcatgcaattgacttgtcatgtttaacatttcatctccccagaatgatctgattggtcagagtttgtttgactacctgcatcctaaagatattgccaaagtcaaggagcagctctcctcctctgacaccgcaccccgggagcggctcatagatgcaaaaagtgagtaccagagaggcctcgcatttcctcagcagcccactcacaggcagccaaccctgagtgagcagagggcgggtgtgtgtgatgggctcagcctttccagtcctacttctctgtcctctttctggggcaccagagctatctttggctaaatggaattatttatgttctttggtcttttacataaaaagaagaaaaaaatctcaatgtccaaatttattgaaaagaagagctatttagactggattctttctgatttttagacttttcttttttctttcagaatctagaaaatcccagttgtatgctcctgagtttaaagggctaagtttgatttgttctcccagaacaaatgggctctatttacctgaattgcacacaggcagcctcataaaagtaagaaaacgtcaactataaatatggtgtttcttcaaccaaagtgttcctccttaggttggctcccccacctggctttcttcttttgcagtagtggaaccaccatccacatcgctccctctgcccccagcttcctgctactgcacacacttctgtgcaaggccccagtagctgtcatctactttagtcctgtgggaggctgtacactcctacagttaagaatgagagaatgaggactctggctgggcgcagtggctcacatctgtaatcccagcacttcgggaggctgaggcaggtggatctcttgaggtcaggggtttgcaaccaacctggccaacatggcaaaaccccgtctctactaataatacaaaaattagacaggtgtggtggtgcgtgcctgtaatccaagctacttgggaggctgaggcaggagagtttcttgaatccaggaggtgggggttgcagtaagctgagattgtaccactgactgcactccagcctgggtaacagagcaagactctgtctcagaaaaaaaaaaaaaaaaaaaaagaatgagaacacaagggagattactgggctcattccggctccaccattcactagctgtgtgaccttgagcaagttacttaacctctctctgtctcagttttctcatttatggaagagtacctatttctttgggttgttgtgaggattgaaagtgttaatgtatataaagcaggcagaacagttcctagcacatagtaagaacagtatcagtgtggcctaatgtcttgctcccaagctgtccacgttaatccctggaaaaaaataccaccagataatctccttcaagtcatctctttcattacagcacaccgcttgttcctaaaagtaaaatgcagactttggtatctgttgttctttatagtctagccttggcttttttaagtgaccttaggagaaaaatatgaatggcatttgggccttgcctttgaggctcttagcatatagtcagagaaatgagacagacagcaccctgcatagtaataggtacagccatagaaatagtgccaggcatagagaacggatgattaattctcatgtgggcgcaaggacaggcatcactgagtagatgacaaccgaggtgggtttgaaaagatgaattaatgtttgccaggtaatgaagggaggaacaaagaggaaacaatctgtgcacaggtgcaggggtgtggagccacatggcttgcttggtgctattggacaaaacgtgcacggaggggaagggctgaaccatgaagaccatttgttctgtggggacacagtgaagagctctgagttgggtggggcaggctcggattggcattctaggggagatcgcagagctggcaatgtgggaggtagatgggatgggaggaagcccagaaggagccctgggcagtggccattcctcggcacacttgctcgtgtgatggccatgggtgtgttttccctcggcttctgtactgacacctagccagtgtttggtaaggaggtgtgctcctcagaatcacctgggagcttttcaacatagtcatgctccacccccagagattctaatttggtttttccagacagcacagtccaataaaaacataatgcaaaccacaaacatgagccacatatataatttcatattttctggtagccagactttaaaaaataaaaataaatgtaaaattaactccaaaatatttcagcatgtaataattataaacaactaataagttcgttcacattcttttatttttctatactgtctttgaaatcctgtgtgtatttaacacttacagcacatttcaattcagaaaagccacatttcaagtgctcagtacctgcatgcagctagtggctaatgcattggacagcacagatctagaatggggtccaggaatctgtaggttgatcatgcatccagggtattctggcctacaagccaggttgagaacttaaggcagtccggctcccaccttgccttcccaatatccatatcctacccatccttcagtgccagcccaagttccttctcctctgggaagcacaggttgtctttgccatttatttggcactaatcatacatcaccctgtcctattattaatcttttcttggtgcacctccatttgccctttgttagccataagcgtctattgggcaagaaccccatactatatttcttttcatccccagagtacctaatccatttatttagtagcacactctgtgatttataaacatttccagactgacaacacacctgtccatgctgcatctgttaaagcctaaacttgggagatatttatctcatgtcatcattataaaacagtgaggcaggcaagaaaaggctttgctcaaggtcacactccccctcctgacagacaacactgctctcagtttatcacattttgtgtattgatttgcagctggacttccagttaaaacagatataacccctgggccatctcgattatgttctggagcacgacgttctttcttctgtaggatgaagtgtaacaggccttcagtaaaggttgaagacaaggacttcccctctacctgctcaaagaaaaaaggtaacaatttaacagtccattaaaaccctgtgacaggtgaagcatgctttctgcagcggagctctcagctgggcgttggttccatggtttctggctggccagagtggcaggtcccaggactgcagacaggaccctgcagtcctccctatgtgtagggcagttgggagcagaggagagagctgaaaagcctgatggcagagatttgtggagaggcctcctctgtttaaattgtgtttcttttaacatgattgaggaagaatactctcagccacaatcctaactgccttatgaacagccaccagtccaccaaaattactctgagctcaccagtgaccttgatgttgttaaatgcgatgaacatttttcctttgtcttccttcttgaagtgttctcttctcctggattccatgaaaccacattcttcttcctcctccccgaccccctgctgctacaggctctcttgctggcccctttgctggctgcccctctctgtcctgggctgcatctctgtctgcagtctctctctgttggtcatgtcatctactccctcagctttaaatgccaacaacttccacattcatatttccagcctagacttgtcttttgaactccagattcataaatatactgcttactaaatcaacctgctttggatatctcaggggagtctccaacaggatacgtgccgaagtaatcacctgagcctctcctccagcataaatggcactgccattcagctggctgctcatgctagaagccggggaggtgccctcacttctgcttcaccaccccactcttcaatcccgttagttatgaagtcctgccacaatgagtcccatctgcaaaagttctctgaaatgtttgtccctttccatgctgcctactttcactcagctccaggctgcccccaactctcaccaggtctcataaagtgtagacccacatgctccccacccccaacacagcagccaggatgatctttttatcagtccccttttaaaaacccttcagtgttccctattgttcttgaagaaaagctcaaaatatttaacgtgaccatgcagcccccgaccctgccactaagcacatgtgagccatgttgacttcctttgatgcctcaagccccttctgggcaatgcttctgcacatgctgtcgcttcctggttggaatttcttccctctccccatgaactcccttcacatggctctctccaacctcagactgccttatgtcttatagcaccctactggtttgctttctagtgctttcttatacttgctgttatatagttatttgtgcgattatttgtttaaagtctgtctcccccactaggctgtaaactccacaagggcatgtctgatttgtttttcactctattccagtaaccagcacagactccacgcttggcagacactccatagtggtttgcttgttggtgaagtctataggtgctccacatttaatgtgtcccaaatcgaactatcttttttctctctctctcttctagtctgttttctttcttctctgagtcagtgaatgacaccagcaaccacccaatccagaaaagttagagtcatcttcatttgtttctttcccttaagcctgatattcacagcaaatcccaacagtttgatctcagaaatttctcctgctttctttctctgctccctctcatcttcactgcactgccatagttcagtcctcctaatctcttgctgtattatagccactggcccctgaatcagccttcctacttctgttttctactgtcttccagttcatacgtcactctgctcctacagcatccaaaccacaatttgattttgctgtttctgcacttaaatacctgtagatgctctccatttcctgccttaaaaagacagaccaacattggttagaaagtaatccaaggcccttttaatcttcctccaacctgcctttccaatttgcccctcactcccagtacctccaatttcacttcaaccacacagagctcttggccagttcctatataggctgtgcctctgtgcctgtgtacgtcatcagcctttatacattctagtccctcagccactgctcatccttcttgatccacctcctctactggttttttgggggagccttcctctccctaggaagagttagatattccttccttggtgtatgtaatgaatgtccatggtataactggccctacttaagcattctgacactggatgacagtttgtttctctttccgtctgcccctttcattagatgcttacttctggagagtgaagccttgatttttttttattttttgactccctacctacatcccatcccaccatcggccgtgtacacctccatggcccaaacctagtgctgacactaaccacgaactttgctttctagcagatcgaaaaagcttctgcacaatccacagcacaggctatttgaaaagctggccacccacaaagatggggctggatgaagacaacgaaccagacaatgaggggtgtaacctcagctgcctcgtcgcaattggacgactgcattctcatgtagttccacaaccagtgaacggggaaatcagggtgaaatctatggaatatgtttctcggcacgcgatagatggaaagtttgtttttgtagaccagaggtaagagtctacatactacccttgagcaatgatggtagaggattttcaaccctgatctaaaaagcagagaagactgggccatcagctggcttttctaagaatgaagaaagaaagaaaaagctgggtgcagtggctcacacctcaaatcccagcactttttgaggccaaggtgggtggatcacttgagcccaggagtttgagactagcctgggcaacgtggcaaaaccctgtctcaactaaaaatacaaaaattagccaggcatggtgacacatacctgtagtcccatctactctggaggctgaagcaggaggatcagctgagcctcgggaggtcaaggctgcagtgagctgtgattgcaccactgcacttccgcctgggcaacagagtgagaccctgtttcaaaaaaaaagagacaaatgatgagagtctctgttaaaaaatgagattcaataggatatcatcataaatacagagatttttctgtcattctttggcatatagagacaattaagtggggtgccttgatgtccatggctaaaagaaaaacagtagggatagcatgctgtctgaatctatggaatgttccagaaccattattgtgattgaaattcttttgaatctaggacttggaagcaattatttagtcctgagctgtccaataaaatactcgttggccatggtagcctcccatgtggctaacggcacagacatagaacatttccatcatcacagaaagtcttgttggacagcgttgatctaatccaacctccttattttatggatgaagaacagaggccagcctggggactggtctcctgtaggattcacaattaattggtaatagacctggaccaaggacccaggtgtcccaaatttactgctgcctactgctttccctcagaatatgcacaggctaataatttttctggctactagagacagccacaacatgctggaaaaagagacagcctcagctgtcttgtggcctcagctgctgcagcttctggcatttggttgtcctgataaaaaggaggcagcaaaaactagaagccttgcactgaggtttagatttataccacattttaatctaattaatgtggttccttttttaaagacagatctcagtctgtcacccaggctagatctagtgcagtggcgagatcttggcttactgtagccttgacctcccgggctcaagcagtcctcccacctcagcctcccaggtagctgtgaccataggcatgtgccaccatacccagctcattgttctgtgtttttggtaaagacagggtttcaccatgttgcccaagctaatcttgaattcctgagctcagacaatctgcccaactcggcctcccaaagtgctgggatgacaggcatgaaccaccatgcccgactggttgcaatttttaaagccccctcagatttgatttcttgtgataatagtccctttacaaaggctttgctctgtttccctctatttttatagccttgattaaattcagatgcctgaaaaaaagagagaaagatccacacagtgagccctctgaaaatccatccagctcttttgcctgcagctttgaccttgctctcataggctgtagcagggtttatccattgcaaagttgcaattaatcatctgaatggctttttcttctttaaatattcctttattcccttttagggcaacagctattttggcatatttaccacaagaacttctaggcacatcgtgttatgaatattttcaccaagatgacataggacatcttgcagaatgtcataggcaaggtaagctaggatgtatgaaagatcttaagttgaaagtgtccccttgcttctagactagtcaacatgaccttccagggaaatctgtccactgaggatgtagagtcagccagcctaggactcttcaggtcagaacatctgtgtgaagaggaagctgatacctgcaggcactgtttatcccccttgtagttgccctgtgctgactgcatggcagtttctgaaagacatctcttgttcagagggttttcccagaccctgtaaagatttagtatggcccagactgatctgattctcttttccattcaagcctgcactacctcctgtgttttctgtcttgactaatgctgtggcttcatgtgcaggctcctgagagagaccaacattgaccccttctttcactgtgtctccaccagatcctgttcattcacctcagacatgcatttccaaaagtctactttttaccacctctgccatcaccctggttcaggccctcgtgcctacttagagacctgtgatagacttctcagggtttctctgatccctctcacccccagttcatcttccatagttatcctatttatccccagatagattgagcctggtaacatcagcctgcttaaaaacctcctgctttagactcaagcccaaatgcttttgacaggcaatcaaatgtgagaccttccaccttctggccccagcccacctcctcagtttcagtccccatccctgcctgcagaggcctgtgctccaggcacactgacctcactggcctctccccaaccagaccctgctgctcctcaggcactgctgggttcttccctccctccttctcttggcaaactcgtgttcatccctcaaggctctgatctcttctccctgtatagccttccctcactactcttcttgagggcaggagtcatagcctgtctcctcttgtatctccagtgcctggcacatgagaagggctcattacatgttacatgaaagaatgaggttgaataggtgagtagcctctgttgatttggatgttcttagaaatgagataagttctatattgcccttgggctttgtgattgagataaagcatgacattttggacagtgccttctcatttgctggtggtcatgttagagctgattccagttagatgtataacatgcagtcagtaattccctagagcctcaattttacagactatggaaaatcatgacagcttcacaaatgaattgaaaggctctgagttagaccctcagaaacaacctatttcctgagtgttgaccactgcagtttccttggcttactaaagagcgatgtcgttggagctcaagtacctttaatattttgtattggatgtcctgtttaatactttggtctgagaaaacaacaatgtccatgttttctttacattttcagttttacagacgagagaaaaaattacaactaattgctataaatttaaaatcaaagatggttcttttatcacactacggagtcgatggttcagtttcatgaacccttggaccaaggaagtagaatatattgtctcaactaacactgttgttttgtaagtacttttcctatatctgaagctccccttgcttcaaacagatgcctagggttcctcatctgggaaatggggtgcaggcaacatccagtatcacatcctttaatgccatcttgctaatacctgtgaagcctcaggactggcagaagctagaaaggattgttaacaaagggacaagcttcaggacttgtaccatgcaggccctggcttatgaaactgctccaggaaatagcaacatttccttccagataaagcagctaacctttgaattccacaggccctgcaccctaggcatccacttgtgctgctgtggaggaaggggttggcaatctatgaaaggctcattcaggcactagctcacactggccttggctgaggatggggaggtctccatacctgtcaggcagggggcccaagcactggcagctggaatgccatctcaaaaggctgctacctgctagatgagcagagggaggtgaaggagcctctctttggccaggcctgctccccacttttccttccccatagtgtccaaaaccccacctatggtaagagctgtgtgaggggccggggctaggtgcactgcaggctggcaggaggaggtgctgtaatgatggcagtaggttactgcagccaccacctctgctgaactgtgtcccacacatattaggaaggcctaggcaggcagtggggccaaaggccaggatgctatccattatattatcaaacagtgagacctgtttacccactcagacagacacttcattttctggcctgtccaggtccagagtggacaccggacaccttggccaagttgaatggtgcacagttctgagcaggcctgactcacgtttccttattgctgggatgttcacagagccaacgtcctggaaggcggggacccaaccttcccacagctcacagcatccccccacagcatggacagcatgctgccctctggagaaggtaactatgtgctgctggggccctggggcttgcccgtgggaaggtgcttgtggtcaaatatcctcccctaaagtattcagggtcccctccattcatattctgtggaacaagggaggcctcgaggggatgatgtgcggatttccccatgaatgcagaggacactgtcatgtcactttctctgttgagccggaatactaggagctcactgctgcacttcccaaagctgctggcccctggaagcccttgagctcgcaaactccctactccccttgtgctttcctcctgtgttggctagtggccatgatgtgaagtgctctttcgtgactgtcactaactcctgtggttggcaggcaggtgtctttcggcaccagggtgtgtaccatacccactgggctcccttctcaggctcagccttggccctgcccctgctgtccacgctggactcatccttcctgggaccatccccacatgcatggctgcagcccccatcgatgactcccacatccacatctcctggcccagtctctctcccgagctccagatctgtctctccaaatgcctcatagacagaaccacctggagtctcagaggcacctgaaattcagaatatcccaagctgattttctgcactcccctacctgattggttgtttaagccagaaacctggctgttgtctctcccccattatatctaaacacggagtcctgaaccttctatctcttaaacttcgtcaccactattgctatttcaccctcctcatctgctgcctggattattgcaaatcacttcgcaactctagtccccctctccccaccccatcctccattgtagttcattctccctgccgtggactttctaataacccagttctcatttgtgccttttctgtgtatcgtcctttggtactcctcattcccttgtggaaactgtccaaattcgttagtacggcatccaagaggcccctcatgatcggattggtacctgctgccccagtttcatctatcatgctctcatcatcatttatgatgaattccttggaggagtctcccaagttttaacctgcctcagtgctcctgcacgtgttggttgctgtgcctggaatgctttctcctccttacctctctgccaagctaattcatattcatctctcaagactcagctcggggttaacttgctccagaagctgcacctggccccagatgagttggttgcctcgtgcttgcctgtcaaacttacaacattttgctttagccattgttcatcttgttggttttcctgttaaactgtgagctccttgagggcagggacttgtctctgtaaccctggcacatacagtggtcttcaataaacgttttttttcagtgcatgaagggaaagaattagatgctgtatgaagggaaaaaactggcctcagatcctagaaggaaacttgagcctttccctgctggaatgccttttcctgacaagctgtagccctaaagtccctcaaggcacaactctgatgttgaactgcaaatggatcatgggataaactggttttactttaatacataatagtatttcttcctcagttttcccctttcctactctcagattcctttgttgtaggtggcccaaagaggacccaccccactgttccagggattccagggggaacccgggctggggcaggaaaaataggccgaatgattgctgaggaaatcatggaaatccacaggcaagtaacaccttctagttcctctgttaaaccagtggttctcaacccagggaaattttttcccccaggcaatattttgcaatgtcaggagacatttttggtcttcacaactgggtgggaggttgctacttaaacatcctgtggatagagaccagggatgctgcttgttaaacatcctacagtaaacaggacagttccctcctccccacccaacaaagaattatccaatccaaaatgttagtagtgcctagattaagaaatcctgccttaaataaagaagctaaaccaaaatagcccagcgctaaagagaattcttgagaagacttaactttcttatggctcaaggagcttctcagtgcggatagatgtacctttactttacaggaatgcaggagtagagctgtgaactatcagagtgatctggaccttaacaaaacattcactttttttcaatcaaagagctgcccaggattagtactagaaaccaagcagatcagctagttattactagctgtcttgggagagacttcctttccatatgaaagagaaggagcttagaagcagtccacctgggtctgagtcctgggcctgtctctctacctggctatgctgagacttacttaacctcttgctctctgttgatttaaaccataaaaagaaagcactatttcccaagaattgtgttaggattgtgagggcactcaggaaagttccaggaacacagcctgacatatagtgagtgcttaaaaattaattaaatctgtctttaagagcagtcgagagggaagcagttatcataagtctgtccaaatttggggaatagagaaggtggtaaccagattcttcagaacgaaacttaatgtaacataagaaaaggaagaaaacactgctgccgctggattctctcaggagaattagaggctggcctgttttccaattggccataaaggggctgttatccccctataggtaacacagctcttttccaaccccacaggattagtgggtgtgacttctgcatcaggaaggagacatgagggtagtgtgcagtgtaatcaggttcaaaccctatactttgcatttgcataccctgtattttgcttgagaccatccaagaacagtatcaaacagtccttgacctcaagaattttaaaatcttttataagtctattttctttatgataacaggaaaaagggagggtgcatgggccaaagcaagcaaaagaggaaagatttgaacttggccttagccagggtttgcaataagagtggatgttccctctagaaaagccagggctattcttgagtgggcatgtgagtggcaaattcagggtcaagaaacaagctacctaactgggcaggctttgtgtaggaaggagacacagagctatgataggcgattaagaaacacaagaaatgatactgtgcagtttggaagaaacctgtaagaccccatttgttgtaggatgctgaacaagcatccaaagtcttgtgttacgctttgtggaagttgcattggaatagggagagatgaaggtgggcatgtttgacaactcaggaatgaggccttatcctacagagatgacactgccaaaagagaaatcaatcatctaaggtctagcgtttgaagatgaaatcaggaatgatgaaacagcaattccaagatgagaaacctgggaaaatagtggtttcatagacataagtagagaaaggtgggggacactcagcaatttttccgtaagcaattagcagccgtttgtgcatgctgagaatacatgatatgtagttgtaaactgccgttaagaagcttctaatccagaaagaaaacttgttcactcataaatctagagaactaggcagtacaagaaccaaaagacttctgggtggtggaggagtggtctctgggtcacccaaaagctacattcatccatgtaggagctgagagtcctgtggttacacaactgccatcacactctccctaaactgtagctgcaatgccaagtgatggattctttcctgaggtccttcagcctgacaagtatttaggtggatttacagttctaagtcttcccttctataaatcttctgagagatatgctagataagaaaggcctggacccatttttcatcaaccactgccttcgaaggctgcttttcctgtcactactactaggctaccttttagaccctggtgccgtccatgtcctaagagtattcactagctaaacagtgtttgtggagaaggggacaaattgttttctgtggatcaaagatggaggttgatcttagaagttctcctccaattcacctggattctgtgaggaaataaaactggccacttacttgaaattcaccaactgaatgcaaactccaatccaagggctttgtcagtgagatgcttgactctagggactgcattctagatcaggtgcctgtagaacaaatccagcttgtcatctgtttttgtaaataaagttttattggaacacagccacaccgattcgtatctgtggctgctttcaagctgcagaggcagagttgagcatttgtgacaagacaccatatggcctagagagcctactatctggccccttacagaaaaagcttgccaaaccctaatctagatcttcatcccctttctcacctttaccccttaacaaagcacatacactccactgaaaaaagaaaaggcagtgtaattctcttttctgacaggataagagggtcatcgccttctagctgtggctccagcccattgaacatcacgagtacgcctccccctgatgcctcttctccaggaggcaagaaggtaagactgatgattcttagcctaagctagagaacctcttgcccaagatctgaaatgttgggggtgggagtatggaattgcaactgcgattgctgaaacaatttggactacttcctccttgaagtaaatgcatctgtgtgaggctggatacaaagcatactggtagggctagggaggcttgctgacatcctcagaggctttcttccatgtgagtggaagaagggagaaagaataaggaatggggaactgtcagttcatttaattgagggagcaattcaagagttcccatgagggaaagattattgagtacctcacatagaaaagtttctcattttctgccaggaattttcaagggagaaaatattagtgtctagggcaggcaatggaaacagcaatgccaccagcagtgctttggaaatcaagccatgctttatagctgcagaatacttggggatctgctgcctgggggttccattggtgtgacagcattggatccaagcagtggatcaatcaccagccctcatgaagagcttgctataagactacactataaataggtttaggaaccagtcatttgttttcatctttgctggagaacttataagcctaggcccatcttaatcgtaaattataaatctgtttatattgcctgatgccagtagagcttaggacagtttaaaggccatcattttggacacaatggcttcctttccccatctcctaaaacagagagagagaatatcaggaatttccataggcaggactcctagggcacaaaccatcaaaagcagggcaaggattttcaaaactgagctcctcggaggtttgttcaggttaccaagagctgtggtgttaccaggtgggatgggcgtggggatagttgctaaggagagagggtaagagtagaaatcctgcttctacaagggcagcaatacttcttttttatacaggaatcttctgcaaacatttctatttgaaaaagcgttttgctccccccaaaaaaggttgaaagttaacaaattaatgggtaagactacaaagtaagacctgggttcgaagcttggccttgccatgtgctagttatgtgaacttgtacaactttcaagccctagttttctttataatggagctaataatggttagggtagccagcatctttgcacgaggtcctactgtgagataatatatgtgaaagtgcttggcccaaaataccactgacagatgaagtctgagcttggtgtcccgtgacccccgcccccctgcccacaacacacacactgcttgccagctgtcttcttagctgttcttctgttatacctccaggtccttcctgcatattggatccaccatcttcttagggtggtcttccagtctctgcttcttaagttaacttttaggcacttgacttgactcctggtattaccaaggattctacttcttggttttgaaaggttatcagtccagtataggcttaaatattactcaaagaactttcatatacattgtctcatctcaccttcacaacattatagtgacaagatccaggctcctcagcgttcgttttataagtatggcccccaggctacaatcctgggctcatggcttccaattcttttcacatcaacaactaccagaaatcaaaagctgtgctctgcatcataaagccccagctatttttgaggcacttatgaaaattctcccttttctttgagaagaatggattataaaatggatctgtgagaagaaatttggatgtgttctcacgagatgagtcctgggcagcaggacttataagaaaagcagcttaaacaagacagttaaaactgacagcagtattaaatggtgcaccatacccagccctttccagtcactttcaaatttggaaggtccaaaaatgaaccatttagcctgcagttgtttgtcaggatcaagctaaaaaggaagcctaagtgagcctccataggtcgcaagagagtacagacatccagaagcactaaggaaaattcagataaagcagcagttctacaaatgtcatctgcagtctttttccagaaagagagggggcacaagatccttttaagggtctgcaaggttaaagctattttcttaataacattaaaacgttaattttttccctgtattgataatgtgcactattcatactaaaagcacggttgggtaaaattgctggcattttacaaaaatcagacaagtggcaccaaactatactagtagtcattgtattcttcaccaccacacactcacagtaaaaaaatagtttaaagccagtttcatttaagattgtccatcatggctaggtgcagtggctcacccctgtaatctcagcactctgggaagctgaggcaggcaaactgcttgagtccagcagttccaggcaagtctgggcaacatagagaaatcccatctctactaaaaaatacaaaaaaaattatccaggtgtggtggtgtacctgtaatcccagctactccggggactgaggtgggagaatcacctgagcccaggaggttgaggctgcagtgagctgagattgtgccactgtactccagcctgggcaaccagagtgagaccctatcaaggagggaaggaggaaaggaaggaagggagtgagggagggagggaaaatgtccatcattacttttataaaattctcaagcacacatctttttaatgctctgtgacaaaatgagaagtacacagaacttgtgctgcataccaaagtatgatgtttgtctcaaaaactacttgtgtgattaagttgtgagttgaactagctactattttcattggacaccatttttattgtatatggtcattcggttttgggtatttagaatactttttttttggaaatgaatgaagtgaacctgtcactttaaggaaaatgactgacatttgttgccaatgataaaatctgagctttcaagcaaaaattggaatttttagaaaacttgtctctgctactttgaccttgagatcttcctaaaacttaaaaaatgttgttgatgagatagggagtattaataatagtgatattttgatgctctataatgaaatgtgtcaatatatagaagatctgcataactcagtgaaccaatattttgtaactaaacaatgcaaggtatttcaaaatcatgtaagggtaaaagatccatcctaagtgccaagatataaagagtacaaaacattcattgatatggtttcagattccacattgcaactcacctttaagaaacttctacgtgtcaagttttgaagtggtatcaaaaaagaatacaattatttgaaaagtctattaaaatatgcctcccttttccaactacttatctgtgggaggttggatttccttcatatacttgaatcacaagacgtatctaaatagactgaatggaaaaacatatatgagaatccagttgaaaattattaagccagacattagatttgcaaaaatgtaagataatactctgcctggtaattttttgttactgttttagaaaatagttatttttcattaaaatactattcattatttatgttaacatgtagcgggtttattacatttaagaaatctattagttttaatttcaaatacagtaaatattgataaatacagcctacataagcaaaagttctttggagtcctcaatgatttttttaagagtgtaaaagggtccctagaccaaaacgttgctgtggaaataaagtaagttataatgccacctgctggcaaagcctgaaatcattgctgctcctgaaagcagcagctaccaaactgtttcctcacgtatatccagataggtctcaaagaatgctcttctttgagactcagccaggggaaggcagctggggtgagtgggggagattttgagacagagttctcttactgagtagtagtaataatcctccccagtagcctgtcttaacttaaaccacaggttactgaagttggcacctgtagtataagagatttacttctgttttcttcatttgactccttgagctgtgtctcttcacagcttgttaactccactttttcttcttcagaaatatctgtcactataagatgttttattcccttataggggaaacgtctagctgggctcattgaagtttaggcattggtcctaaagaaatatgtgggcatcatgattccaggcagttgaatgctcttgggattttattcagcctttaagttgcctctgtgggctcactaaaatggagagaaaagaatagttcgggggagaggttttttcttactctgaccatgtctgtctaacagttccttgtttgaaatcatccaatagaaaactgaagccatttgaagcttctccccaccccaccccatgcttcattttccttttggcattgctcataatactgattcaaacttcacacttccctccttttgtttgtagattttaaatggagggactccagacattccttccagtggcctactatcaggccaggctcaggagaacccaggttatccatattctgatagttcttctattcttggtaagtggcatcattattcgtttccattgcaatgagcttgcaaaacatcttacataaagtcaattttaagaactgaactgtgtgaaacaagctaatcctagataaatttgataggaacagaataaaagtttaaaatttgtttaaatctctaaaaagttgaccagtatttgagttttggtggaggtccaagtttgtgcctggaactcaagaggaggctacagctacctagacataggctttctcccatgtggggcataatctcttcagagagagaaggctaatgaaggttcagagataatgcctagaagggtgattagtaagcatatcagaaggtattaaaagtcattaagtgaaaagagtttgcttttcccatcacatccatctttttctcccctgggctttctagatctgtttttttcctaaactctcccttcctatttgcctttctttttgtaactcctcttaactggttacatcagattattaaaataagcttgactcaaatatttttaacatttactaaattttaagcgctttgtacttatttctaaaatgatcatttgattccttagagctgtctcttcacaacgtaaccccacttatttcttacgtatttttaaaaaattggttctttcctctaaaaaacagcgatataaaaaaagatagccatgcagcccaaaaagcagcatctcaccctaccattaaatgtaactttcttattaaaaatgtgcttaggaattgcttacttaatctgaagatgctttaaaaaagaaatcactgaccagtctttatctcctcccacaggtgagaacccccacataggtatagacatgattgacaacgaccaaggatcaagtagtcccagtaatgatgaggcagcaatggctgtcatcatgagcctcttggaagcagatgctggactgggtggccctgttgactttagtgacttgccatggccgctgtaaacactacatgttgctttggcaacagctatagtatcaaagtgcattactggtggagttttacagtctgtgaagcttactggataaggagagaatagcttttatgtactgacttcataaaagccatctcagagccattgatacaagtcaatcttactatatgtaacttcagacaaagtggaactaagcctgctccagtgtttcctcatcattgattattgggctagctgtggatagcttgcattaattgtatattttggattctgtttgtgttgaattttttaatcattgtgcacagaagcatcattggtagcttttatatgcaaatggtcatttcagatgtatggtgtttttacactacaaagaagtcccccatgtggatatttcttatactaattgtatcataaagccgtttattcttccttgtaagaatcctttactataaatatgggttaaagtataatgtactagacagttaaatatttttaataaatgtttcccttgttcta
